United States Patent Application Publication US 2006/0134663 A1 - sequence listing, part 18

SEQ ID NO: 28223 - DNA, 495475 bp, Homo Sapiens
  misc_feature (14162)..(14163): n is a, c, g, or t
  misc_feature (14173)..(14173): n is a, c, g, or t
  misc_feature (20582)..(20681): n is a, c, g, or t
  misc_feature (21980)..(21980): n is a, c, g, or t
  misc_feature (21992)..(21992): n is a, c, g, or t
  misc_feature (42256)..(42256): n is a, c, g, or t
  misc_feature (42260)..(42260): n is a, c, g, or t
  misc_feature (42263)..(42263): n is a, c, g, or t
  misc_feature (202648)..(202648): n is a, c, g, or t
  misc_feature (202661)..(202661): n is a, c, g, or t
  misc_feature (202663)..(202663): n is a, c, g, or t
  misc_feature (202671)..(202672): n is a, c, g, or t
  misc_feature (202680)..(202680): n is a, c, g, or t
  misc_feature (202684)..(202684): n is a, c, g, or t
  misc_feature (202686)..(202686): n is a, c, g, or t
  misc_feature (202691)..(202691): n is a, c, g, or t
  misc_feature (202696)..(202697): n is a, c, g, or t
  misc_feature (202701)..(202702): n is a, c, g, or t
  misc_feature (202712)..(202714): n is a, c, g, or t
  misc_feature (448497)..(448497): n is a, c, g, or t
  misc_feature (448499)..(448500): n is a, c, g, or t
  misc_feature (448538)..(448538): n is a, c, g, or t
attaggtcactctcctgccgacctagaatctccgcacagggcttagcttgtgctgcccagaaccccccaggagccgccctccgagggaactctcagcttctcacagacaggcactgcttctgcctgctgagtgtgaatttgagacttctgtgaactgtcactcctacagagctgccactctcaggtctctccaacctatcttctttaaaaatcaattcagacggccgggcgcagtggctcccgcctataatcccagcactttgggaggtcaaggcgggcggatcacttgaggtacagagttcgagaccagcctggccaacatggtgaaaccccgtctctacttaaaaatacaaaaattatctgggtgtggtggtatgcacctgtaatctcagctactcgggaggctgaggcaggagaatcgcttgaacccaggaggcagaggtggcggtgagccgagatcgtgccactgcactccagtctgggtgacagaacgagactctgactcaaaaaaaaaaatcaattcagacataacttattgaagagaaaatgaagacgggaacattttaaccattttggatgatgataattcattaattcaataatgaacaatagctgcggtgccaggcagctactgttcattgtttcctatggccttccctgtatgtcctgtgtcacatgcattcaggctctggagtgactggtgtgtggacagagggagagggagagttctcagaagtcaagctggtgtgacagctggaaaagccgcctgggaaggagctcatcccaagggcaaaaggagcttggcacaaccagcttgacccaatagagaggccttcagtagagacttcctggtctgcttccccacgtgctgtttcactcacatctttatccaggtctggcccttgtgagggtgtgcagtgtgcggtgtggggtgctgtgcggtgtggtgtgcatgtctgagtgtgagtgagtgagagtccagggtctagtgtccacgggggaagctgcaatggagtcagggagcagaattggggacagttggagaaggggcagctgggactggcagcctcatagggcagagtctgtgaaaaaatagtacagccccatccactttcaaaaatagtcttctgtaactgttttagaataacccatgtgaactgttggtgacaccttggaccttgtcatctcccaggctgctccacatctgaaaccttacattttatcatctttcatggttttaaattcaggtaggaggtacatacagtgatgtacatgaattcctatgcccactgctgggtctgtaagattcacgcatgttattgtgggtagcatgtttggtttttcttcattgctgattccactgggtcgacacgtcaccatttattgacccattctggaactgttgaacatttgggttgttttcagtttgcgacgatgttggataaagatgatgtggcattttgcacacgtcttttggtggacacaaaccattgtctttttttgcttgcttgttttgggatggtgtctcactctgtcatccaggctggagtgcagtggcaggatctcggctcactgcaaactccaccgcctggcttcaagcgattcttctgcctcagcctcctgaataggtgggactacaggtgcctgccaccatgcctgtctaatttttgtattttagtagagacaggttttcaccatattgtccaggctggtctcaaactcctgacctcaagtgatccgcctgcctcagcctcccaaagtgctggggttataggtataagccaccgcaaccgtcccacaccattgtcttttaacccactttccttcctgtggcctctttgctgctcattgagactctggtccttcagccctgctgggtttcttgcccatcagtctggctacttgccctgaagtcatttctttcttggctaagactcctgcaagggttgtctttcataggctgttcccacgtctgcaccctcctctccctcctgactcctgccctatctcaccactgacatctcatcggccagccaaggcctcctctgacctattgcctagtgtagggggcactggggccttctctccttctgcctttctgcagcacagtgcctgctccaggggcttgggccagcctttctcttcctcctcttccgctcctctgcctgcttcctcttggtcttctctgctgggtcctctcctgtctccatcctacctggttgttcccggggctccgttcttgcctctctttctgtccctctccaagggtcctggtgctcgatctttagctgccatagatgccgatgcaacatctctcatccttgctccctaggtccaaaaatctagggggttttccaaactcatttgatggaaaaccttgataggcctggacaggaggttatttgctgtccctatgtagccacttcgtgtgaatgaatattcatatgttggctgcaggaatgtcaatgtgtttgactgtgggctgctgccccagatcccaacaagggtgtgatcgtgcatatatagaggaaattatgttttaccttcttacatccagaaattattaaatctagctgggtatggtggcttgtgcctgtaatcccagctagaggctgagaccagtgtattgcttgagcccagaagttccagaccagtctgagcaacagagtgagacccccgtctctaaaaagatttttcttaaaaggaaaatactgaggctgggtgcaatggttcatgcctgtaatcccagcactttgggaggccaaggcgggcagatgacctgaggtcaggagtttgagaccagcctagccaacatggtgaaaccctatttctattaaaaatacaaaaaaattagccaggcatggtggcgggcacctgtaatcccagctgcttgggaggctgaggcaggagaattgcttgaaccagggaggcggaggttgcagtgagccaagatcgcaccattgcactccagcctgggcaacaagagcaaaaccccgtctcaaaaaaagaaaagaaaagaaaagattgaatctgaatatatctggccctaatgggttcagattaggaattgtagacctgcaactcccaagtgtgcctcagcccaggcctccccagctcatgaatggggccgttcaccctcctgacaagcccccttccttctggcatccctgggtgggtgaccccatactcctctggctccttagaatctaagcctcttccctcaccaagatcccctacggctgatcagttctcaagtgttgactaacgtagtgtagtgggtctctgggctgtcctcccttctctattttccatcaattcaggctctcagtagtgccttcctgggctactgcagtgacttctcagcagctctgctttatctgagcttccaatgcctccttgagctgaccccaggggcagctttagaaacatggtggagcacatcctcatcctgctcaagatgctgcctggctccccaccacctacaggatcaaggtcaagctctttagtggaacacaggagcctcccaatctggccttgctccctgctcgcatctcccatgggtccctggggactggttgtgggcgggtcacaccccttctccctttcacactcactgttgttctgctaagaattcttcttgtgggtctgcccagggggctcctgttcagctttcaaaagagagtgggcatcaccttctcctggaactgtcttcaccccggacccctacaaaggccaggtttttggtgaaatacaactctcctgttgatgtcctgcttctatattttacgcccaaagccccgtgactgtaatgcggccagggagatcgacccttcttgcacaggggattaggtcactctccctcttgccactttccacatatggtctgtcacctacaagataaagtccctggagagccactgcagcatgccccagctcacccctcatgcccttctgctgccttcccagtcacgtgtgcccccctccggccaggcctgtctgcttgcgattcctgcccactggccagtctgtcgctcagcaccattcgtggacacccttgcatgagtgcggctccacctgcccttgcctggtggcttatccttcaagacttccttctccggaaagcactccctgatccccctgggtgctcaaggacatgggctcatcttttcactgtttcctagtaacatgtgttttctgtctcctcctgtactgtgaactcactaaaggacaagtgacacatcttactcatagttttgaacccagcttccagcgtgggcgtggcggaggcagatgcgtaatcaatgcatgttgtctgactaggatggtttatgaataggagctgcctggaatgcgcagatctcagactcccaccagcttccccttgcctctgaactctgccctggcccctcctcatcccttccacatcctgctgtgtagatactcgtcccttccgactctgaaggttgcagggagggggcccgtggctctctgtgggagaggtgccccagctttggctctcggcctcccctggctgaacctcagtgggagctgagcaggtttgccgtggccttggatgcccttccttctgccccagatcttgcttcggtgctctcctgcaaatccctgccctctgctgctggactagaggcctccagcaccctccctgacatgttcctccaggagaggacacagctgtctcctgagactccggtgccctccacctccgcgatcctcagatgcttccctggggagacacgacctgtcaggactgcacagctgctgagatgagggaccccttgctgttccaatttaggagtaaataaggcttcgccccctcaggggttaaagaggagtcccaagagccttgcactgatggcactttgggggaactcttggctcctggtctcccctgccttctctgggctgtgtaatgacattcttgtccccacctctcttccacctttccctgaaactgcaggctccaagggctccagcccaagcttggggtcagtgtctggcatgccctctgcccggccctggtcccagcatgcccacccaggtcacacaggcgcaccccgttacccacccacccacccacgctcacacatgcatgcaggccatcatacaagctgacagccacactcatgcacatgtgtgcacctgctcacgtgtgcacatatatccacactcacacatcccccactcacagatggacttacacacgcaccacaaactcttagcaatgtccattgttttgatggaaggagagacaggtttttggaaatttcctaatctcttaccccaaatctctccctccatgaccctgagccccaaaaagtggccagcatttgccctgggtaaggtagaattgaatctggacaatggtgccccatgtccctgactcattctctgaccccagccagtagagaccaccctttggtcacagactggtcggagtccctccccagccagcctagaacatgccttttagcagtgtggccacatcagaggggagcagacacctggggaccatagcatggttcaacggccattgccctcagggcaggtcccatcctttgctgtcccgtgtggttcgttttctttctgcctcccagcactgggctccttgctggctatgtgaaattcctttctcttctagactaactaataaaaatcctgcattttctttaatacctcatccaagactctcctctgttaaaaagactccctggtgtactggttaggtcccccgctcaatccctctgtaccagctgcacctgtgcaaggaaggccctgtctggaaggaggtttctggtcacctcaagatggtttctccaagctcaggagaatggaagttgccccatccccaggccacaggttctgcactgctaaagctgtggtggatgcactgtggggatctggaattttgcctcttacagaaggtgaggggagacagccacgccctgcacttggtccctgccccaccatgcaccccggttctggtgacctctttgagtgcaggcagtagtgaacagagcctgcttggccttgacacttttttttttcaagagaatgggtctcgctctgttgccctgactggagtgcagtggtgagaccatggctcactgcagcctccaccttttttttttttttttttttttagctttacacattttttaactttactccaaaagtgatatatttttataaaagtaatttgtgcttaatacaaaaagattagaaaataaaatgtgaaagacaaatatataaaaatcatccataatccaatcactggaaataaacattttgttgtacattctttaatatcatgtactatatacataatcactatttatttgaaaagtaaaaataaacctttaatttctggtgtggagggcattaggtactctgagagactcctccaaggtagaacagctagactgtagacagaacaaagcaaaactcatgagctgattacagagttagtagtaatgatatttggctacacaggggcatgcagattgccctgcagttagatttttttttttaaataacactataacaggaaaactgagtcttaaactagcatcaaagtgttagtgttttaactgtaactcattaagccaggacatcaaggatggctgaagttgttataagttcagaaagaaatcaaagatttcagcagaagtagacaaaaatcaactctacaaaaacagtgatctaatttaagccatataatttgcacagatgaaggtcaagcaccaaactcacaatcaaggacaatcccaacatgttaaaaaggcaagtcagcatttttttatgttttttttttgcatcttttttttaaattttattttttattattatactttaagttttagggtacatgtgcacaacgtgcaggtttgttacatatgtatacatgtgccatgttggtgtgctgtacccattaactcatcatttacattaggtatatctcctaatgctatccctcccccctccccccaccccacaacaggccccggtgtgtgatgttccccttcctgtgtccatgtgttctcattgttcagttcccacctatgagtgagaacatgcagtgttcggttttttgtccttgtgatagtttgctgagaatgatggtttccagcttcatccatgtccctacaaaggacatgaactcatcactttttatggctgcatagtattccatggtgtatatgtgccacattttcttaatccagtctataattgttggacatttgggttggttccaagtctttgctattgtgaatagtgccacaataaacatatgtgtgcatgtgtctttatagcagcatgatttataatcctttgggtatatacccagtaatgggatggctgggtcaaatggtatttctagttctagatccctgaggaatcgccacaccgacttccacaatggttgaactagtttacagtcccaccaacagtgtaaaagtgttcctatttctccacatcctctccagcacctgttgttacctgactttttaatgatcgccattctaactggtgtgagatggcatctcattgcggttttgatttgcatttctctgatggccagtgatgatgagcattttttcatgtgttttttggctgcataaatgtcttcttttgagaagtgtctgttcatatccttcgcccactttttgatggggttgtttgtttttttcttgtaaatttatttgagttcattgtagattctggatattagccctttgtcagatgagtaggttgcaacatagaccttctttttaagaaattttgaaatttggaagtaacttcaagtttatgaaaagtttaaaggtaaaaaatagtacacagactgtccttacaggctttaccaagatgtacctgttgctaacattgtactctgtttgctttgttgtttgtcccctgctctatatgaacacacatgggtatgtatgtatgtatgtgtatgtatgtatatgtgtgtatgtatgcatgtatgtgtccatctgtctgtatgtatgtgtatacacacaattatttttcctgaaccacttgaaggtaatttacacttatcatgagctttatcctaaattctttagtgagtatttcccaggaatagggatattttcttacattaccacaatatagtcatcaagttcacaggtttacattgagacagaactttcatctaacccaccacccacactgcaatcttatttgttgaccccatcatgtccttggcactatatgtgcctgcagtacaggattctgcgtaggcttgaatattgcgttcattcaccgtggctctttagcctcctgtaatctggaacatttcctccacctttctttgtctttaacgacattgaaaagtcaagggacttttgtgatgggccatgggcagaggcggttttgcctaccgattaagaatacggatgctggcacccagctgcctgggctcagtcccactctgccatttatcagcctggtaagtgtgggagagttgcttaacccttctgtgcctcagtttgatcattcatgaatccagtgaacagttagcctgtctcgtggggctgttaggaggcttggcacacagtaaaaatgggcaaccatttgcttattgttatggtggcaagtcttttcttgaaggggctcccagtgcatcaagcctcacaggggtgccttagcattggctcaggaatcaggaccaagcggggcctgtggcagcctgcagtcctccctgactgtacatgcggttagcctaaggactctgtggtctggacaagcagccatatcctaagacggtagcagagaccatgccagccaaagactcaacagggatgtggctaccttaacagacagcaatgtgaggacctgggaccctccaggaagtgaagcccttcccaattaccagtgtggctgcggataagtcccacactgtcgagttgaccccagaagaggtacctggagaagggacccgagaaaccactgaagtgattcatcgtacctgaacgttgctggatggcttcaccaccctcaggtgcacagagccttcaagatagagcctaagttcagctataggaaaggcaggttttgtacagctgccatgatgcctcccagtggaagggctgagcaacccctagagacttctcctaaccaggtattactcctccttctcttttctgacctagaaaggagccaggcaatgtggaaaaggggcttaaagggctcccatgagatgagcagagcgcatggaataatgagtggaagcgactccagacagcctcctgatttctgaagctcagttctcccctgacaccttccgtgaaggctgctgtatatagcctgctaaccatcagcccgtctatccacgaatctacccatccaactgtctgtccattcactcattcatgcatccacccatctctccatccatcctccattcctccatccgatgaggaaacacatatcctacagcctccatatccttgcctcaccatcttaatacagtcatgcggggcttgaccacagggatctgttctgaaaaacgtgtcattagtcgatttcaccattgtgtgatgtcatagagtgcacttacacaaacctagatggtacagcctactacacacctcggctgcagggtacagcctatttctcctagccagcatcaccacaaacatgtgagtgatgctttgcattatgatggcgatgaggtcactaagccataggagttgttgagctccttatcaccttatgggactcagtggcatacgcagtccactgttgggcggaacatcgttccgcagcacacaactgtgcttgctcacctggctttgtcaaggaaggagctcttccatggatatgtttttctgttgttgttccagataacttttatccttttaagagtgccaccttcatttagtttagtttagccattttagagagaaagtgctgaaaccgactgtaaacttgtctgtcttttttttttttttttttttttgagacggagtcttgctgtgttgcccaggctggagtgcagtggcacgatcttggatgactgcaacctctgctttctgggttcaagtggttctcccacctcagcctcctgagtagctgggattacaggcatgcgcaaccatgcctggttaatcttggtattgttagtagagatggggtttcaccgtgctggccaggcttgtctcaaactcccgacctagtgatctgcccgccttggcctcccaaagtgctgggattacaggtgtgagccactgcgccaggcccttttctttcttcctttccttttcttcatttcctttcctttcccttccttccttccttccctccctccctccctccctgccctgcctgttgctttgctgctgttcttgtctttgcctttgctttgcttgtgcttgtgcttgctttgcttgctgtgtgtggtgctttgcgtgtgctgtggctggctgttgctgttgctgtgtcggttgtctttctttctttctttctttctttctttttcttttcttttcttttcttttcccttccttccttccttccttccttctttcttcctttttctttccctttttattgacaggatctcactctgttgcccagcctggagtgcagcaatctcggctcattgcaacctccaacccctgggttcaagcaattctcctgcctcagcctcccgagaagctgccaagaggctaattttttttttctcctgcctcaggctcccaagagggcaattttttttttcttcgtatttttagtagagacagggtttcaccatcttggccaggcctgcgctcgatctcctgaccacgtatccaccccaccttggcctcccaaagtgctgggatacaaggcgtgagccactgtgcccagccttgtctttctttttaaaagagggcctggcacttcagttaagtctttctggatgatccaggtcaccgctccaaatggaagtcacatgcttggttgtggagccagtggtatgggccctcagggagtatttagaactctacactaaatggccccagtggttctgctttttgacacttccttttgtactttctgccacccccccattctgagatcccagttatcttcccaattcttatagcccttggcatgcttctagcaatgtcttctctaaatggccttgagctgggaaatttgataaccaaatgtgtcagaattgtgcataaagcaagagtactgagttatttcttttatcatgagtacagtacggagcctcctgactttgtatcccgtcatttgcctcattctgggttctccgctactctccaggccgctgaggtccatggatgcataagccctaggaatgaggagggtgcagtggacatgaattgctcttcctagatccttgctgcttttgctctagagaaaaggatgggataccagagcctgtcctggctgactcctccctcaaaggggctcgggggagatgggagcacagggtggggccagctgggtcagtggtgcctgaagcttctgagggagaggagagtggctgggccccactgatagtgtgcaggaggctgaggaagggacacttgcctcctcctcactctgggtgacgatggccagtgtagactggagagagccggagggactggtctcccctcaaggcccgaagcaggactggcaccagcggtgagatgggcacctggggtgggggccaggggtctcagcccataaacaccccacacgccacagcagcacacaggggctcctttaaatacacagctatggggactcccaaaatgcagacgtacacttgcactcacaagggacgcacttccatagctgtaacaacccatcagggaactgaccacacacactccggcgggaggtcctcttcacttccttccctccacgaagatctctccccttcaccacggacacagtgacatgtgctatccaattgtgacaaacacatcatctctgaatttggacactggggtcccatttcagaaggtgacaaccctcacaccaacaactgcacctactttcttacagggttggatgcctataacatgcctgcatggtgggacagcaagcggctgattgcccgcacacactcagatgcacgcttgcacacatgctcacacatgcttacatgcacactcacacttgccttcagacacacatgggtccaggcagggccctggcttggcctgacctgcttcccctgtgctttctgcagctgcagggggtgctctgccctcctctgcggggtttccaccccctctgtccttgggccttggattctggggggctggtggactgatgccaacatcctcctctctctccccaggatttttgtcaaccgcagcctggcgctggggaagattcgttgctttggcttcgacatggactacactctggctggtagagagggctggaacacagcgtattgggagctggagggagcaggggtgggcagctgggcaccaaagccctgattctgtccgggcctctgcagcctacaagtccccagcttatgaggccctgaccttcgagctgctgctggagcgcctggtgtgcattgggtacccgcatgagatcctgcgctacacctacgaccccaccttccccaccaggtgtgtggctcaggacaggtgggaggccacccggccttggtacccccacccacagtgccccccgaccccccgtctgcaggcggctggtgttcgatgaactctatgggaacctgctgaaggtggacgcccacgggaatgtgctgctgggtgcctatggcttcaccttcctctcggagtaagggacaaaggtgccgggagagtggcaggccaggaggggaggactgctcaccttgggggaggacagagggagggagggaggaaggacgcaggcccacggtggaggctcagcacagaagggatgcgtggtggttggaagggatggccagagcctggacaggcctccaggaggcactggggaggggtcattggctgcacccagcctacccctcctcagggcagagatctggagcttctaccccagcaagttcattcagagggacgacctgcagtgtttctacatactcaacatgctcttcaacctgcctggtgggtggagggttgggggcacgggaggtggtcctgagttccggagctgagggtcccagctctgtcctggtggagaactgtctggctccctgggctgacaactgaccatcctgtctgcccccagaaacctacctctatgcctgcttggtggacttcttctctggctgctcccgttacactaagtgcgtcttgtgccctgcccagccctgggacgaccagtaggacactgctcagggaccaaaccccaaagaggggccccccaagggctccccaagaggctggaagggctccaggaagctcagtgggaaggcctctattgcaggctagcacacacccttagctctgggtgatgcccctcccaggatgtctgggacataagcccagtgaaggccccagtgtggctggtggggttgctctggtgtgggactcagggttggaggtcatttcaggcccccttattggcctccccgtcccctctttgcctgccccagttgtgacaccggctatcagcatgggaacctcttcatgtccttccgaagcctcttccaggatgtgactgatgccatgaataacatccaccagtcggtgagtgagtggtccagaacccccggacccctgacctgtctgctcttggttccccgggcagccttcaggcctccagtccccatagcgtttccatcctcttcctactgaggactgaggtctggtctgggcttcccagagccgcccacttttctcatcttggacacagacatgtgggtgggtacacatgcacacacacacacacacacacacacacacacacaggcactttgctccctcctgcagggctgtctcaagaagaccctggaggacttggagaaatatgtgaagaaggatgtgagtggccacagacccagggccatggccatcacccccaaagcagcagggctgcccccgcaacccttctctggctttcttcgaggtttaggctgagctctgctccccggatggctggggatctttctatggggcctggtgcctacctgcctggcctgnnggggtggctnccagaagggctgaaacctgaagagaggatcccagggcagctctgggagtcccacccctgcaagtccctctatctctgccccagccacgcctccccatcctgctggggaagatgaaggaggttgggaaagtgtttctggccaccaacagcagctacaactacaccaatgtgagtatgtgtatggaggggtggaccgtcggcctccttcctggccccaggggacacagtggcactgcaagcaacagggaggggtggggcggggagccaagaccctcctacccccaccactgggctggtctcctggactccatttcttggcctttcaaggcctcagaagaatgagcaactttctcaccatcttgctcctgtggccaccagtgtgctggggggatggtgggtgagggcagaggcaggtggtggcccaagcttggtgccctgacgctgccttgtccttgccaggccatcatgacctacctgttcagcatcagtgaggtgagtgttggagtgttgcgtgcacggctggggtgggctgtgcaaagggccagggtgccaggctgcaccacgatgctgagggcctctcccacgtccagcctccctttgaggaagacctgagtgtgtgagtggtcatttctcatgagtggaagctccccagtgggtaggagcctggtgacctcagccaggccctgggaggagcctttgggggtgataggaggcagtcaggtatgtggggacgggcggcagaaagtgggtgagacgagggcatggcaggtcaaagggaggggtgctgggagtgacaggtcctgggcactgggagtgaccaggtgtcactgggcaggcagcagggccctaactaggtagccgtgctggtgccacctgtccctgggtctctgtgctgtgaggagctctggagcctggcctgaggctgcacatgatgttcaacacccacctccacaaggtccttttgagcacttcctagtgcccagcttggctggggaagctgggcagcgagaccgggttcccaggggctgaagaggtctcatccagctgggaggttggtggggagaggcaggctgtggtgggtgactggctgtggcaaggtcagatttaccaggctgtgtgtgtgcagcccgtgtgcacccccaacaggctgaagcctcgggcaggccctggaggtcctactttgacctgatcgtggtggacacgcagaagccccacttctttgcagaggggttggtcctgaggcaggtcaacacggtaatggcaggtgcagaggtcagtccacctgcacccatggaccacggttggggagggcagcctgcctgccccttagacttgacctgcctttatagctggcagctctgctggcctgtctgtccctggaggcagggaacccgaggccgccttcagcgccctctgctgcctccttcctcccacaccccccatggttacctctgccactcccagctccctgcgaccctccctagctagagaccaaagatgtggttctcctggctccagggcacccctctgcccctccaggactcaggaaagctccacgtgggcacctacacagggccccaccagcactgtgctgtctactctggaggtaccagctcccaccatgccccatcactccttgggcaccctccttccctcgactaggagcccaggcccctcacctgccccgagtcacctaccccaaggcaggaagggcaaacgagtgtctgtcctccccttggtggggcaggctcttcggacatggtgtgcgagctgcttggggttcgggggatggacatcctgtacattggggaccacatttttggggacattctcaagtccaagaagcgtcagggctggcggacttgcctggtggttcctgagctgtcctgggagctggacatctgggcccaggagaaaggtgagctgttggggtctggaacagtcagaggggcactggcctcccatgcagaggccccagcactgccttctcctttttcccgtggggggttagtagttgtgaccaggaatcctggccactctgttgtttctgagggaggaaacagacaaagacatacagacccagagaggctaagcggcctgcccgaagtcacacagccagtagggggaaagctgagagtcaaatccacttctcctgacccaagaatcccgtggtgtttctgcaggcggtgccttcctcctgcacctgaccccaccctccccacccaccccaaggatgttcagtgagtggaaggtacacaccttccacccaggtatgacttgaagtcatcctccagggcagggagttgtgtgagcccacacaatttgggctttgtcctgagagctgaggctttaggtttgagtcattgccgtgtgacctcaggaaggtcacctgactccctcacctgtcccatggggcctacggggcctatgctgtccctgcctcagtctgggcagagtctcacgtgatgtaaggggccaggggtgttatgcacacagctcagggtgtgcaagtcctccgctgggccagggcagacacaggcaggcagggccagtgggtgacacaggccgtcactcacccccactgacccctggtggcttttcagagcggttggaggagctgaagagactggacacgcacctggcagacatataccagtgagaccctggcctttctgggggtgggatggggcagggagaggtatggaggggcagtggctcacatccctgcctggcggcgaggtcccggccaaggttgtcagaacatcaagatctgtttcaggctgggcttccctagcaaactgaatgtggggacccctctcacccccttgggactgctcacactctgtgacctctaggcccttcctctgaacctatccagcactcagggacctgccctcgcacgcatgcacacacccagcccggcacccccactggatgcccgcacggtgtccccccacccgacccctgctggggtctaaggagactgtcctggcactcggaggctctgtgcctcccctgggtcacctagctatttttgtaccaggcacatggatgggagcagttgtgagctgcaagtcatcaacttcaccaagagagagatccaggtgggagctgggtggcgagggaagggacaggcccagcaggggcggagccgggttcacttccccactgcttgcctgtcggctttgtcctcggtgccaaaggcccagttaccccattctcctcagcctcgcctgggctccacctgccttgtcagccagcgccctctgctggccgacattccaaagggcagcggtaccctcttgaagggctgagttgagcctgatttgcaggctttgcctccagtcccacagtctttgccaatcaccctgcccgggaagtgcctgcgtgctagctgggcccttattgactgactagccagttctgataggaaatgtgatttagggccagtgagcccagggtccttggaaaagagaagaaaagacagtgttcccttgtggcattactgaccggccaccaaaaagctggaggtgcccatgggtcagccaggtggagggagtcaggtcacttggtcatcccaagcccagctggggccgatcacaaagggtctttgcagagccttttacaaagcacagccgtttgatcttccccacagccttaagaggtggatggagcagggattgtcacctttattttacagatgaggaaactgaggctcagagagaggtcatcctgggagtaaatgttggaaccattctctaggctctaaaagcagacaggaaacagggcctggtggcggggtggggcctgccaggatagtaggagcgaggctgggggtgtcgccttgccaagtcctctgttggactcagatggtaaatgaagctgtgggtttagtcctgggtggtccatcttcagggccaggcaggtaactgtgatggaaagctgcagcggggcctgtggcaaagtgaggagctgccccacctccaaaagccaagtgtgcagcctgtgggtctacaacatgctgctccttcctacagagagtcacaggtttcaatgtcccccggtgagaggcccagagaggccagggttgcccagaaagggagtaggccaggtcaggcctaagcgggctgggatttcaattcagtgtgttgcccctctggccagagggtcacccaggagctggacctgtgctacagcaccatgggcagcttgttccgctgcggtttccgccagacactcttctccagccagctgatgcgctatgccgacctctacactgccgcctgcctcgacctcctgtacttccgagtgagctcagctctctcgggcggccccggagttggtgggtccctgcggaatctccacggctgtttgtgaacatttatcctagaaggacccactggtccccagccttgctaggagcttgcaaggtcaccagccctaatctcccaccttcagactcagtgggatcacagtcttgcagataactgtctgtgtcttaacagacgcatgggaagagttaggtttatacagataagatgcctcggcagggatgttcttcctcatgcccaaccttaactcctgctttagattgagaccacactatctcgtcatttccttggtagaaaggatatcagttgcaaggaggaaggcacagtcctcctaccctcagtaaacatacagtggcttccgaaggggtggaggaggcagcagatgatacagtaaacactctggctggttttcctctgggagaccggaggatgcttctgggttaaaaacagggtggtagaggtggctacgatggcactgggcaagggttagtaggagtcatgggactggccagctcagggcttccctggaacctgcacgtgtcagtcctcccaagttggcatcatcatttccatttgataagacgtagagcttgcagtttaggatctgaacttgaagctagacctctgaggctccctgtcgcctgccttccctgctgcccttggctgccttccagacgtttgagaggggaaaaccatttattgagtgtctgctgtgtttcctgcactgggctgggtgcttttcatcgattatgcttaatgctcaatataactcagcaaagtaggttttaatcttcctcattttatcattgatgaggaagcacagagaatctaagtgacttgccatcacacagctagtggaccacacagctgggcatgtgagcctgtcaagctccaggggtcacactgtgtctcctgcactgtgctgccacacacatgggggaactggctttcaccgggcggcctcatctcatctctggactcttagatgggctggcccagaccgctcctgtgggcaaagctgggggtccaggcatagccctctgtgctggtagatattattgttaaagtagagaccagacaggtgaagaacacaccaaccccccatccccaaaagtgacaaggcgaaacacttaaagaaatttgaccttgccaatcttcctggcttgggatctttttttttggccaagtctagctctgcttgccctaggcttggagtagtctagctcgagtgtctatttctcttgcttctaatagccatatctctacttttactcctctcgtgtcgttcaaagactattttttctttggttgcacacccacgacccatgctccttctgtgctgtcctatgcgcgcatctcatctcacgtagcatctgtctttcttgctgctccacttgcctttctcattacattcaattcttctctcatctcctctccactcctacttccatctatctatctctctcttgcttttcttctcttcatcttctattgtccctcctctcttcctccatcttctctctttctcccttttctatcttccctttctcatctcccatcatctcttctcctctttccatcacttccctactctctcgtctcttctcctctcctctttttccttctcctccctcctctctccttcctcttatctcatatccttttaacttcttaatcatacttgcttatctttctactctcctttttcattctaccattcttctcctcctactccttctctctttcctctctctcactccttctttcattctttctcttttctactctcattccgcatactcatcctctctctacttccctacttcaatgtcttcactctttctcgcttacattttctcctacattttatctttcctactttctttctctcacttcttccccgtccttttttctattgtatatttcacatctatatcttacttcaccatttactatattcttccttttctatcaactatttcttctcttccatcttctttcattctcctcattcctcacccttcgatagcttctttacatctctgctcttccctattactctattttttttctcttttnnnnnnnnnnnnnnnnnnnnnnnnnnnnnnnnnnnnnnnnnnnnnnnnnnnnnnnnnnnnnnnnnnnnnnnnnnnnnnnnnnnnnnnnnnnnnnnnnnnnggtcaaaggtgactaaggtacctgaacatggcggagtcgaagggggagaaggacatacaatatgaagaggatgtatataaacaagttcgcacggacagtttagtgagcgcaatggataataaactcatactattaaaaaacataaacaacacccccaagcaagaactaaaataactgcatatccggattgattttttgacattcagtcattcccagataaaccatagtcatctatgatcaatcaacctccactcccggttcaagcattcttgtgctcagcctcccagtagctggattacaggcatgcactaccatgcccagctaatttttatgtttttatagagacagggtttccccatgttgccaggctggtcttgaacccctgggctcaagtgatccgcctgcctcggcctcccaaagtgctgggattacaggcgtgagccccgcgcctggccttggcctgggatttttgaggaagtgaagtccagctgccagaaccttcctgcccctgctgaccttccgaggttccttcctctgcagcaacatcgttgggcaggaagttggcagctgtgggcaggggagcctgtgcatagctgaggaatcctggaaggccgtacccgggacggagtgcttcacctccacctgcatttatccctacagatgccacatgagtcagttgtggagcaagaacaggccaatctagaccctgcctcctgcctcctctcctgcaaccagagggtgagtggctgtggccgacgaactctgtggcttggggtcccatgggctagagtagtggttcccagtggggttgtatcaaccccaggacgcatgaggcaattggtgggggggcttgtgggcttgtttttgtctgcaagcatagtcattcctcattatttatgtaaaaatgcgtattattttattgtaaaatgcttttctctttatttctcctttgttagagtattatcttgatactttaaattatagagatgataattgtatcgatgaatttcaattcaggatggaaaagtagaagctaaatatttgttttctaaacatgggatattggagccaggtgtggtgtttcacacctgtaatcccagcactttgggaggctgaggcaagtggatcacctgagggcaggagcgtcgagaccagcctggccaacatggtgaaaacccgtctctattaaaaatacaaaaattagctgggcatggtggtggaagcctctagtcccagctacccgggaggctgaggcaggagaatcacttgaacccaggaggcggaggttgcggtgagctnagattgcaccantgcactcccaacttggcaacagggaaagactgtctcaaaaaaaaaaaaaaaaaaaaagcgacagttggatccaaaagggcgacaggttctgctcagcagtgctttgtgcactgttgggccctgcacccctacggactgctgttggccaatccatacacattattccctccaggggaagttgcaggatgtgccctcttccacattgaggcttcctccccagacaggctttgttaacattaatgactagtggctctagcttcagatccctttgacactttgtgaggcttgacccgcgtctgagctgagacaggagtggatgcctggattcctcgttgggttctgcacccccaaaaccctgcataaatgttcctctttctcccttggctttctgggggctcactttaaaagatgtgtatcccataggtcccctttagctgggttgtaccaggcacagtgtttgttctttcaaccagtatttactgagcacctcctgtgtgccgggcagtttagaaaataaagtgtaagttacttcattcctgcctaggagaagctcaaaattcaagtgcattcacaggctttaatcagtggttggcaactgtttttctatcctagcccagcagagagatggacacactcctgtcagtaacagaggcttgctggggaagcctgtggtttgatccctctatatcctcaccccatcaggatccagcctagggcattttgacacattatctacccctggttgggcgtcactgtgtgagcttgggaagaaaatatccatagtcactttctgtgtttcttataagggttagggcaaagagagaaacgaggatcaggaaagttacatcgaggctgacggaatcctggacatgggctggcatcacgggccatcttctacttgagatatttttcagataacacaagtatggaaaaaggaaaaagcaactgtattgaaatctcctaaatgcagcagatttggagcctgcaaacacttcttttagggaggaggcagtattgctcttaacctagaaggcatcctcaatggtctttgagacgtttggaaacgtgtgcacaagtgaaattattttacctacttctcttgaacgcatgatgtctcatatccaattttatttctaaacatttcttttaaaaaatagttatttctgtgcacttctgattctgttactagtaagaacagtaaaacctgattggctatatattgcctcactaactgctctttcattctgggtcactacgaaagatgttaaatgagatagcccaaatgtctttgagtttgtgtatacacattaaaacacataaaaagtcatactcatgattttaaaacttgactctcgaatgtgttagaagcttctctgtggtattaaagtgctgaagcatcattgctctgatgtcactgatttcagtttactcctacagtttactttttgtctgttagtggtatcatctggcattctgtggagacctaggttgaatctgcatgtttgaaatgacaaagtaaacccttgaaggaacaggtctgaggacacacttcattagcttcattttctgtggataaacaatggcaacacttagatacctgaggataaataagggacaacgggccatggaatcagagagtttactttttttttttttttttttttttgagacagagtctcattctgtcacccaggctgcagtgcagtggcacgatctcggctccacctcctgggttcaagcaattcttctgcctcaacctccgagtagttgggattacaggcatactccaccacacctggctaatttttgtatttttagtagagacagggtttcaccatgttggccaggctggtctcaaattcctgacctcaagtgatccgcctgcctcggcctcttaacgtgtagggattacaggcgagagccaccgagcctggcatttttttttttaaaacatcttctttgcatttcagaagcttccaggtttgacactgccaaggccttttcttcctttccctggtttgactttcaggtcccagagcctgcaggggcaggttctccagtaaatcccaggtctcactggcctgtgtctttacaggggcaggttctccagtaaatcccaggtctcactggcctgtgtctttacaggggcaggttctccagtaaatcccaggtctcactggcctgtgtctttacaggggcaggttctccagtaaatcccaggtctcactggcctgtgtctttaaacgcttgattcttagtcaagagctaaaggatagtatttatcagaaaaactgctcagaccctagagcccatacttttccggaaaggtcctgaaatatagtgtggtagctaacactacaaaagtcaaatctcagaattcctacccagggtagagaggatacagaaaaggactgagggataaacaatctggcagaaatgctttaggggatcctagcgagggaaaggagagaggtggccaaagggcctttcttgtgcttttcctatgtctggcccattccctgcctcttctccctgttacctccgctctcccctcagcgaagatccctgactagaccagtttctctttagtccctcgctcataggcctctatttctcaggacttggagtcttgcatttgtggttcctagattaacacgtgtcctcactagactctcagctccaaaaggtaatgtccttttggctcaccgttgtgtctctggcatctacgtacctgtgtattttattgaaagacacatgtcacccagtttattattactcttgtagaactgcagggaaagggcaggacaaagaatatgagaaaaaagaaagtggagaaaggatatagggctttggattagaatgctacctcctacccagacacattcatgagaaaactcatatccttagacaaactcctaattctgtatctgtcctacctcatgggtaggaggtaggacagatacttctatttgggtagtttttttttttttttaaacttaatgtcacctctacactcctgttttatctataccttagggacagaagcacaccattgcttccaagactgtgtgcagacactgacattcatctcccatttctggaagaatttttagctgggcatgtggccatctgatacacatttccctgcttctttagatggggtgggagggggggacatgggaccaagttctggcccctaaattctggacagaagtaatggtccaacttccaatccgtgacctcaggaggggcataccttcccgttcctctcttcccccttccagctggctggagagtgaagttgggtgggagccttctttggccacatggacgaggctgcctccaagggatggtggagtcacaagacagacataggctgggcttggcagtagattagcattgggctgtcacttggatggctgatgtgagagagatgcatttccatttgggactagtgacagcagctgaactgacatcctcattctggcatcgtcttgagcagtcaggaaatgaagagaacagaagcagcatctctgtggtagtgaactagtggtaaaaatgtgatcatttatttgtagaataaatgacagtactttggctgtcacagtgattcctgcttggtaaactgggaacagttcaataatttatcttgctcagatgtgtttccttatcatcaccttagtcctcatttccttactttaaatagagataggagttaaaagttctgaacctggagccagacagccctgactttgaaattgcaggactgacatttattaactactctatttccataaccatgtcataaagctattataaggatatagtgagataacggacatggagcttggccagagtaagcactaaataagtgttttctatgctattatatatatgtgtgtgtgtgtgtgtgtgtgtgtgtgtgtgtacattagtcaggattttttctttagcaactgaaggaaacctaatgaaactggtttgagaaaaaacagaatttattggttcatataactaaaaagtccagggttagcccagctccaggcatagcattaaccagggagtcaaatcaatgtcattggacatagcttgctctctccaactctcaagtttattccatgttggtactattctctggcaggttttgtccatgaggttataagatggctgttcccaaactccagatttctatctttatcttttcagcaactctaccaggaagcatctttctaatgaaagtctgggaaatgatgcctcactggttgtgacactatcccatcctccaatcaatgccactggccagggagatgccaagtttggctttgccaggactgggtcacatgcgcatactggggttgagtccattcttcttaaccatgtagattgtcagcaggaaatgggtggtagtagggaaattggggtgctttttttgtgagacagagtcttgctccgtcgcctaggctggaatgcagtggtgtgatctcagttcactgcaccctttgtttcccgggttcaagtgatcctcctgcctcagcctcccaagtagctgggactacaggcacactctaccacatctggctaatttttgtatttttagtagagacagggtttcactacgttggccaggctggtcttgaactcttggcctcaagtgatctgctcacctcggcctcccaaagtgctgggattataggcgtgagccaccgcacccagtctggggtgcttttattggaaaagggagtacatgccagggaggcaagaacatttttttttttttttttttttttgagactgagtcttgctctgtcacccaggctgggatgcagtggcatgatcttggctcactgcaacctctgcctcccaggttcaagcagttctcctgcctcagcctcctgagtagctgggattacaggtgcgtacccccacgcctggataacgcctgtatttttagtagagacagggttttgccatgttggccaggctggtctcaaactcccgacatcaaatgatccacccgcctcgacttcccaaagtgctgggattacaggcatgagccaccatgcccagcctcaggaacagtattttatagtatgtaaaagactcagccgagtgcctggcatagtgagcactaacaaatgtgaaccatcatgcctctcctctgtcttctggttcatggtcattctgcacagagatgctatatataatcctcccccccctttttttctttctttaaaacttgctttacactcacctcctctaaaaagccatccccgaacaacattagacttatttttgcaaaggcccatatttccactacaattccctatgaatctccttcccaaatcattaagggcccaccttctttccttcccactctccctccttcctgctccctatgtctaggagcagctatttactaaacaagagggttactgagtatctacaaagagtcccagaattagggtgcagttttctgcagctgcagtaccatccacaatcatttccacaaccttttgtgtctgcaagactctatagtctgacgaggctgatcgaaacctccaatgtgccattttgaaacttataattattagacaccaatagttcaacctacactgttattgttggtacccagggtaatactgtgagacatcctgcaaggaactagcaataaagaaaataaaactgctcttttgggaactaagctgtaatgtcaagacaatggttttgaggaaagacataaaaccaccataaagagacaactgactcctaggcctggggtcaggggagggatttaggtagcaaagatggaccactctagaagccagaaaaaaagtaagtgcacaagcaatggatggcactgcaggatcgatcatgagaacctggtcgacgggcttaggacagtgtctgaggttcaaggcaagaatattcctaacacaggactcacttcagactctctaagcctggtgattttgaatatttgatgcctctacgtcctatgttcagattttgtgatctctaagcagccctctgagcattacttggcttcacaggtaaagttaactctaattcttgcattttggtgacaattttattttattaggtatatttaagatttacaacatgatgttatgggatacatatagataataaaatggctgctatagtgaagcagattaacattatcatctcagtttttttgtgataatagcagctaaaatctacttatttaacaaaaatccctaatacaattgtattaactttagccctatctctagacttgttcattttatctgctattttgtatccttggcctgcatctccccatttcctcttccccaatctgtggtaagcactttctctgtgtacttgagctctttcttaaaaaattaaatattccatatgtgagatcatgcagtatttttccttgggtctggcttatttcacttagcataatgttctccaggtccatctatgttgtggcaaatggcaagaactccctcttttccaaggatgaatactattccacggcatgcatatgccgtattttctttatttgtccattgatgggcatttaggttgtttccacatcttggctattgagaataacactgccacaaacatgtgagtgcagatatctttatgaggtgatgatttcatcttttttttttttgagatggagtcttgctctgtaacccaggctggagtgcagtgacgcaattttggctcactgcaacctccacctcccgagttcaagtgattcttctgcctcagcctcccaagtagctgggattacaggtgcccgtcaccatgcccgcctactttttgtatttttagtagagacggggtttcaccatgttggtcaagctggtcttgaactcctgacctcaggtgattcacccactccaaagtgctgggattacaggtgtgagtcactgcgcccagctggtgatttcatcttctttgggtacatacttactcagaagagggtcagataacagttctatttttaatttctttaggagcctccataccgttttccataacggctgccccagtctacacgcccacaaacagtgtactagggttctcttttctccacaatctcatcaacatttatctcatgtcttgttaatagccattcttatagatgtgaggtgatagctcacagtggttttaatttacattattcttatgattaatgatgctgaacaccttttcatatctatacctactggccatttcttatgtcttctttggagaaatgtctgctcaggtcctttgcccatttttaattattagtttttccacaattgagttgtaagagtctcttattgaaagtctgctggtattacaggtttatagctcagttttttgagctttattataaatctgactttcagaaatagatctgcttcccttaaaaaaatctagttcctggatgaggctgatagacctttgatcaaagtccattctccttggtaatgaatgctccttgtttcttaggacagccaactggtatatccttagacaaactcctaattctctatgcaaagccattatcatggttttctataataaataagataaacaagcaggaactaatagaaatttaatgttgttttaagataatacttaaatattaagaaagctaaaatttaaaatgtgttgactaggtttttctacacaattatatttacataatgactaaggtaaaacctttccacaaatagttgcccaggaggaagaaaaagcaacctacaacagtctctggggcttgcactgccttctcaggccagctataccctagctgagcaaagaactgaagaagcaagtgtccactccccacccctctcccctgccccccttttgttacttgaagtgtttctgagtaacaaatgcaaaactaggtttgaatataaaagctagacgaccatgccaattcaggattgtgtttcatctgaggagacctggcatagaaaaaacaagaattctctctcatttacaaggatactgtgatgaaagtcaaagatcacacataaatttatgatctctgagcaaaggcacagctagcataaactcatctgtaaaatgaggggttttgacttggccatctgtcaaggtccattcagcctgtcaagctagcgtcaaagttcagatcttccacgatgaaagaacttgccctctgctaaggtggatgcagaaagaaaagtcccattatattgtgggaccaaccttctgatataaaaaactatgttgggattaaagtagatcaataaagtataaatatttatcatagttgtagggtaaatattcaaaagtttgaaatttatgtatactgtaaaactggcaaactggtcttaaacacataaagcaaagattttcccatggggagagaaaatttgagagtaagcccagtgaattacttaagtcctgagcgtccataatctgcatccatgatgcctctctttttttccaggtcacttggacaagaatatttcttgtcttatgttggttctgaaacaccttttttaaaaaaagcatcaagaaattatgattcaggggtttgaaaccccaatgttacaggcagcgcctcatttctacggaatataaaacattttgtttcttccacttctaacagttcatcaagagaagccactactaaatcgtgttcctgcagcatttctgggtagcgggacactgctcgctcaatcctcgacgaacgccgtacaggagtgataaatttcatgtcttgcacttccggcatcccatttattctgagagacagcaagagatgcattaaaaaccttatcatttaaaaaaattatctttattattttttgtttcttattcaataataaaacagggaagacattttaacatagggtgatacaagagatatgtctagagcagctttcatcttcagatggctttttctaggagttcgagaccagcctgggcaacatagcaacacactatctttaccaaaaaatataaaaattagctgggcatggtggcacacacctgtaatcccagctactcaggagggtgaagtgggaggactgcttgagcccagaaggtcaaggctgcagtgagctatgattatgccattgtactccagtctgggcaacatggcaagaccccagtctcaaaaaaaaggcttttccctgatttccagaatgtactgggtggtgtccatctgttcttggatggtgtaagcataaggatttattgaatgaagtatgaagtgtggtttttatttgaagtcaaatatttggcagttggtgttcatttattctataaactttcaaaacagatgacaagttttaaggaaatggggcctaataccaaatttggttgaattaatgaattccaagattctttctagctttttctttttaaagacagggtctcactctgttgcccaggctagagtccagtggtgcaatcacagctcactacagcctcaacctcctaggatcaaggcatctgtccacctcagcctttcaagctggtgggagcacaaacgtatgccagcatgcctggctaattttttatttttcatagagttggggtctccctatgctgcccaggccactcttgaactcctaggctcaagtaatcctcctgcctcggcctaccaaagtgacaggattacaggcatgagccaccatgtgcccagccttttcattttttttttgagatggagtttcactcttgttgcccaggctggagtgcaatggtgcaatcttggcagacttgcctgctagttttccttaggctaatgtaattagtggttttgtgaattctagagccattaagaggtagtttttggattaactgttttcatctacttatgagctgactgtagttcatccacttatgaactgaactgttttcatcctcttatgagctgactgtagtgggaaaatggtgtgtgtcagagagtttaggattggaagagattcggctgtgctttccaggtaactaaaacaaagaactgttgtcttggtgcccttgtttggaattctttccagatcatgatcagagaagagtggtgctacactcacattttagaaaatgacactgacgccctgacatagctccttaaattactatggattctgccttaaatttatatttgttaaaaaataaaacgtttctgactttatgagcagtctctgactagtacatactccactgctctccgttcttagaggggtattcactgtcccttttctcccacagctacagagtttgctcccgcttgggactttgtgccccatcttatcaccccaaccatacccagctgtgtcaggacttgcaggaaaggcagataggatctgcaagtgcaggacaaatgagagtgaaaaggtaggcgagaccataggacgggggtgaatgcattctaatacccctcctgactctggcagcaccttcctcactgcaggtcaggtctcagttactctagatctgtgaaggaaaaatcgagacttggactagaattaagtctgtgaacacaaagtctgctttagagtttgcttacctagggattggaccaatctgtaatttgataccaggataattatgctgttctgccttggctattcggggtgtcgccgtgacttgttccctctcttttggagaaagacaagacttcacagattccatcttcttggccagctcttccactgatgttatactagtttcagcaactaaagagtcagaagtaatccctgtgtatgtaagatcatgaaggaaagtaagatttaccaatttaatacttcaactagaagtcaataacatgaaaaatacatacatacaatgatttcccagtgatcttcatgggctccacatactgaatagtgattgatttgaagtgtgacttataacttgttttttcacgttaagctctgtagcagtgtcttgctacatcaggctaccctcgtagccagcccccgagactgctgtacgtagattcttgacaccctttcaagactctgaacatatctccagtctcctattcactctcaagagagctctcttagggactaatcactggccttctacccttacaccacaccttggatcaattttcttgactcactaaggttaactcacacaacctcccaatcccattcctccccaggatgaccacatggttactgccttggacagtgggcaaaaactgtcttgcattaatagttttcatggtagcccaaacacaatcaccaaaatgaaaggaaggaaatcagactgtgccaggcacactgtggctagaggctgacaccctaagtgaggtcaatagggtgcaacaaaggcatggattcctgtcttctctttttattccttttaaaacactaccatgttttaaccaaataactgaattgtagcctcattctcaaagaatctactattatctattttatgtccttcttaccacatgtagtgggttacttagctacatgacttgattgttccccagttaaatctactctttttttttgagatggagtttcgctcttgttgtccaggctggagtgcagtggcgtgatcttcattcactccaaattccactttctgggttcaaacgattctcctgcctcagcctcctgagtatctgggattacaagcacgcaccaccacaactggctaatttttcttttctgtttttttttttttttttttttttttttaaagacaagacagggtttcaccacgttggtcaggctggtctcaaactcctgacctcaggtgatccacctgccttggcctcccaaagtgccgggattacaggcgtgagctaccgtatgcagcctaaatctactattaaaggaaaaagatttgtcaccttttaagataacaagaagaatccaatttattttctaaagatagcttgttttttctttccattcatataacaagtatcgtaagcaattataatgtcactcgtgtttggcacaatatatgtctcatagaagagtcttctaaaggttatgaccactgacagtgatggtcatccaattgaagagattcctgagatagctatttttaaagcgtaacacaaatttagatgagtatgttggtgggtttattatgattaaacatgtaacttaaggcatttctcctttctgcctcagtctcttccagcaaagagctgtttgtcttctgccatctaggattccaaggaagtgggacactccagtctaggctgttttggtggaaacaacctttgttcagtattgagtagtgcatttacttgtaataatacaaataagtcagctgatgacaatggctgaaagggccaggtcatggaaaccaagaagtgagaagcatttcaggggatgattcttttcttctttttcctatatgtcctggatgatttttactggtacagctagagaagatgaatttaaattcaaaaataatagtaccttctgtggttctgtttgagtcttgcaagatattaagaacaactttccgcaactcttgtattggctggaaggaaggaagaaaacatacaaaatcttaaaaacattcatgcaaaaaatttgctaaggaactttaacttcaaatacatgttttataataaaagtttccttttaaaatctcgtctaactataaatcttttgtctagcttgacagttttatagcttcatgagaaaagtaaaggaacagagaaaattctgattaagtgttggcacactcgacttaatgaacagatgtatttaaagttgtccataatgtaatttgtctacatcaaattctattttcctattgatttgtataatactgtcaaatatgtattcctacataaaaattctggcccaatgatgtaaagctagccacacagaaaatgcattttatatatagatatagatatattttcttgagacagagtcttactctgtcccaggctggagtgcagtggcgcgatctcggctcattgcaagctctgcctcctgggttcatgccattctcctgcctcagcctcccaagtagctgggactacaggcgcccaccaccacgcccagctaattttttgtatttttagtagagatggggttttaccgtgttagccaggatggtctcgatctcctgacatcgtgatccacccgcctcggcctcccaaactgctgggattacacgagtgagccactgtacctggccccaaacacaatgttttttgagatggagtctctgtcacccaagctggagtgcaatggtgcggtatcggctcaccacaaactccacttccagggttcaagtgattctcctgcctcagcctcccgaagagctgggattacaggcatgcgccaccccatctggctaatttttctatttttagtagagacggggtttcgctacgttggccaggctggtctcaaactcctgatctcaagtgatccgcctgcctcagcctcccaaagtgctgagattacaggggtaagccactgtgcctggcccagatacaatctttgtaggcattttgagtaattttctccagcttttcctgtctttcttcttttatttgttaacatacttagaaaaaaaaaccttcatggaaaagtaattttctgataaaattatctgagataggctttatttttcaagtatgtaaaccatgccatgaagcagaagctgcactttcccacaagaaaattatagttggaggtttgtcttccttacctggaactctgtatcaaatagatataaactgacaataaagcataaaagcaaagctttccgtacattttttcaaaatccaaaatagaattatgatttcagctaaatgaatgggaataaatgtatagaatatattacaaagagtgaattctatacaacattcatcaagcatattttatatttgtatagccttctggttaatgatggtggattaaatatacgtttatttctaatctctcttgaaaatcgactgaaaggataataaagggattaagaagaggcaataaccacaaaacataggagagaagaaatgacaataaggttttggaagctgcagtgcagaaggaagagaggtaaacaatttgatctacttgagagagttgaatcccaagctggcagtgtggctaagaaacaacctgacagaaaggctaaggaatgggtggtagggcccaaattaggaggactctttagcatctgttcaaaaagcagtcagacctccaaatccatcctgcacccctaaactctatgcagcctagtaactgtgtctgactcccttcatcctaacagaaaactgggaatgtattctgcaagtctctgagggatatcatgcaagattaggatagggtgctttctgagaaaaggagataagcaaaagtttctatgttgagggttgagactccctgctctcttctctcccacagcactggcagcctggtgtctagctcccaggaaggagattggaacagatttctccagataacttgaccagcttaagaggaaagacctaaagatactgatattgagggttttctaactagtcaactcagccagatcaccctgtgttgaagccccatccatgtgtctcgggctttaaataagctttttcagacccaccttttatatgtgcaaacagcccagtttcaccagcatctgtgtaaagcctttaaagaataatagagaacaaaacaaaaagaacaaacaaacaataacaagagagaaagaaatgaaaaacattggagaagaaatagacaatgtaggaagaagaaaactaatatgggttctaaaaacaagggatccacccaacttaagaaggatgtaaagggaatctaaaggtgatggtaaagagatcccagaaagacagctggtgaagacggcagtaaaaagtaacttgttcagtctggaataagccagaagggtctaggagaaagctctttatctaagaaaaaggaatcaatagaatatctgatgttttcaaagtattgaggaacttagacaattagcgaagagtttgtgaattaattatataataaatactcagaaaactaagcaaaggcaaaacaagacaataactccaggaaaagtagaaagttgtgcttgaaaggcaaagtaatcatagtatatattgcatggctcaacatattcatgtatttttttttttttttgagacagtcttgcactgttgcccaggctggagtgcagtggcccgatctcggctcactgcaagctctgcctcccaggttcatgccattctcctgcctcagcctcccgagtagctgggactacaggtgcccgccaccacgcccggctaacttttttgtattttttagtagagatggggtttcaccatgttagccaaaatggtctcgatctcctgaccttgtgatccacctgcctcggcctccccaagtgctgggattacaggcgtgaaacaccgtgcccagcccatatatttcttatatattcataacaatgtgaatgctaaatagtgaccagaatttccatgactctaatgaaagtataaggaatggcaaaggtctataaggatggtaaataggggtgtgtatttgtgtgtgctggggatctgtgtatgtatgtgtgaaagagggctaaatcttcactctgcatagctggaagtccataaatcatatctaaaactgaaaaatcaagaaacagaaacacgttttctgaaactatagaggttaatataaaaataaatcagtttgctctaggaaggggaaaatgggagggaaggaaggcagaggtcttactgaacgaaacttatcaaactacttgactgcttaaactatgtgcatgtacaattctgattttgaaccattatggaaaaaggtatcacacagaatacagaacatgacatggaaaatgacattttaaggaaaagcattataaaactatttgatgcagtttttgtaaataataattatatagtttttttttctaaattttagaattaaaagttatttcatgcaatggctctgaattattgatttaaggatgctgacgtattgggtttaatatatttttaagttctttatggtaaggtatgactttataagtgttggatattgatgttgcaaacttctaaccatcatattacaaacaacaacagagaactcacatgaaagagaattttaagaagttacccacccaagacagatactcactgttgccccatttttaatggcctcttcatatagcccaataacatcaaaggtgcctttacttgccaacaactttgctttgcagatccagaatttagcaaatttttcagcttcaggaatgctggacaatatgttaagtatttcattagaaggtacaccctgaaataaaccaaaatatccagaggtaattattaccatttcactgttagtctcacatctcctaatatttattacagcaggtatgcagaaattggtttgatcactaatatttttgaacttttaaaaaaatttcaattttactgaggtacaatgtacatgtaataaaatgcacctgttttaattatccattttaatgatttgagattaataataattattattttttttttgagatggagtcttgctctgtcgtccaggctggagtgcaatggcgcgatctcggttcactgcaacctccacctcccaggttcaagcaagtctcctgcctcagcctccccagtagctgggactacaggcacatgccaccacatgctcggctaattttttgtatttttagtagagatggggtttcaccgtgttagccaggatggtcttgatctcctgacctcgtgatccgcccacctcagcctcttaacgtgctgggattacaggcatgagccaccatgcctggcttaatttttctttttttttttgagacaaggtcttactctgttgcccaggctggagtgcagtggtacgatcacaactcgctgcaacctctacctcctgggatcaagcaatcctcccaccttagcctctcgagtagctgagaccacaggcatgagccactgagcctggcttcctcatcattaaattttaagagttatatgagaccaaatagaaaatgtttatcatagctgaaggtaagaaatatgttcatttttacatggtacaaaaacaaaacaaatcctagagtaaacatttacatattcataatattccatatttataataacgagaacactgagtagtgatgagaatttccataggactaatagcagtgtaaagaatgacacaggcatgcgaaggtcataggggtgtatatgtgtaagtgtcagggatttatgcaggtgtttatgaaagagggttaaatcccacaaaaagataatttgaaatggattcactggtttggttcccttctggcttgtgccgtaagcaggacagtgacatggacccaacgaatggggagcactaccatgcccagaaatccaggtactggcacactcagccaagcagcaccttctactgctagaaatgggggagacgcaaaggtaagttcacaattgagaatcactaacatttgagaaaaccaacactacatgaaagaggcataaaactcaacaaacaagaatgaacactggagcaaagaggaatacttttaagagtatcacagtcaatatcttcagagtgataagagagagtattgctatcctaaaactagaatgggctgttatgaaaaataaccaacagaaaggcagaacaactgcatggacagcgctgaagaatacatctgtgagctgaaaattcagctgtgaaatcctcctagaaaccagtgtaataaaacaatgaagtgaacagtatgaaaacaacatttagagttctgaaggatatatccattactcaataactccaatatccatctaagagagtttctagaaggaaaaaagttcaacacacaaagtggttgtagaagaagaatttcaagaaatgaacaaagaaacagttgttcaggttgaaaaggctctcagatagttaagcaggatgaatgggagaaaaaaatataatagaaaaccaaagataaaaagaaaatcgtacaagcttccagagagggggaagaaaaggattacctataaaggaatgagaatcagactgacgtgagacattaacaaatcaacaactccagatgcaagaaagaaaatgaagcagtcacttaaatttttccagggaaaacaagctgaaattaagaaatttcccccagccaaactatgattccagcatgaaggcaaataacaagtttcacaagaatacagactcaaaaggtttgccattcaaaaatcataaagtcactagtgagtaaactttagaattcacatgaaagacttgaaataaaagtaactgcaggccaggtgcagtgggtggttcacacctgtaatcccagcactttgggaagctgaggcagaggactgcttgaggctaggagtttgagaccagcctgggcaacacagtgagaccctgtgtctacaaaaaaatgtaaactataatgggtgtagtggtgtgtacctgtagtcctagctactcaggaggctgaggtggaggatcacttgggtccacccaggaggtttaaagttgcagtgagctatgatggcatcactgcactccaatctaggcaaaagagtgaaaccctgtctcttaaaaaaaaaaaaaaaatgaaaaaaggaactgcaagaagaatatgatatatattctgcaaatcatgtttgagcttacatctatcactttattttcatttcagtgtattattttatgaaataaaactagattaaacacagaaatgaggaaaaaataattcatgtaagctgaattacaaaataaaatagcaggcataagtttaaacatacaagtaatcataataaatgtgtacgaactaaatttgctttttaaaagcagagagtttcaaatttgtttaaaacatttaactgtgtgcatttatatgagacatacctaaaataagtcagcccatgaaggcttaaagtaaagggatggaaaaagagctaccagagctaccagacatattctaacaacaaaaagcaggtgtggcaagattaatcagacaaaagaaatcaaagcaagtcatgaatctttctgtacctaacaacataactttaaaaaatagaaagtaaaaattgacagacatatgaagagaaattgtcaatgattaatcacagtgccagtgacagactttggcatatttctttcagaaagcaatagatcaaataaacaaataggatatacattattttcaaacacttttggaacatttaccaagaatgatcagatattaaggccacaaagaaaatttcaacaaaatccatcaagtagagtacacataggccacattcaccaactacaatgcaatataattagaaattaacagcagaaaaaaaaaatctacacatctggaaattaaaagatacttttctaagatattttttgggttaaagaactcaaaatgggaatctcaagctatttagaaatgaacaatgacaagatatgtcagttatgaagcttttgtctattggccccaaaccccatcctctgctttgtgatgctggggataaaactctgtaaaactttctgctgggcagcagctccctgctcagctctgccagcagggggcacgagagggaggctgcagggatggagaaggaagacacttgcttcttcctatttgctttcatcaccccagcaacggtccctcaccctggcagtaacagttggttctagcatctttttttccccctcagagcccacctccctgtgcagcttcagagcagaagcaccaaatggatagcatcttttcctcaaaatctgagccccagccctgcagggcctctcctccatcatctgctgggtagtatgccttccttacagttggagtcccatttctaccagggtttgtctctcctgcttcttggttctgataccctaacctctctttgttctcctagacccagtgggtacaagctgcttcctacagttatcacattacctcaggttcctgtgtgctgtcagccctgtgtgtagcacccacactccttctgatcccttcagcatcttgtgcacacaggcttaccgcgtgctttcacagccagcatctgtgctccctcgtatgtgcccagagagtgagaagtgcctgacaattcttgtccgcccgaggcagccatgaataaatgaccatggaagctttaacaatgtagctcccttgcctctgatcaggatgactctgagagatgtgacctacactgtctccagagctcccctgtggggctgtgccagagtcaccgtccatggattcgctttttnctgnatnccctacaacttcactcccctcccagttttccctggagtgtcttcctaataaactactttcacatggattctcctcttaggctccacctctagagaacccacataagatactgtgtaaccaattacattctttctgtggtttgtttttcagacttgatcctgactgataaagagtattacttagtcaaatctgagggatatgaccaaagtaaaattcagaggcaaatctgctatagcactgaacatatttataaaaaaaaaaaaaagaaagactcacttttaaatgatctaaggtttcaattaaaaagctaggaaaagagcaataaatataaaaatagatgcagacattgatgcaagagaaaaaataatcaataaaacctgaggtcttttaaaaagattaatgagaaaaaatctttggcaataaaacctgagatcttttaaaaagattgagaaaaaatccctttaaaaagtcacaaaattactaaagttgactcaagatatatgaactctagaacaatgaccccataacaaattgagaggatatatacaaaattatcctccaaagaaacacggtccagatgatttttatgggcaagtttttatcaaaccttcaaaaaataaaaataattctcatgtcatacaaactattttcagtttatagggcaaaaaggaaaatactcaactcatctgcctaagtcagcataacattggtactaggaaaacacaagaaaagacaaccaaagtacacaaaaatgtgaataaaagaattgcaactcacaaaaatataatacttcatttctcgacatacctatactgtatggacatgcatgaaaacagaatgaatgactggcaatggtggtcacctccagagagaagtttgggatgcctaagtatgtatgtttgtagagggagagggctgatcatttatctgcattacttgaaatgatttcaataataaaaaggtactcatttttaaataatacaacaacaaaaaaagaggataagaaaaagaactcaagttcaattccacaaggagaaatagttaatatttaactggatgttgtgaaaatgttgcctggagtagacttaaactgaacttttccttttttttgctgatgttcaacattaccagccaaaggactgaatgagttttgctctaggcaaggatcttagaagtttattccatcattttttattaatatatttttccttcaggaaaaatttctcctaaggatcatactctttgcctaccatctattttatccttatctgcagaatccaagataaaatttaaatactatttgtagctacccagagtattcagaatactccaactttacacagaaacttgccttctgacctcagtttcaatgttaaatgtgtactcttcagaacttgatacccaaagaaagcaaagttccttttggagccagtttgtttggattagttttccaacttctttgtgcctcagttttgtttgtaaagtggtcatagtaacagtggttatgataattatgtgagataatcttagctaagtgcttataaaagcacagatacacaaaagacactgtttatgggcatgtcattattattattactctgtatttacaagagtagctaaatttctacttagatgaaggctatctctcctatattatatttaggaatatgtttaaaaattataagactttgggccaaagctggaggagcttatcttcttcacttaccccttcgatgaggttcagacattctgtcagagtgttgttaattttactggacagttcgagttgtgctttcttttcttcctcttctttttcaatgctcttccagaatgaaatattcatttcctttattacttttctttttgttttaagttccataggaggccgtttataggtttttcccttagatttctgccattcttctagttgtttcctgaaattcaattaaagggagagtggttttatttatttttaaacatagtcaagctgctaaagtatatgatatgtatagatagagtataattaaatactttcaactacagacaaaatcaggagaatggaattaaaaaacaatttacaaatgggtaatggcagcattgggttgcgcccacccacgagaaggcagacaccaagattctaagatcacacgtggccagcacttcagacttcaaatagaattcgtgattatgcattatttttctcggaaagttttcacttcactatatgctacttgacacttgctttcctaagacatccctctatttttgagatgactaactcagcaattcatttctctcacgcataagctgtcactcaacccaaacccaccaagcctgcattctaccctcaataaggtcttggtgtgtaaactgacccacttcacctagttccttagccctctcttgaccagacatgactctttcataagctagacctataaagtcagggctcttaagtagctgatctctgatagtgccaagtgtcccccactgttcacattttccactccagcttctaacaggtgatagactgctttttgggggtaggggcaccaagacatatagacctcatgtttggatgtagacactccagtttctttaaattacaactacatattaataatgacttccaagtgtacatttcagtccagatctctccctggatccccaaactttgtaaaacccaccgcctagttgatatcttttgatgtctgacaggcatttcaaatttaatactgtcacaaacaaagttattgattttcatctctgcatctgttacaaatttttcttactttggtaaatagcaccccaggctgtgtcactgccaagaactttccacagctcttggaataaaattcaaaatattttccaaggcagaaaggcacagtgtaatctggctcctgcctacctctccaacctcgtatcacactagtctccctgtcactcaccccctccaggagctcaggtatccttaaagtttcttttctttttttttttttttttttttgagacagttttgctctgttgcccaggctggagtgaagtggcatgatctcaggtcactgcaacctccgcctcctgggttcaagtgattcttgtgcctcagcctcccaagtagctgcaattacaggcgcgtgccaccacacccggctaatttttgtatttttagtagagatggggtttcacaatgttggctaaaccggtctcaaactcctgacctcaagtgatctgaccacttcagcctcccaaggtgctgggattacaggcgtgaaccattgtaccctgcctccttgaagtttcttgatccagactcattcctgccttaaggtcttgcatcttcagtcctcccctcaaatgacacctccatgaagacgcaattacctgtaattaccgtgtcttatttagtcaatgtgttggttttctgtctcctccactagagtgtaagctctatgaaggcagaaaccttggcagtccagttcccagcacagtgcctagcacacataggtatttaataacacacagtaaaattcaccttttagtgtgcaattctgagttttgacaaatgcatcaagtcatttaagtctgactattatcaagctataagatggttgcaacactatcactaattccctcatgctccttggtagtcagtctcacccctaacgcccccctcctggcaatcactgatccgttttttgtctttatagttttggtttttccagaatgccaataactaagttttgaatgaatgaatgctattaactctcatttctgactccagagcaacatccatgcaatatttattatttcagccccaaatactgccccctcaccttcactccaaccacctacttgatgatacaaggtgagacatttggcatgtgcttcctccatgttcctagcattttccctatctccttagccttccttctaatcataaacgaagagtgaactttccctttctaaaggcaacttactcctaggacctcgatgccataattttgtttctctagtactttctatatatacaccaaacaattagctccagaaaggtaaagactcactgtgtgctcatcactgtgtctcctagcgcctggcacactgcaggtgctgaagaaacacctacagaatgagtgaatgaatctctccctctctagactccttctcttttgtaatcaaacatgttcaacctgcaacacagtcttatgaccaatcctctgttgtctgacctaggctgagctccagggctgggaccctgacttccttattcaccacctcaaggtctctgcactcacttctctttctgctcaggattgtttttcttcttgtcaccagtcttttctcagacttaggtctcagctcagacattgctgttgaaagtacttctactgatccttttatctaaagcagccattccagccctactctcttgatcatagcaccctgaattaagttgtttacttactgtctcttcaggagggcaaggagcttggtggtggtgttcagggctgtaccaagctgtaccttgcttcaccctgctacactttttagcaaccatctaattttacatgctcccttcactcgtcagaaatttccttattttctacttcaagcaggtatacatatgtgcttctcctgggaggctcacccacttcatgagactacatttggtcctgggtagaaagtgtacaaaatccactggctcagttttaatcaatgtatgttaatattaaccaacctgagatcttgatttccacgcctggctaattttgtatttttagtaaaaacagggtttctccatgttggtcaggctggtctcgaactcccgacctcaggtgatccgctcacctcggcctcccaaagtgctgggactacaggcatgagccagcgtgcccggcctaagatcttgatttctaccatctgaactctgtatttgaactgactgctcctgcttgagcttactggccaaaacttggcccactcagactcacggaagtttctggttcttccctggtaacttttctgaacttaaccactggtttgcttgacaagagattaccatcttctcacttcctagctatgtgaactcacttatctgctctattgctgttcagtctagcacggcacttattgaacgagtgtctacatctgcaccccctacttcttactcatccattctgtttcaatttcttaaaaagaaaaaaaaaaagctattgtaaacatacgattacagaaaatgatttataacatgtgtatgtaccacctagccctgtcaagtcttaatatttgttatatttgcttcaaatcttttttcagactgtagttaaaaattacttaggagccattatttatggcctatttcctgacctagtcttcttgatggtcaatttgcctaatcatcttaagttgcaaaagcttagaattaaagcaaagtaccttcgatcctctgctgttgccttctttttaatatttgggtttgtttgggtcccatttacggttgtgacatcagcttgagttttgggagctgtcttgttcagaaaatggttctggggaacagcctttttcaacttggagtccaaagtctgtgctttttgctgaaagccattattgttatgtttattaccactggttccatttggtcttatgctaggggtgcttggaatggctgaattaaatctgccaactgtcaaattaggcctctggcttatggcttttgacttttgcagtacacatgatgtctgaggtatacaaacttggctggacttctgatcttgcttgatgtttggatgtctgttgttatattcaccctgaagcaaactggggtatgttctgggtttggtgtgcttcactctctgttcagtaacagggtatgaccgtatcttagtttcatttggtctttcatattgactcctattaacctttatatctttgatgttcttgactactggtttctttgatgactgaactttactaagggtccgaataaagtgagagggaaccgtccttgagggttttactcctggtcttgcaagatctgctccactagagagttgctgtgatttcactgggaaagtcctgctttgtgtttctccaacaaattgtttattaaccctatctttcagaacagcactattaactgaacttttgcccaaggcttgtttaggaactaaactgttcttggtttgattataagagtcagtctttggcttacttctggtatataatttaggatctggcttcctctcaggttctgttaagatatcgagcaagttctctttgtttgtttcttttagaaagttatccaaagattcgttttcaacatggatattattcataaagtctatacatttaccatttccttgatctgttaactgctgctttgtagttttcaattgctctatattaagtgaccccacaggttttcttgacagttctcctgttgtggacgatccagcttcacactgttgaaaactcttgctagaaggcttagagtatgggttagaagaaacacattctgaagtcagccttttgcccagaagttttggtggctccaacttcggcttctgggaccctgcagtattaggtggtctgggctggagtttaatgctgatggaccttttaggtttgacaggcaaaacaacatggctggtaacatcatttttgggtctaatagtctgaaaaaacaaagaaaatacatattaaaaaatccttaacatatcttattgtttttaaaataataactgtgtttaacacatgctaaaaaaaataatcatttttagaatttcatctaagaaagttgaatcctcagaaagtaaagaaagactcactaataggtagtttttgtgttttttttttttttttttttttgagacaggatcttgctctgtcacccagtctggtgtgcagtgatgcaatcttggctcattgcaacctctgcctcctgggttgaagcaattctcccaccccaacctcgcaagtggctggactacaggcgcatgtcactacacctggctacttttttgtatttttagtaaagttggggtttcaccatattggccaggttggtcttgaagtcctgacctccagtgatccacgcaccttggcctcccaaagtgctgggataacaggtatgagccaccacacctgtcctaacaggtagtttttacaacttgagttcctatcagaagtatattagaatcttttagcttgacagaattaagcagagatgcagtgaatatacaaaacttgctctttcaaaaatgaatttgcctcaaacagtagttgttgaatgcctattatatcctaagtgccctccaaagaaccctgaaaaaatacatacataatgaacttatgttagggtacctcccaacaaatctctcctagtactttgtatagccacactatatgttttttaaaccactgcctttgtaaacatcacagtatcactcaagaacctctgtctcatccctggagatcagtgacaaggagataggtggcagatgatgtgaggcctgagatatgctgccacagctctcaataaacatgtaacatcttaatagtcatatttgtaaaatcagccaggacagggttttaaggttagagtctatgttaataataaacaaatgtttagtcatgtgatttaagtttggataagaaaggtaggactcgattacagagaattttgaaaactagggaagggagtttagaattcatatggtaagtaattgggcaagccactatgaattcctgagcatctctcatgaaagcaattactcagaaaggagaatttcacagagatttatggaatatgtttccagggtaagatatgggaatgctagagttaccactctatttttgatttgacaaatattgtgaagaatcactacataaacttggcgagtatgtaaaggatttctaaccagaaccatttggcattgagggcaaagagatgtctactctggatgatagcggtgtgtgtggtgttactaggagtgaaacagcggagttgggagtgggaggcagagagatggatggtatacccacaatggctatatctggattaatctttgagcaccaacatttatatacacctcggatctctccatcattgcttactgaagaggtggagggacgttggcatgaaagcttccaaatgtgtttttttagttgctttcttatatattaaaaacaaattgatacaatccacaaaccataaaattcaccattttagtaagtgcacacttctgtggattttagtatagccacactattatacagcaatcaccactgtctaattccagaacatattcatcaccctagaaagaaacttggtttacttgttggcagtcactccccattttctgctccctgcagttcttggcaaccgctagtctactttctgtctctgtatgtctatagatgtgcctattttagatgtgtcatataaatggaatcatgtaatatgtggccttttctgtctggcttctttcacttagcataacgttttcaagatttacccatgttgtagcatgtatcagtacttcattactttttaaaattaacttttttagagcaggtttagattcacagcaaaattaataatagtaaaagtatctattatctaggaaggatgccatatatcccggttttcacaagatagttttgatttatgcctgttggtcaaagagtactgctttttactctcaaaagtgtcctggtttggacattaaagcatatggccaacttcctcacatggttgttctgagtgaggtaatgtatataaacatgtctgggtgttagttattgttgtcatgtatcgaaagtgttatataaattgtcaagcattatataactgtaatgatgactattatttacatcgtgcttttagtttctcctaaattctgtaattcccttcctgagttcactttttacttttacaactgtgtaaagcagataaggtaggtatcatcctcatttacgagctgatgtactgaagtcagtattgtcaacttccagagaagcctctgggaagtctgaatgagggccctttccagtagatttttccttaagacttgcatactatactggttcaatctgcataaagtaaaagtgtaacccagtgcttcccaaacgttaaaccattgttcataaattttgccttatatacattttgctatccttcacagtgtctaatgatgtcatgtatacatacaacatatatatgtctacatatgcatatgcatatgactgaaatatgactgaagtgatttggtgaatcattaaaacttattaaaattctcaccagtgagaatttttcacttcaggaagcactattttagttacatttcagaacacagataaaaacttatatgtctatatatgcatatgcatatgactgaaatatgactgaagtgatttggtgaatcattaaaacttattaaaattctcaccagtgagaatttttcacttcaggaagcactgttttagttacatttcagaacacagataaaaactatgttttaaaaaactaaaggtgagatttttattgcagatgaataatctgtgcctctttcagagggctaatttcttccatttaaactttaagttaaggatcctttaccattctatctaatgtagctaaattaaattgattaggaagcatatacttgttaagtggcttggaaggttcaatgcaaatgttctcttttaatgactactgagctatttaacttcatggcagcataccaaagtggttaagatcacaggctctcagctttgtcacttaatagctatacgacctatttaacctttctgtgacttagtttgctcatctgtaaagtggggctactaatagtagcctcataagattgtgaggactcagtgaggtaatgcaagtcagaaaagtatcaggcacacagtaagcattcaataaatgttagctatcaagaggactaaagttcacttgaggcttttcttggttaataaaactaaactacttttcaaaaaatgtcatacttttcaaaaaatgattgtctcttattaaaccaaactgtttttatatctgtaagaaatacctttcaaatacatgttctttaggttgctaacatctttattatttttattactaatcatacttatgaatgcatatttttaaaaagactaatttctacttacagatttagaaggtggttgattctggcaattattcttggattttagataaggcctataaaagacaaattaaaattaatcctcagcacagaaggattctaagctaagcttgggaagtacagtgattaaaaattatgaatagaattttaaataattagaatttctgtaatggcaaaataattcaaaattatatttaataaagtctccttatcatcatttctttagttctgtatcctcccccttggagaccaccaactgctcctactctttttttttttgccttgtgatccttacagagactgtctatacataaatctagcattctcacaatattaatgagatatatgtgtttccttcatatttatatagtcttactcattcacacatcattcctggagcactgcaatgtgccagacaccgaagacgcaatgccaaataaacccattaactgtttctttaaaaaatttccggctgggcgtagtggctcacgcctgtaatcccagcactttgggaggccaaggcaggcggatcatgagatcaggaaatagagaccatcctggctaacacagtgaaaccccatctctgctaaaaatacaaaaaaattagctgggcatggtggcacatgcctgttgtcccagctactcgggaggctgaggcaggaaaatggcgtgaaactgggaggcagagcttgcagtgagccaagattgcgccctgcactccagcctgggcaacagagtgagactccgtctcaaaaaaaaaaaaaaaaaaaaaaaaaatttccttgttttcagtatcttcaaatactatctcttctaactttaagggggtaaagaaatattaaaaaaaaaaaaaccaagacacacatgaaatatagctagtgagacaggaaatgcagaaaaaggattggaaaacagaggtgaatttagaaggaatcaatctgcatggaccaaaaacaattgctagactaacaaggactttgattatgacttgtttgatgtttgtctctcccatctacagcataagccctgggagggcaggaatgtctgtcttgttaagcgccattatctctagcatcagaagtgactgagatgttataggtactaaataaatatttgttgaataagtgaattaggttcatttaatcaaggaaatagaggtgagtaaacacccaagataaaataaagggtgaaagctaactttgtaaaaattaattttcaaataaatacttagcaactcaaatggggaaaaaattaattaatgctaagaaaggacaaataacacgacaaagatggtaagaatctacaaaggataaaaatgaagtggacatgttctgtctaccttaacagtaaatgctaagagaatgacccaagagcagagggtatcactctgctacggaggattgattgtaactggctctcctgccttagcaagaaatgccagaaccatggtcattcaagttcttgaccaaaaactgccttcatgagaatcaacttccccaagaaaaaaaaagcagaaacaggcaaagcttccagcatggtaggtaatactgacccttcttccctccttcctttggagattcacacagtaataatgcataaagctttgccaatggactaagcactgcccaggggtttttgtcatgcctggactgaaatgctctttttgcgttatcatagaatcccagtgcagtctgagtagactctaagcaaaagggacatttttcaaaaaggctttaaattgctagtacaaagaaggcaacaaaacttgcgtaactgtggacagataaactcacttggtgttttggctcttcagttttcccttggctgcaaggtactcctgaagctttctctgccgctcttctgcaacacaggcaagcaaacaaacgacataactttagttcaagattttaaccagttcattaatattctaaaagatgacacttttctctagtgattttgcctttgcaacataatgttataaaatccctagtcctataaatgtgccttcaagctaacatcaacatcaacaatatcatttatatgccaggcctacactaagttctttaaacttactacttttttttttttttttttttgagacagggtcttcctctgtcactgaggttggagggcagtggcacaaccacggctcactgttgacttgatctcccaggttctagcaatcctcacacctcagtctcctgagtagctgggaatacaggcgtgtaccaccatgctggataatttaaaaaaaattttttgtagagacaggatctcactatgttgccaggggtggtctcaaattcctgagctcaagtgaccctcctgctttggcctcccaaagtgctaggattacaggcgtaagtcaaagcactcggcctaaatttacattatttctttcaatccacaaaacaatccaatgagtttttgcaatctgaaattcagagagagtaaatgtcatgcccaaagttacccagctaatatgtggcaattccaggacttgaaaacaggcttttctaaccctggagctcacagccactgttctcagctacaacagtctgttttgaagaatttctgttactggcccacctgagctggtgagccaggcctggtcttacgtcttttgtttttttacagggatgatgattttcacccacaaacccttatatggcttcctttgttggtactaaggataaaatacgcccggtctgctcacggcagacacctatactatggtgactttctacgcaagccatttgtgaggggatgacaagtcaataatttctgccttcaagaactttcaaactagtagtggagataaaatcaacacagcaacaattacagtataaggtaaaatctaagggccataagagaggaaaagaagtatgggagttcagaggtagggcataaatgaggggagtaggtggctagaaaaggttaaaagtaaataatgatgtgaaggaagacaaaaagacgacaggggtgccaaacgactcttaacctcatctgaacggagttgccctgttttgctctctgatgctcatgtatctatccttagagacagcttggcgggcaatgtagagcgtaggggctgacatagggggttggagtcccacctccgtgacttctagcaaattagcaaactttgctgctgctaagcctataaggcggacagaaatgccatctttaaagcttgttatgtaaagtgcctaggacctcgtaggcatcaacaggaataatggatgaaacaaaacaacggtgcgtatcttggagaaagtggcatctgagcaggagtattttgaaaggtaggaaagggctccaagcacatctaagagattagggaacgcagaagccttagccctgggtgcagatttaaccaatcaacttctaaccaccgcaggctgagaggtgtggagtgagagccccgccagaggcaggagacccgggcttcggccagaccccgcctcctggtacagaggaccacgcccggctctgcctggagccaaatgtggatcaaaacagcgcgcagcttcccactgctggtgaaaacccgagcaaggggcctcagtttctttatccggaacgtggtgacaatgacatctctttgcaaggctgctgcagggctttctggaaatacgcccgtgaggtatctgggcctgcgcacagcctcccccgcccaggacccagacgtctacctgggggtcccgtctgcgctcccgggatggaaaacgcccaggggaaacttaggcaggcgagcggacgggcacctcccgcgggacgaactcactcggtggcctcctacttccccggccgtgttccaacgcctgagaataacgggaacagcggtcgtactcaccgacagcggcagcagcggtaggcccgggccccaccatgactcttcagtgacagtttttcttcaaacgccgcgcctgtagccaggaccggcgtgccgcgcgtccacgcgtcctcattggctcctgcgggtttgaaactcgctagtcgtcagcacgggagggcgggacaacaggcaataggctctttgcggttggctctggccttgagaacccgaccttggggccctttgattggaagaacgtgcagcgcacctcggcattgagggcggcttcctcggggcgcggcgccgcccgcctctgagtgcgcctgtgagtgcgcctccgagtgggcgtgggaccctccgtgggggcctcagccgggctggtggttggggggcggttacgctgaatccagctggggttggcgcgccgggagtccctgggcggagagacagggcggtcctcccaggatgctggggccgctacctgattctgtcctttcaaagtctcagactcacaggagctgtgaaaaaataatattataaagaggacatatgggtcttatgcatctaaaggctcctagttcttagtactgcagggtggctcgtttaattgtggtaaaatatgcataacatcacatataccattttaaccattttaaagtgttaaatttttcaaaaatgtgcagtttagtggtattaagtaccctcacattgtggcacagccaccactactgtcctttccagaactttttcatcttcccaaatgaaaccctgtacccgtcactaactccgcactcctccctcccccagccccaggcaatcaccattctagtttctgtctctatggatttgacaactgtaggtgccatgtaagtagaatcatgcagtatttgttctgtgactggcttgtttcacttagcataaagtattcaaggttcatccatgtgtagcatgtgtcagaatttcctttccttttaagggggaatagcatttcgttgtgtggagatgccacattttgcttcttggtccatccctctccggacacttgagttgcttccactttttggctattgtgaataataatatgaacatgaatgcacaaataactctttgagactctccttttcattcttttgggtatataccacgaagtggtattgttggatcaaacggcaattctatttttaattttttgagaaactgccttactcctctcacggtgatctcttgttcaaggtatattttcgatttcacctgatcagctgactataaggccataaggctaacggagaaacgcaggcctagtttctcctagttactaggagatcgcaggcctcgttgtcctgaatccctagacacacttcattccccttgttttaatcctaaattttttttcttttgaagtttgtcctgtttcatctattctccagtttcttaaagaggtctggaaaatgcttttggctccttgtgtatgaaggttcctcttccatggatgctggagaagtcgtgtgtggaggggcagtcatatctgggcacctgttggccaggttcagcttaccagttgggtactcagcagggcatgaagccactgcagcagcccttctctttagccgtaaatagggagtttggaagagagccagggtttctggatttatgcattttgatattttcaatagtgtattaaatgtttaaaataggaaaactgatcattatttttgttaatgactgagaaagggactccttcaccaacagtttcagaaaagtgaaggcggttttgttttggtctttgtagaatctaggtggttgaatgcatgtcagttgtagaagtcaccttgcctgatatcccacgtagtgctggagtattccacagaccccatgtaggtactgcacctttgcaggtatactgctggtgttggtgagctgccttacctgtcctgttattggagacccctgcttattaggaaacttaaaatgaactcaaatgagcttccttgcttactggtcctagtcctttggagcaacataggccagttctgcctcgtttttttccatcctttgggtatttgacggtctattttgtaggacacaaaatgtgggaaaatagctaggcaggtttaaaaattctcaactctaccaagcatggtggcttatgtctgtaatcaatcccagcactttgtgaagctgaggcaagaggattgcttgagcctaggagtttgagaccagactgggcaacatagcaagacctcgtttcttaaaaaaaaaaaaaaaattacaaaaattaaccaggcatggtggcacacacctgtagtcccttctactcaggaggctgaggtgggaggatcacttgagcccaaaagttggaaggctgcagtgcactgtggctcatgccaccgcactccagcatgggaggcagagcaagaccctgtctccaaataaataaataaattaaattcttaactcattcatcaaagtatccactgtagctttccatgatcctggtgttgttttttttagaaggatctggctccattgcccggctagagtgcagtggcatgatctcagctcactgcagcccccacctctctggcttaagcgatcatcccacttcagtcacccatctgggtaatttttgtattttttgtagagatggggttttgccatgttgccccaggttggtcttgaactcctggctcaagcgatccatctgcctccatctcctaaagtgttgggattacaggtgtgagccaccacaccaggacaatcctggtggcttttaacggttttccattgctctcaggctaatgacctataagcccctgcgggcttggccttttactccctcagcattagccacctcccttagccttagcccacactactctccccttgctcagtgttatccagacactttgttttttcctttccatactcctctctgtctgggaatccaacctttctttctcatttctctagttgattattattatttttactctagcagccttattgagatatttacataccgtacgattctcccacttacagtgtacaattcaattttctaacattttcatcaccccctaaagaaaccctatactcattagcagtcactccccattctcccctcctctcagcccctagaaaccatgaatctactatccatctctatagatttgccttctggacatttcatatgtatgaaattatgcaatttgtggtctctgatgggcttcttttgttaccaaaatatcatgggtttgatctaggtcctgctgctcgctgcacagaaagccagccactgagatgacaagtattgccaaggaagaaggctttagtcaggtgctgcagctgaggagatgggggctcaatctcaaatccatctccctgacctaaaaccaggggtttggatagcagggaagaaatgtaacaatgcgtaagaaaacaggaaccagggaggggcaaggaagcaatcctgatgaatgagtggtccaaagtctcattgcctggatgtggtgatctggcgagtttcagttctttgatactttttttgagaggcctgaagtcttttccccaggaaggaactcaaacaaaacaaatacaagcttccagctttaagaccagaagcgtcaatttctatgtttatccgaaagaacagtctatgggactattggttaagtttcactttcacttagtatgctgttttcaaggtttatccacatagcatgtgtcagtacttcattcttttatgactgggtattctattgtgcggatatacaatattttatttgccattcatcagttgatggacatctaggttctttccactttttggctattatgaataatgctgttatgaactttcatgtataagtttttgtgtagacatatgttttcaacactcatgggtatatacctaatgagaggaattactgtgtcatacgataattctatctttaaccatttgaggaactgccagactgttttccaaagcagctgcagcattttacattcctaccagcagtgtatgaaagttccagtttctttacatcctcaacaacacttgttattgtccatcttttaaattacaaccatcctagtggttgtgaaatggtatcacattgtggtttttatttgtatttccttgatgactaatgatgttaagcatctttttatgtgtttactggccatttgtatatctctattcagagtctttgccaatttttaaattgggtcagttgtcttcttcctttttttttgagatggagcctcactctgtttcccagctggaatacagtggtgtgatctcagctcactgcaacttccacctcctgtgttcaagtgattctggtgcctcagcctcccaagtagctgggattacacgcacctgccaccattcccagctaatttttttctttgtattttgagtagagacggggtttcaccatgttggccaggctagtctctttgttgactcttaaccatccttcagtctcagacaaaacatccctttctcaaggattgtgattagcttgattatttgcttatctttctccctgctagtctgtaaactgagggtaggccactatattcattgttcttggcaccaaatagaaactaaattaatgtcttttgaatgaatagggctttctccttttaaagatcccttcaatacagtaaccacactatatataagtagccacaagcccattcaataatactactagctcttatagcccatatgtctctgccttgtctaccacaatatcagtagagactttgctaaatgcaatggtaaaaatcaaaatacaggctgggtacggtggttcatgcttgtaatcccagcactttgggaagccaaggtggcaggattgcttgaagccaggcatttgagaccagcctgggaaacatagagagaccccatctctatgaaccacacccccaaccctcccagaaaagaaataagtatggctgggttgaagtcaccaaagatggctgactggctggtcaagtaactttacctgatggtttgtagaatatttaccttcacccaggtgggagaattgcttgagccaaccctcagtgtggattcaggaacttgatttaattggtatcgtgattgtggattagattctcagggatgcattcactaagtaaaagtgataatagctacttttaagtaaaataatgaatgaatcaaacactctaaatccatggtgctatgctaagctctttctgtattttatctcatttgatattacaaatatttgatgtgttaatagtaatgactatctccatttttacaagtaaggaaactgacattgagagattaaaagactagcacaaatcacaaagtaaatgagatttgaatccggtcttgattccaaactctacagtattctaaattcaaggagactaaattataagatggagagccaattttactttataacagggttagaatggcagaagagacctgacattcacacctctagccagtgcatcatcttcctgtaggcaaatatgcaggaaatctataataagaacgtcctttggtgaaggccaggtgcaggggcttacacttgtaattccagcactttgggaggtcaaggtgggagggtcgcttgatgacaggagtttgagaacagcctgggcaacatagtgagaccctgtctctacaaacaaaaacaaacacaaaacaacttcaagaaaactcctttggtatggatcagaacaagatgaattatctatctgatccaaatgcttaatgacattaagccacagtccactcactgccacaatagagatatacctgccaatgccactcaggtaatcccatcaaaagtggtaatgaggtctgcagcatgacttgttcttagtgatcccagcctgagaccttgagattgcagcattttattctacatatgcacaaaacatctgttgaaaaatcttctaaattgatgcaatacattcgtatcaagaatacctgtctgtaatctccataaaccctctcctttctgttttaaaaaatagtaacagcatttctccttacatgacaaagaaatgacttcaccatctacgaaatagtgaataggagctgtgtggaaggaaattagctctacttcttggtggagatgagaagggagtgttcctctgaaaatcaaggctcttgtcatgctaggagccaaagtcgttttttagagtgtggacagttgagaagataagacagggaccatccactcatgtttttcttattccataggcctctctcaattgggcaaagcactccagaccttttggaagagtgacaccaaaggcaagcacctgcttggcaggcccctcagcttctacgcaagtataagtgagtatataaaatgggggtacttgtgctgttgagtaccttatttccaaatgaggcctgccggtgtccctgtggctgtgagaaggcctctactggataggtggaagttgtgtgttctcatcttttctaaccctggattgacttgcccaaaaggaagccattattaacactataataaaaccatccttaatctgggactctcttcatgcagtggttcttaaccagtgataaacatgagagttacttttggagcttaaaaaaattaagatgctcaaggtctacccaaactgactgaatactccagaggtgaggcccagggatgtatacttttgagccagacctcagtttaccctgcagagctcataaggttgcataacaccctttgtcagccactctgataaaaagaaaaattggtgaggaataagttttagagaagaaggagcaaaggtgttcttggccagtgagagccaatgacagggaaatgcaaacaatgtatccacaagaaaggtaaattaccctatagagcattttaggataaatgaacatctcatgcctagggttgagagagggtacaaaaaaaaaaaaaaaaaagaccactctggatacacaacgcgataaatggaataaagagttttttccttgtaaattaaaaaaaatcctttgttactgaggtataatttaatctattttatgtatagttcaatgaggtgttatagataataaattttttttgtaaattattatattgtcatatactcatacattcatttttaaaagtcagaaatgtatataaccattaaacttataaatcattcagtcattcagagatatagatacacgagcatattttatatccaccacaataattattaccatctcaacaattccatcacccctcaaatttcaagcgtaggggtttttaaatgtcagaggagtctactcagtgggaggaaggttagggaaatatcttttggctttttgcttctgtcccttgggtttaaaggcagggatttggctttactctcattgatttggaacttgatatataggactgtaagaaaagaaatagactgtaacaagttctgtgctaagactgttgagtctcaccatggtgactctcttactgtttaggcaatgagggaggtggggcagaccataaggatagctggcctgggagaataacgctccaaggccatttctacaatgattccatatttcactgttaatcagagactgagcagctattatactttttaagatttcttgaatttgtgttgcttgctcagtgttttgtatttccttatttcttaaaatatattaatataaaaataattctttaatatttcttaaaacaaaaggacattaaggaatcaagtcttacttagtcttgctctagccagacttgggctaaggaaaccctaggaaagtcgtggctgctagaaagaacaggatgagacaaatgagagaccagttctctgtggtgctctgtatcagttaagctagatttgactgcaagtcatagcaaacccagtgaaatggcttaataacagtagcatttcttgttttcttaaaatctggaggtaggttctcggtgtaacaatgttgtcagagatgctggctctttttctccttccactctgcattcttcattgtgtggctctgacttcccagtcgttgcaagttgctgaccacagttctaagcttcacttcctcatagaacatatctcattcaaggaagaaggaagataaaggaccatctatatggctctttattttatcaaggtagaaaatcttttccagaagttgtttccagatcgacatctcatttgataggattaagtcaacgtgacttagtcatgtaagaatagaatgaacataatcttaaaccaattggattcatcaattggggaagggcatgttgacttctcagtgaaatcagggttctgtcagtaaggaagaagaagagatggcaattgcatggacaaacaacagtgttcaccatatacttctcttctccctttgacatcacttttaggattttatctactacatacctactgatgtctttcatatctatatacagttatttttctgagttccagataggttatcatctccccattgtacatctgcaattgagtgtccttctagtagctcaaattacatgcctaaaattttactcatcattcatcctggaatggagaagacctccatatttctaccaaaaatatggttaagacgctgccactcatccagtctccagtaccaagaaacagggtcatcttagactactccttacccaaatctaccacacctaattccaagatcccttgattttaaccttgattttccaactaaatatatcttgcatccatgctttgatctattagttgttcttttaaaattctcttttatatattttttaacatttttaaaaatttatcttttgagactgggtctcactctgttgcccaggttggggtgcaatggtgtgattatggctcactgcagcctccatctcccaggctcaagtgatcctcccacctcaagcctcccgagtagctgggactacaggtgtgtactaccatgtccagctcattttttaatttttcattttttttttgtagagatgagatctcactatgttgcctaggctggtcttgaactcctgacctcaagtgatcttcccaccttggcctcccaaagtgctgggattacaggtctgagccaccgtgcctggcctattagttgtttttaatgtagctctgtatgtgtgagtttgtataaagatgggaacacatgttttgtgtatgtgtaatgtgagctttaagtgaacccggaaatattatcattcttaatgccatttatgcatactggcagctaacaaagaggagaaaaaaatataaaatcttggtttgattttataaagtaacactaaatacaattatttatgtaaacatttaccatttgtccctaattaccatgcagtaaaataatgattaaggcaatgaataactatgtgtcagagaattttgttgcaagctttatttagttatgactgataacactctatcaatcactattgttgataataatgtaacattatggtctgatcacaatttttagaacctagaagaaacattgattacattccagaaaagaaagttttgataacagtggtctcatggttgtcaaagttgagttcatctaattttagcttgtaggacttgattgcaggtggaattgaatgaaacaagaatgcccaggtaagtttaatggcaaaagagtcaaagatcggaccaattactggctcaaggtaattaatgtacatttattatatgattacaggtctcccaagtactagaatgcagagtttcctggctatgggataagcacaacttggaccaaaatgccctgtattaatgaaatcaaacttacttatcccagaaaacactgtctgctattgtggaggatgcctggtcacactcagaggatgaaggggttcccataaatatagtatattataattatcttaaatatatttataaatacatatataaataataattaaaaaataacatttcgtgctttgccttcatcttgaggctcggcttcaagaagtattttaccaaaatgacctccctgattagcataaaaaactgttgcggcaggaaggcttaggtattattccctccattttgaaaatgataaaactgaggtcccagaaacttatgctatttgattaagagttcatcagcaacttaaaagtagaaggcaaacagttgaaatgaaatcatgaaatcctaggtctgtggcttcttgtttcaactgctattgtgcatatttcttagttttcttatgccttaatttgcccatctgtaatatgggtagagtctttttggtagccatagtcagtagctctggtcctcctaaaattgttatgaagaataataattaaaatgattggtactatgcaaaatatagggtgttctttaaataacaacattatatgttagtgttggttccactcttacaaagagtgtaaacattcatttagaattacaaggctcagtacatgctcagcaaatgactaacagtaaaggatttagcttcttcatgtacatggtacatatgaactgtcaacactgcacaagtgagacaagtgagactccagacctacgcctggttttccagtatctgaaagtcagtgatagagggtggcccccctgccaagcacacccagtagtcttgctttgtggcaataaacaagtttggatgggcaactgatgtgaaatagttcttagtgccgtgagtttcccagaagaagaggaggttggtctcactacctgtgatggttttgggtatctcaggcatctcctatgaagaaaagaagagaattctgttagagaacaagatgttagaaaaaggactgaagctcaatcccttagcatttggccttcatgagaaacagcactttaggactatggctgtaacatgatgctataggctcttcattcatttgttcattcagcaagcatttattacatgcctagtagatgtgtggcccagtctattaataagagttgatttccttagttgattggagagagatctaaattagttatgaagattgtcagtgacactagtatcttactgtatccaggcaggtaggagggaaacattgtttctgtcctgccttcaacataggcctaagacattttgcatcaaatctgagcactacagtgattctaagccccctaaacattttgatctccaagtgaacaaatcatacctttgggaaatcaatttagcatttagatgacatttatctcagtatttaagtcaacaattgaaggttaaacacacacacacgcatacacacacacacatacacacaaaattcctaagtatatcagtaaactctttcaatatactctttagaatgtacttttcttgtgagtatgagtagaatttacacaatacttttatggaaaaatagatttcaaattccaagttgagatgcttctttcctattcttttaaatctaaagcaagtaaatatacttttgaggcttccttggggctttccaatgtcagcaggatttatttcccaaacctattcctctcctactttttcccttctcactaaatgttgtttctcctcttccttctgttggttctatctccaaaatataacccaattctgtctgtttctttccacttcttttccttaccccacccccatgactgctgtgaaacctcctcattggactttctgcttctctattgccttccttctgatctgttttctattttaggaaatataagtgaggtcaggccattgcactgtgtgaaacccattaatgggttttcattgtacctcaaatgaaatccaaatgcaagctctgcaagcactagtctctgcatatttttcctccttctcaaaatgccccagttccaagaatgcttcttctgatccttggagctgtcctttaccatcttgaagttgtaggcctgggtgcattcagactcctctgaatgtcccaaaaacccacaaccacgacccgccccctcctctgaatgtcctacccaaaaacccacaaccacgacccgccccctcctctgaatgtcctacccaaaaacccacaaccacgacccgccccctcctctgaatgtcctacccaaaaacccacaaccacgacccgccccctcctctgaatgtcctacccaaaaacccacaaccacgacccgccccctcctctgaatgtcctacccaaaaacccacaaccacgacccgccccttcctctgaatgtcctacccaaaaacccacaaccacgacccgccccctcctctgaatgtcctacccaaaaacccacaaccatgacccgccccctcctgtcggcagctctcatctcacaaggggctttgtttttaccactttgtctaaatagcactctcccacttttctctatcttagcaccctattcatttttttttttttttgcagcatcttgctcttttgttggttgtttgggttgtctgttttccatatcctccagaagactaagttctatgagactagaggctttgatgcaccactgtccacactgctgttggcactatgcctgaaaaatacaaggctctcagtgaataatgcttgttgaatgagttcatgaatgaagctactggccctactctgtagacatcacttgatccaggtagaaaagcacaggcaggcacataaattctacttgggaatagaaggtcttggattatatacttacaaattgagtcacctacttatcagtggagaaaacatctaaggctgttgtgtgtgtgtgtgtttgagggggaaagtggtagtggagacaggactgggacgaaggataatgctgacatcaatgcagagagaggggaactggaagcagcaggccccattttgggacttggctcccagcttgttgctttgtgcccattggcaggtgattaatcctctctgatctcagttggcttatttgagtttcttggaggcaggccacattgtcctaatgtctagtattgtgtaggtcagataatagatgtcagtaaagatcaatggaataaatggatgctctgggatgggaggtgaataaggtcaggcagggaaaggaaaaagaaagaaggtaattttcctcttactctctgttatattttctcatagatcctgcctaggcacgcctctggaatcaatgggagtggggtgggcaggtgggggctgtggtaggaaggaaagaggacagtgtcaccttgttagaggtgtctgcctattgggcttatttacaaacatatgagatgtaaatgaaggtaagttggagacaaaggacaactgaccttcagcagcactggttggtcttcatcttgggcagtcacatacaattgagtttttgagattcttagaatcacggtaattttagcatcatcctttgatgacttataagcacccatgtcaaatttcactggtgaagagaagaaccaaaaagaaagtaaattcattgtatttgtataaaatcaagtgttgatgtagattgtgtgtgcatggtgtgtgtgtgtgtgtgtgtgtgtgtgtgtgtgtgtgtgtagttaggtccccacctatggtgtaaatacctggaagtcaggaatggaattctatacatctttgtgtccttcacaatgtcttccacactcactaggcaggtaaatacttggttaatgttcttagaattttctacgttgaatgaatccttcggggctgaataagtgttgaatctcttataatttcattagtgggataagaccctgtaatttgttagatcataagttcataatgacctaacatggaggggtttaggaagctgatacactcatatgttgctagtgatactgaaaagtagttcagtttttacttacagaataatgtttaataagagctgtcaaattatttgtgcccattgatctaggcattcctctttgggatgtgctcaaagaaattacaagataggagaaaaaacaataatatatacaaagatatttgcaatcaagctatttagagtaaacccaagggaccaacgtagcaacctgattgaattgtctagtgatattaaaaatggcaaatacatacacgatgtcaatattgggaaaattgcagaaataatattaagtagaaaaatagaacacaaaataatttgtaaatgtagagttgaaagcatgttagctgaagtgcatccaatcagaaaaagtcttgcttgtttattgcaaaattgcctctctggacctttgaaaatatgtatactgttgaaactaaaacatgtccgccatgaaaattggatgtgtgtgataaaagtttttggacactaaacttcatcctttaagccatatttgtagcttattggaggttttgcctcacaaatatgttatcagagataataaagatcttcctggtttggtgttacttgtgagtttgatcaacagactttttaaaggagagtgattgttcttcattggcttctgggtaaatctgagtaaatcatttaatatgtctgacagtttcctcagttttaaaattgagggtaagaatgtctgaaagaaccaaagaggtagtacatcagctagctttgtgcacaaccctttactctcaaagataggaaacttctctcttgtggaacttccagatttagttgaaccttctgccctggcttgggatttttatgggggtgctgtgcttcaagctattctggaagaattgtgcaacccagaactctgaagaggtatgttttttgcaagcagaaagattgaaataaataaataagtaaatgaaaggaggggaggatgacagaaatgtctggtgccattttaatgtacctgcttcatccagattatgtaatgcagcagccgtgaggtactgatcattggctcgaattatactttgattgagggcgtcattcaggatgaattcgtatttgatgatcctcataaagttgtatttcacattgctcaggaagctaaaaggtgctgacctaggcttgatgatttctaaaaccatgatcacaagtgcagattaatgtctatgtacaaacacagatgatatacacagtctagtacaaacagggaaaatagttctggaggggatattaggaatattccaatccagatgaggaagcaaagagaagtgaaatcacccagtcagcagaactggttttctaggattatccttgttgttgcttatgtgcttctttttaaacttcaattcctcaggcaatagtttcattgtttttagagactatttgtgcaactttttcatttttcattgtttgggtgtttctaactgacaaggaagactaccagtatttcccgtctatgttttcaaacgaatgcactctgagaaaaaaatgaatgcattaaaaataattatatatgtcacagagagtgcaaagtggcacatatcaatagcgtcacaaatcctcatggctctgggaaattctacttctaggaatatattctaaggaaataaagggtgagagaaatgaatatttatttatacagatgttcattgttgcattgcttataatggtgaaaaacgggcactctaaaatgtcctcaatacattgctaagtaagaaaagctggatataaagttgtaaatagtgtggtcttgatgttagacatatttgttcacatgtaggtatgtgtatagcaaagattttaaggaaacataccatagtgctggcagtagtaaactctcactgacgatatgagtgatttttattttcttatattttgttacattttaaaaccttctaggtgaacatgcgttattgcttaggtattatcttaaaaacaggaatattgggtttatagttcatgtggaggcttgtacagtaaagggatggaggagaaaccatgatttttttactcaggtagaactgaattagatttgaggctctcccacttacagatgtatgccattgggcagtttacctatctcaatgagcttagtttccttttatgtaaaatgagaaggtaggattcttgtgaggtttagacataatccagtcattaataaattagtattgctggtagtattcatataggtagtagtagtagtaataataataataataggccgggcgcggtggctcacgcctgtaatcccggcactttgggaggccaaggtgggtggatcacgaggagatggagaccacggtgaaactccgtctctactaaaaatacaaaaaattagccgggaacagtggcgggtgcctgtattcccagctactcgggaggctgaggcaggagaatggcatgaacccaggaggcagagcttgcagtgagccgagattgcgccactgcactccagcctgggtgacagagccagactccatctcaaaaaaataaaataaaataataataataatgatagtaatagctaacatttattgggtgcttactttgtaccagacattattctagtccagaagttaggggatgttgactcatttaatctttataacagtcaggagggcccagctagctcagtctgtaaagcctgagactcttaatctttacaacaatccaatgagtgggggattctgattatctccattttacagtagaggaaactgaatcacgaaaagattatgtaacatgaccaaggaggcatagttagtatgagaggaacatagctcgtaagtggtcttattactgctttctcctgaaaggctaaaagtcacacgacctttacaatatggctaagaaataatggctgtgagcaagtattctcgattcaggccactgctcatttctccctcctggagaaggataaaaattaattttcctctgtatagttaccagactaatgcttggttgtcttcttgttattctgactccacgtttaattttcccctaaattctactgtccctacttgcttaaaactgtaaaagaaagatattattgtgcttgaccccttaccttcctctgagtcattggcgatggcctccaggtcatcatcagtgatggattggcttaaactcaaccgtctcttcttcagaaccttcccgttggttgctactaccaccatgctctccttgaaggtaagcttggatgttttagaggtttcagagatactcagagacacagattgatccatgcagccttcatggagtgggccatagcttacatgatagaaggatttctgtgaggaaggaaaacagaagctgagaggctgttcatggtcagggaatgaaagttctttcagtaggtgctgtattcaacagaggtagtgaggaggatctccattctggtcttaggtaactggtgtttcattaggcttccctccctctctcccttttgtctcaccttccttcctccttccaggataaaaagatgatttttttaggaagactttttcatttatttgcatgctcaaaaatgagatgttgtaactaaataggttaacaatgattgtagtgagtggtagctttccaattagttccctctcaggaggttaaaaatctgcttaacaatgctcaaaatattttagaaatactcctttggggacagcttttaaagccagtactgaagacatactaggcagtacttatagtgtctatttgtggtctccaaacacaataacacagattgatgagtggctgtagacttctcactttcaactggcttgcttcctctctctcagcttcatgtttggagactttctctaacctctgatgctggtgtcagagaagacaaccacaacacatcacattaggagacagacacctggtgaagcggcctgcggggcctttctcaggatggcataactaacatcctgatgaagcctgccccaggagactccagttctcagggatttgggatagttctgctctgttctgggagaagccaatgcacatcaactattagtttagagaggcagctggtctcacttataatgaaagacaggtctctggacctctagtgagggtaaaacaaaagtatttaagattcaagtcattgctgttctctttggatgaagaaaccactgtgtaagaatagcagtcccatgagaattacagtcatttgcttacctgattcagagacagatgatcaatggaggaactgtcttcttcattttcactgtcaaaataagatgatgagaatgtaattgttgttatttcagtgtggtctctggccaatgtactttaatgaccatgatagttgtggggtacacacctacacatggcccttactggcatgctttgaactttaaggacttctacacatacacataggtagagtaattcatatcttactaatctggaattagtagtcatcaagacaggctttgagctttacctgtgctttatctgtaaaaattggacttggctaacaaattgaagagctttaattgaagttcagggaagaatgttaagctcctttagagaaaagaaaggttttgaagcacttcctttttattttaaccaaatagattatatgttagcacattactttcatgtattcactaaaacagatttcataatttatacttagtaaaatatccaggcaaaattttgacagcctagtttgtgttagtatttactacagataatggaaacatcatgttagtttaatatgttccgtaattttatctttgtgttcatttacctttcttctacatctgagtgagatttgcctgcatatgtgagttcacatgcccagcttgctgtggagccatttcctgttcctgaatgagatcaagttttcctgagaatggaccagtaaaacccattcttatatcagggcatgtgatctcaacagaggctgtgtctaagttgatgctgatattcatgtagggctcagcagacctcaaaaataatttttctaaaatggcggtctccctgccaatgtaatctcagtttaacatgctgaatgcttagtttttctgggtcttctctgaacctgctctgacttcaggactagtacacatctctacaacctctgccggcctgcccccatgctggccactgttatgcctagctggattctggtgagccttgaaaccctcattaaatcacaagagataaatcttattccttacctgtaacagttcttcaggtcttcaaacatgtctggaactttggccatcttgacttctgcaacagagaacaccagccaccatcagctcagccagcctctaatccagatatctgtgaggggagcccctcctctttgtgcttcctgaaaactttgttgaatgacttagtccacattcagcattttctccatcttctagctcctttgaattagtttgctatgtacctgtctcctttattagatcgtaaacttcttttagaatgttttatttatgttggtattccttatgtgcccaacctaatgtattgccagaacaggcattcaatcaatgaaagtttgaagaggttacaaaaacaccacaagaataaggtatttgccttacacagaggtaagagagagacagagttggaaattttcaattttctcctaataattttggatagtagagattccctcccatgagaagcctcagttgtattcacccatgccctcataggaaactagttctgccgtccctcagtaaaacgaatcagtccttatcagcaaaatgagagaatcattttctgaaatctgactgtaattctaggtcacataccaaaccagggagggacaagaaaagaaaggagaggctgtagctttagagaaggcaatgtgagagaaaacagccaaagagaaaaacaacaacagaaaatactttaatagccagagatgtgaggacaatacctttgctgactcaaacgccaatgaaatgactccctctctggctggcagcttaagcctgagtcagtcttcttcgccttttgtaattgtcttaagtaggcgtggctacgtggctacaagtgcgtcgtcaaaacggggaatttacagggaagaattcagttttgtatttttctatgttcattcaactcgatactggctaaaatagtgaaagatggcatagctgatattattgttgtttgcagatattccagaagttattgatttggttcatttattcacccctttgctttataagatgacaaacatgtagtcttagaaaaagggaagcgcgggaaacttatcaagtttctaggaggaagggagaaatcgtgaaatccgaagtcaaggggctagatttggagaggaatttattaataataatagttctaatagtagctgtagttgtgttctggctgaatttgttgattgtgctccagggtgaattggcagaatacttggcagctcctggcaacttttgagggaaaatgagccatcttttctgaagagggaagtttgcttgattaaggcataaatcacctcagagtttggggtgacaagctcctggttagggcagggtagagaagagaacagtggtatttgagcacaaagaagtcttgatcctcttactcttctgaatattgtcaacacatttcctatagaggggatggagcttcaggagagaactctccaccctggccctgttacagtaaagtagccctctaccaaggaccagagagaagcctggtcttctgtaggatatgcccaaggtgtgtcttctgtagaagaaggtgtgtgcaagccccgggaggtatgcgtaaggcctcagccagaagccagtggctaagtttgggaatggagattgggagaaaggaaggcatggatttttacatatgagccttcaatggtgttgcctggttactattattaaagaatttctcagcttttataattcctgtggccagcctagttcaggtggtagaacaccagactcttagcaaatgaatgttttgggttcccagttggagtttaagccatgtatattttaaatagaggaaatgaactaggtgtgatggcatgcccctgtagtcccagctattcaggaggctgaggcaggacaatcacttgaggcccagagttttagtccagtgtgggcaacatagtgaagcccccatctctaaaaaataataaacgcaaaaaagcatggatctgggaggaaagcagcttgtgtgagttggataaagtattccctctgttcctgtttaattgtaaataatggggttggttaggtgtcataaggtctattgcaggtgcaaaatctcttattctgatttaatgccagtctaattctcctggtcatagacctggtgctataatagttataacaggagccacagaaataaccacacttggatgtaagcaatgtaagtgtagcaccagactagggtagaagcttgggtgtctaaggatgaatcctgaagcaacagtgatgccagccaactggctacatttctgcttaccttggttcctctttaggcaacacagaaatgttaatcctgattaaccctctcctcctgagaatcttgtgagggctattgctaaggaacaattgcaaagcacattgtgaatgtgagctgctatggagatgcaactaaacaaaaataatgacaatgctaatgatggcttcagtcactcaagaacctgtatagtcatcattataatgcctcagttcaccaaagaaaatatagttcttatgaaaatactggcttgaaagcttcaacagggataacattttcaggtgaaggccaccattgaaagcctgaagatatttagcttctgggagcaatgcataccatctctttggtaatccaggcaaaaaaaccctggttccaccaacataggcaatacctatcctggtcccatcctcactcctctgttgtaaataattccccaaaggtggttgttgaatttttcaaagagaacttggttgagaaacagctaacttgggttagaatatcacccaaccttttccttcacatgatcttcttgtaaattgatttttaaaggaaaactagggtgggtgaggttcagagagaggtgggtccttgcattgttttggggagcccgcttttctgggactgtgaacaacagtcacctcttctagggaagggacagtggaacgtactgggcagggctctactgggtagatagtggaacatactgggcaggcctgtggtgtgtgcgttgggagccatcctgtgacagggactttgggtggcttcaggcacccacctctcgactctgaggaggcctcaggaaacccttaatgagtcactgtcatctaaatcatttaggaaaaaaaaattattgtgcacttatcctatgccatgggttttgctaggaatcagcagtttttccccatgatccacaaaatcagatatgcaaggtgagatgatctatgttggtgggtgactggatatgttttataagattggagcttgtgggtccaaagaatcactgtgatgcgtttcatgtgacaattgttttatagtttacctgcactatctcactgcctcctcactgcacctacaagaattagctgatactatcctctttcacagctgaggacccttgaagaggttaagtgaccaacccaagatcacaagactgatgaaaccagtgcttgaactcaagcttctgattccgagtccaatcttctctttccactgcataaagatactcgagtctcttatcaccaccaacaccaagtgatggcttataaagatcatccttagggtctttccccctcaaacgtgctatcattcagtaactctaggatccttgttaaaaaaaaaaaaaaaacgggggttgcggagaagggattgaaatatctcctctccctgtcttcacctcctctgatgaaatctgattttattctgtgatatgtaagacctgaatgaaggtgactgaagtaattgggtacatggttagtggtggaatccggatgtgaacctgagtcatggtcttgccattgttccttgaagacaggaaatatttgtaaatatatttggaagcaactttaaaattgttgcatgtggttgggtctaacagaatcacttgaatgaagagaaaaacataactttttcctgtgaattttcagggaaatgcaattatttcctttcacttggtataaaagctcttcagaggaataaagcatgcatgagccaacacatgcagagacaattgagcctttagtcgcaactcatgctctagttataatgtgtttttaaattccatgatagctacagagaaggaggaaaggacttaacataacagcctaccatgttcaagggattataatacattatctcatttaatcctctcatgaaacctgtgaggtagatgttcttatcacatcttacagaagaggaagtcatggtctagagaaattaagcaatctgcccaagattgcaaggttaccaagtttcctaaatgggatccagacaccagggcatacacttcttcaaccatgaggatgtctcttttgcttaatgtagctgcttcctttcctgtgttcttttaaattaagttttaattattctgctttatcttagtttattgaaggttccagaatatgttagagaaggatgcatgtcggagaccatctagtttaaactcttacttttataaaagaggaaacagggtacaggggaagtatggcccgaggtcacatggagaattcatatgagagtgtgaggtaaaattaaaactcaatttcttgagttctagttcaaagtatcctactacttagtgaccctggtgccttagtgaagagagaaagaaaagaagaaataatctctaatggcttctcacccataagtaaaaaaggagtggctgggtgccgtggctcatgcctgtaatcacagcactttgggaggctgaggtgggtggatcgcctgaggtcaggagatcgagaccagcctggccaacatgatgaaaccccgtctttacaaaaaatacaaaaaattagctgggcgtggtgacaggcatctgtaatcccagctactcgggaggctgaagcaggagaatcacttgaacccaggaggtggaggttgcagtgagccgagatcatgccattgcactccagcctgggcaagagtgagtctccatctcaaaaaaaaaaaaagttacaaagaatgaaaccccgttaagtaagtaaaatcagctatgattcctgctatcctgaaagctgacagtgaagaccttcatcaacacttttctaaatgagtagataattacaaactgagataagcacggtaagggcgtgtgacataagcacatgtcttagactgggagtggacagttcagtggagagcaaagagggaaaattccaggctgagataagtccctgggggtcaaaaagggtggaagtaggtaattgggagtctggagctcagagagaggagggggaaggagtgaggggtataggagtggagagtgagttggtgagatgaggatgaggaggaaaataagagccaggtagtcatggccttatgtaggctccataaagtctttactcaaagtttaatgggaagccattaagagtggtatatattggtgacacaatcagctttgagcttttaaaggatcacctttgtgtttgtaaacaatttctagattttaaagcagtagacaaaggacagagattatataaagaaatgagaaagcttccacaaagtgtacatggaaaccagtctttctgccttaactcaaactgtgtgatgaaggcagcaagtgcttgggagcccagagagtcaagggatggccatggcttggaggatatggagcaattcaagtgggctaaaatctgaagtccatagcaggaagggacagcttcacgttcagtcagcaaatttctatttagctacaattacctcttcaccttagctcatctgttctctgatggatgtgctttttttttttgtttctaaattcccttttccttttctctggagatgggtgattgatgtagtctgggtatttgttccctccaaatctcatgttgaaatgtaatccccagtgttggaggtagggcctggtgggaggtgtttggatcatgggggcagatccctcatgaatagcttggtactgtcctctcaatagtgaatgagttctcctgagatatggttgtttaaaagtgtgtggcactcccccattgctctcttgttactgctttcgacatgtgacatccctgctccccttcgctctctgccatgattgaaagtttcctaaggcttcgccaaaagctgagcagatgtgggtgccatgcttgtacagcctgcagaactgtgagccaaaataaacttcatttccatataaattacccagcctcagatatttctttatagcaacataagagtggcttaatacaggctgggcatggtggctcacgcctgtaatcccagcactgtgggaggctgaggggggtggaacatgaggtcaggagattgagaccaccggctaacacggtgaaactccatctctactaaaaatacaaaaaattagtcgggcgtggtggtgggcgcctgtagtcccagctactctggaggctgaggcaggagaatggcatgaacccgggaagcggagcttgcagtgagccgagattgcaccactgcactccagcctgggcgacagagtgagactccgtctcaaaaaaaagaaaaaaagaaaaaaaaaagaatggcttaatacagaaaactggtactgaagaatggggcatatagctataaagatatctaaaaatgtggagtcaactttggaactgggtaatgggcaaagattggaagaatttaaagggctcagaagaaaacaagaagatgagggaaagtttggaacttcttagagactggctaaatggttgtgaccaaaatgctgatagtgatacggacaatgaagtccagggtgacaaagtctcagatggaaatggggaatttgttgggaactgggcaaaggtcacccttgctatgactcagcaaagaaattgggtgcattgtgttcatgtcctggggatctgtggaagtttgaatgtaagagtgatgacttacggtagggtatctagtggaagaaacctctaagcaacaaagtgtgttgcttagaaatttctttctttcttttttttttttttttgagctggagttttgctgtgtcgcccaggctggagcgcagtggcgcaatcttggctcacttcaagctctgtctcctgggttcatgccattctcctgcctcagcctcccaagtagctgggactacaggcgcctgccatcatacctggctaattttttagtattttagtagagacgaggtttcaccatgttagccaagatggtctcaatcttctgacctcgtgatccacccgccttggcctcccaaaatgctggggttacaagcatgagccactccgcctggcctgcttagaaatttctaagccaggatatggcctgtctgcttctaacagcctgtgctcaggggtaaagaaatgacttaaagttggaacctatgtttaaaatggaagtagagtctaaaaatttggaaaatttgcagcctggccttgtggcagagaaagaatccaagtaggctgcagagcaatcattgctagagagattagcatgactaaaagggagccaagtgctaatattcaagacaatgttaaaaaggccttgagggcatttcagagatctatgaagcagcccctcccatcacaggtgcagaggtttggtgcactaggcccagaggttttatgggtcaggccagggccacactgctatgcacagctttgggacactgctgcccgcatccaggccactctgctctggctccagccttggctcaaacgggccaagatagagcttggaccactgctcccgagggcacaagccataagccttggtggtttccatgtggtgttaagcctgcaggtgcccagaatgcaagattgagggagcttgggcacttccacctagatttcagaggatgtgtcagaaaccctaggttcccaggcagaagcatgatacaggggcagagcccttgcagagaacctctactagggcaatgccaaaggaaaatgtggggttggagtcctcacacacggtccccactggggcactacctggtgatactgtgggaatggggctgctgccctccagaccccagaatggtagatgcactggcagctggcaccctgagcctggaaaagctgcaggcactcaactccaacccatgagatcagccacatgggctactcccagggaagcccacagaggcagggctgtctaaggccttgggagcctaccccttgaaccagcttgcaggacatggaatcaaagattatgttgcagctttaaggcttaatgttttccctgtcaatttcaggcttgtgtgggacctgttgctttttttttttttttttttttttttggtcacaggtgtttgaaccagaacaattccatcttgaataggggctgggtaaaataaggctgagacctactgagctgcattcctaggaggttaggaattctaagtcacaggaggagataggaggtcggcacaagatacaggtagcgaagacctcgctgataaaataagttgcagtaaagaagccagccaaaactcacaaagccaaaatggtgatatggtttggctctatgtccccacccaaatctcatctcaaattataattcccataatccccacatgttgaggggaggacctggttggaggtgattggattatggaggcaatttcccccatgctgttctggtgatactgagtgagttctcataagatctaatggttttataagtgtttggaagttcctcctacacacatgctcacactctctcctgcagctttatgaagaaggtacttgctttcctttctgccatgattgtaagtttcctgaggcttcccagctatgcagaactgtgagtcaattaaacccgttttctttatacattaccagtcttgggcagttctttacagcagtgtgagaactgctggcgatgagagtgacctctggttgtcctcactgctcattatatgctaattataatgtattagcatgccaaaagacactcccaccatgaccccaacagtcatgcctgtgccggtctcagcaccatgacagtttacagatggcatagcaacgtctaaaaggtaccccatatggactaacaaggggaggaaccctcagctctgggaagtgcctacctcgttcccagaaagcttgtgaataatccactgcttgtttaacatataattaagaaataactattaagcatccttagttcagcagcccaagctgctatactgcctatggagtagccattctttattccgttactttcttaataaaattgcttttactttactgtatgtactcgcctggaattctttcttgtacgaggtccagagccctctcttgggtctggatcgggacccctttctggtaacattttgaccaatttctcccttctggaatgggaatgtttacacaatgactgtatcacttttgaatcttggaagtaaataatttgtttttgactttacagcctcataggtggaaggaacttgacttgaatttcagatgagactttggactttgggacttttgggttggggctggaatgagttaaaagttggggggattattgggaaggcacgattttattttgcaatatgagaagcacatgagatttgggggaccaagggtggaataatatggtttggatgtttgccccctccaaatctcacattgaaatgtaatccccagtgttgaagtgaggcctgctggaaaatgtttggatcacggggacagatccctcatgaatagctcggtgctgtcctctcaatagggactgagttctcacaagacctggttgtttagaagtgtgtggtacctcctccctcactgtcttgctcctgctcttaccatgtgacatgcctggccctctttgccttctgccatgattggaaacttcctgaggccctcaccagacacagatggtcgtgtcatactttttgtatagcctgcaaaaccataagccaaaataaacttcttctccttgtaaattactcagccttaggtatttctttatggcaacacaagtatggcctaatacagtgatgaacaggactgcttcctctttttcttcttttttggagaactgtccttctttccctcttcatggatgccctttaaaaatcagagttcctcagagagcttccggtgtggcagtcatgtctgtgcccgtctctcacttttcttactaattctggttatctcatcaaaagtgcatttttaagaaattccctttccttttgagtcattttctttagtggagtcaaggttatctctggtctgagcttgtttttcaacttccaggaatagcttgtattacttttttcagattctaaaacatgttcattaaattttgctgaggaaatataaaaatataaagaagaaaagaaaatccgcaatttaataactagagataatcattgttatgactccattgtcttttctttcagtctttctttttttcaaggcatatatagatttgtttttagacaattaggacactaaaaactttttttgatatttggtttcctgaaatctagagagcatacatgtggtaggcagtgctcaccaaatacctgctcatttgagagattactcgattaatgtctgtcttaatttcctggtctcccttgcagtttagactggggacatgtgtttttttctggccagagaactgtgagaggaagtgatagatgaggtgttgcgtgtcttggctgatgcaatcaagggccagtgtatgcctgtgtcacataaacttgccctgatgcagcaactttggaagtcacgtgttctagagaatgtgctacaaatgaattaggtgtggttgcaaatgcatgagaatagaacgacctgtattagatgtattaagtcactgagatttcggaatttatttgttactgtagtataacctttatctcaaattcctctttcacaaatcattttcttcttggacagaaatatgcctagattagcattcctctgtcatattctctaccttctgggagatgaactttccaataagacaaacccagaaactaatcagatgctttcatgttggccaaatttggattccagattaaatataaattagctgtgaaaataaaatggccaataataaagttggtactgttaatatcccagatacaaatcatgtaataaatatattactaatctaacatttatatggtgctttacagtttttcaaagcatttttcataaacataaatataagcattcaacctgatacaaggctttttatccattgcaaatagtcaacagtgaagtcctgtgccagtgcacagttctctccttcctccttttggtgtgaactcctggctgcaggggaggaagggaccctggttagggcaattgtggcctcagactgggagtggcaggtgtggcatacaatgtggctggagacgcaagagacttggatcctcatcctggctctgatcctaatgagctacgtgacctccggcaattcccacatgtctctgggctttccttatctatgaaaggaggagattggactggctaactactggggttcttccagccctgttcattcagtatttcatgactaccctgaacatgaccatgttttgcttcatggcacctctatgctcttgatagattgtgtttggttgctcaggacccatgctagacacattctcctcaatagatctttgtctcatgcacagttgagttacatatacatacatgctacgctctttctgctttacttcgatggcaaatttaacttaccaccctgagtataaatataaattttttctagtatagaaatatgtaacagttgctgataaattagaaggaaatggccatttagccatgtgtgttaagtgattatgacttagctttattttctagaaagcttgacatacctgaaggaccactggggcctttgatgatcttcaagaaaaggacgcttaggtttttgagtttgaaagtctggacaagtactagagcattttgttaagaaaatgcacatcttaaaaaaatatgattatcgttttccctttctgtactcttccctccatggggtctttgtgctgcccctaataggccattctatcccatgcaaagttgctcaaagttactgtggctccccaagagagaacgagcaggatgagagagtctgagcctggactcaggaggaagacccagggcctgggaggagcaggtattcctgtagagcacagttccatgcaaacctgcctgaagccagcttggtaacctgttttacaactctgtcatgcatgaggcactgtgttagaagccctggggaatgaggtggcaaagaacaccacttgcccttaacaagcttttaacttgtgaggaaggcaggtggagatgactgtgatgccagcagaatagagaagtgttataacagaaaggaaacagagggatggggagggagcaagtgaggctaacagagtgaacacagggacggtttctcagacattgctatgtgttagcttgaagagttagatttgcatagtggagggagaatggacattccaggctgaggaaataggatgaggaaaagcataagacatacatttcatgtttgtttctcctacttaactttttagagcttccattgcctcatctgcaaaactgggatagtaattcttgttttttgttttttttttggttttttttttgtttttttttttttgagacggagtctccctgtcacccaggctggagtgcagtggcacgatctctgctcactgcaacctctacctcccaggttcaaatgattctcctgcctcagcctcccaagtagctgggattacaggtgtgcaccaccatgcccagctaattttgtatttttagtagagatggggtttcaccatgttgatcaggttggtcttgaactcctgacttcaggtgatccacccaccttggcctcccaaagtgctgggattacaggcgtgggccactgtgcctggccctgggatagtaattcttacttcacagagttttggaaggatgagattgtgtttgtgagactgtttggtttagtgtcagtttccttttccttctctccaaatgtccagccttccccaatctctacacctttgctcaatctattcttcctttcagatttagtctctctctcccacccatggaatttagacctttcttggccctactagtccaggtccttccttgacttaggatggaaagcatagatttacttcagggaatgtcaaatgtggctggccaaaaatagagttaaagcccaataaatttggagtagaatgcaagcttgttaatagtaggtataaaaggctggaataattattgagggttatcagttctttcattaattcattcactgactccttcattcataaaagatggggatctttgattcaggaacatgcttagagctaaggactgtgtgggaaataagaaaagcgtggttcctaaccccatggtgcatccctactagcagagaaaccataaattacacgtataatcatggttgggtggcacatcagtctgtttgtgctcctataacaaaataccatagactcggtggcttatgaaaaatagaaatttatttctcacagttctggaggctgggaagttcaagtgccagcatattgggtacctggcaagggtctgctttttggatcatagaccatactttcttgttgcatccttacacggtggaggggacaagggagccctcaggggtctcttttataaggctactaatcccattcatgagggctctgcctcccaaagagccttcctccaaatattatcacatttggggctaggttttaacatatgaattttggaggaagacaaacattcagtctacagcaggtggtcattaagaaaggagtaatacagagtgctatgaagatatatactggggagaccctgattagtttaaaaagtcagagagagtccctgagaaagcaacatcatgagtaggaagggtagggattaatcagatgaaggtgcaggtagagatagggagagggattcatgtctcaggcaatgggaacagcacttgcagaggccccaacactagaaggactatggtgtgttagagaacctaaaggagggctagggaggcagaagcccagagagcgaggggcaaggggcatgagatgaggctgaagagatgggcagggccaggccatgggcaacctgtgaacatgtcaagggcagtggtttatcctgaaggcagttttgaggtgtttcaagcaggagagcaagcacatcagatttgtattttaaaacaatctatatacatccaaaggagggggcaaatgtgggagaaggtgaatgcagtcatccaggtgagagccgcggggatgtgcttgagagatgtatcttctggagggagcagccaggacacggtgttctgaggggaaaatgctttgaagtatgatgggcctgtgaggcaacaccggcaggagtcgcctacatgaagttagagctcagaagaggcagatgggctggagctagagatgcggctcctctgcagtgcgagccgtgagagtgggtggggtggccagggagggtgtgcagagcgggaaggtacgcccagcagctgaccgaccagtgttcacccaggatggggcagatgagggccccgggaagcagaagccggaagatgggagggaatgtggagagtgtgatgtcctggagacaagggagccgacagctgtggttcatccacgtagagataaaatcggtgtggtacacacctccctgtgaagccaaaatcatcaccggctcctcattgctgctggtgttcctcattgctctttccagcaacctctggcctgatttcagtgccttctcttcagtcattcagtgccatattctgcccccagctctttctcaacttagaggaaaatagtctgataaagtctttgatgaaaaattcctagaacctaatgtggtacaacttacaggcacttatgtctttcaaaagatgagtttggaaaaagtaaggccttaccttgggcctgggacctttgccaaagtgagggctattgacccactgaaaaaagtaaatgcatgggcattaggtacaatgtaatttaaaattttgaaaattaagattaggcattgtaatattttattccattagccagatgtggtgatgcacacccgtagtcatagctacttaggaggctgaggcaggaggatggcttgagcctaggaattcgaggttacagtgagatatgactgcaccattgcattctggcctgggcaacagagtgagacccagtctcaaataaataaataaataaataaataaaattctttattccatacttgaaagcaatgttaaaaaaatccataaatccagttcatactaaaagtagaagagagcaataaaagaatacataaatgacagacggagagtctgtcagagtaaggagaaaagattagagaggtaggtggcataggggcaaattgtgctgggccttctacgtttaatatctagactttcattaatgagcaatgaggaaccactagagtgttttcagcagagtagtgaggggatgcagaagattctgacagtgatgaacacaacagattaccacatgaagtgagtgaaggctgggagatcagtctgctgctccaagcgcacaaaaggagagcctgggccaggggaagcggtgatgggcccaccaaactgatgggagggagggtgggagaatggatctggggagggaggggcatctgggtatgcaggagagcagaagggggactctagggtaatatcaagatcttgactctggaccacagaaatagagaagtctggaggaggaaatggtttggggtggaaaatgatgctttgggctttagacaatctgagtcaccatatggggcaggtttaacagataagtatttcccagatttccccataagtgagttctgctttgtctgtggaccctgggaatttctatagacctgagccagggcgatgtcagagtttggaaagaaggagttcttagaaatagatagaaagtgtggaagtgacacatttaccacctcctgggtttgaggaaggaaactgggccttcagactcttggtctcagatttccttgaatgtagcctgaataaggcagtgggttgtatttcaaagccaaacttgcagtatttaaaaccagagggggaaagcgtgggttaataagtgctattttggaaccaacaaagcatctgaaaaattaaaaaataaaaaggcagctgggcgcagtggctcacacgtgtaatcccagtgctttgggaggctggggcgacaggatcacttgagcccaggagtttgagacaacattgcaagactgggcaacaagcaagactctgtctctacaaaaaataaaaaaaattagttgggcatggtggtacatgcctgtggtcccagctactcctaagttgacgagggagaattgcttgaggccaggagttcaaggctgcagtgagctatgatcacaccactgcactctagcctgggtgacagagcaagaccctgtctctaaaataataatcgtaatacattttttttaaagtaaaacaaaaaaaggtcacactttctcataccaaaataaattccaaataaattaaaggcttaaacatgagaaagttaaaccataaaattactagaagaaaataaaagcaaatatttagataatcctggggataaatttctttggaatgaatttccttaagatgaatctctaaaagtgaaattcagggttcaaaggtcttttctttgtccttttcttttccctttccctctccctttttctttctttctctttctttctttctttctttctttctttctttctttttctttcttccttccttccttccttccttccttccttccttccttccttcctttcctgcttgcttgcttgctttctttccttccttccttctttctctccctttctttctctttctttctttctttctttctttctttctttctttctttcttctttctttcttctctttccttccttccatctttctttctttctttctttcttttctttctctctttctctctctctctctttctttttttttctggtgagacagggtctcattctgtcacccagactggagaacagtcgcatgaacatggctcacagcagccttgacctccgaggctcaagcgatcttcctgcctcagtctctcaagtagttgggaccacaggcacatgccaccatgcccagctaacttttcttatttttcatagagacgaggtcttactgtgttaccccaggctggtctcaaacttttgggctcaagcaatcctcccaccttggccttccaaagtgttggcattacaggtgtgagccactgcactcaggccaaagttctcttcagttgtaaggtttttggtactctattgccaaattgtcctccaaaaaggttatgtctttttaccctcctgccaacattatataaaagtgtccacttttgtagacttttaccaatgctgactacttttggtttcaaaaaagctttcagtaattttctattaattacttttacccttttttattgagggtgttcaactttttattgttagcatattctctctgggctccattggacgccttggcagctttttggtagtaggtgcctttagaaaagtccttctcgtctggccctttctaagcaaatctagtgaacagaattggctctatgctcagcattgcttaatacggttgatccagggcctaggactcattccttcattaccatccacttgcattgtcttaaagcaaggctctattaatttaatttggcatttcctgtcccagctctttagtttcattaaacaaaggctttagaaaactcccagtagatgcctatgttgcttccttttaaaaaattttggagctgtttccctagcctaaccttttcttcagggcaggagttaagtcccttctactgcattcctgtgaagatggtgattcaagaggcagggcacctgttgctttgtgaaacagtccactctgcagctgggcagctctgttactagaatgttctcccttctggggagccaatattttgatgtcctctgtgagtctcatctgcttatcccatctgtttatgtccttgaagatgcacaggtctgacaccacgaggtagcccttagaaatttgatggcatttctgatgtgtccccaactcttctccaaccactcctcccagagcttgtttcttaagccccttgtggagctgattgctttcctcaaggcagctcagtttttcccagtttgctcctggtggtcctgaaatatgattgactcctgaatactccaggtgtgaaggagagtgggggtggcctttctacttgtcatggcctgggttttaagttgctgtccagtggagcagaggtgactttcccagtgaactacattttttcccctctaaatccttagcaattttgtctccagaggcaagacctggccaaaccatttgtgttgaggattgaatcaagaatgattgaggagatgacagtagtcccccctcatctgaggagggcatgttccaagcccctcagtgaatgcctgaaactgtggatagtacccaactctatatgtctatgattttcctataaattaatacatgcctgtgacaatgtttaatttataaattaggcaaagaggccaggcgcagtggctcaagcctgtaatcccagcactttaggaggctgaggcctcacctgaggtcaggagttcgagaccagcctgaccaacatggagaaaccccgcctctactaaaaatacaaaattagctgggcatggtggcaggcgcctgtaatcccagctactcgggaggctgaggcaggagaatcacttgaacccgggaggcgggatttgcggtgagctgagatcgtctcattgcactacagcctgggcaacaagagtgaaactccgactcaaaaaaaaaaaaaaattaggcaaagaaagaaattaacaacaataagtaatgaaatagaacaattctaacaatatactataataaaagttgtatgaatgtggtctctttctcaaaattaccttttttttttgagacagggtctcactttattgcccaggctggagtgcagtggcacgatcacagcttactgctgcctcgacctcctgggaccaagtgatcctcccactttagcctcctgagtagctgggaccacaggcatgcaccactgtatctggataattttgtttatttttttttgcagagagaggaggtctcactatgtttcccaggctggttttgaatgcctgggcccaagggatcctcctgccttggcctcccaaagtattgggattacaagcgtgagccaccatgcctgccccaaaattatcttattgttctatacccactcttcttcttgtgatgatgtgaggtgatccattgcctccttgatgagatgaagtgaggtgactgatgtgggcatagtgatgcagtgtttaggctgatattggcctgatgatatgtcagaaggagggtcatctgcttcggtgatcctggatcatagagtcatgatgatgtcaatggttggatgtcaggagcagacgatgtcaatgactaacgataagctggacaggtgggatggtggcacaagattttatcacgctactcagaatggagcacaatttaaaacttctgaattgtttatttttggaatttttcattaatatttttggattgcagttgactgtgggtaactgaaactgtggaatgtgagactgtggaaaagtgagggagtactgtattatggaactgtaactctattcggtaggggaacagaattccacatttgtggggcccatggtctctgcatctgtagcggatccagttgtttcatttctcgttgtagcaagaacttggctttggaatcagacagattgatgttttctatcattctaaatgggtgcagctacactttcctcaggaggtagttctgaaaatttaacaaaatgtgaatttcttggtaaaaaaaaaaaacctcaaaaatattcagtttcctttcctttgtgtctgatgtactccatcaaatacttggaaatatgtttctctcatagaaatgtcattgatctttgtaattctgattatccacaaaccttggggattagctgtttcaatgttcctattttacagataagaaaatggagcctgtggtaagttaagtgagttactcatggctacttaactaatattttactaggtgataggccagagctagagcccaggtcaccttcttatcaatgctctgccttgtctctgtgccttcctgtctgtctgtatgtgtatgtgcctgttgacagtaaggcatagtttaacccagtagaactaccggtttgtaatgaattccacttgtaaatgactgaccattcaaggaacaagtgttttttctatgcttgacacctgttttggatgccaaaaaggatacaaatgtaacttcagacactctgggcctcattttgcactcattagcatgtccaaaattaaaaagactgaccacaccaaatattggtgaggatgtggaagaacgggaactttcatacactgctggtggggatgtaaaatggtacaatccctttggtaacagtttgacggtttcttaaaaagttagacatatatatttaccatatgactcagcccttccacttctaggtctttacccaagagaaatgaaatgctgtgcttttacaaatgtctatacaggaatgtacatagcaaccttatttgtcattgcaaaaaacagagacaattcaacgttgtcaagagtgaatggatgagcaagctgtggtctgtctatgcaatggtatcctactcagcaagacaaagagatgggctaaggatacgcacagccataagcatgaatcttgacataattgggctgaaagaagccatacatgaaggagtatatactctgtcattttatttatgtaaaattctagaaaatgtaaatgagcctatggagacagaatgcatcagtagttgtctgatgttagggggcagggagttgggagagaggggttaccaaggggcgtgaggaaattgggagtgatggatatgttcattattttgactgtagtgatagtttcactggtgtgtacatttgtcaaaattatcaaattgcatactttacatttgtgtagttttttcaatgttagccgtacctcaataaagctgttaaaagactatactggctgggtgcaatgtctcatgcctgtaattccaaaactttgggagctgaggccagaggatcacttgagcccaggagttcgagactagcctgggcaaaacagagggcccagtttttaccgaaaaaaaaaaaaaaaaaaaaaaaaaaaaaaaaaagccaggcctggtagcatgcaactgtgtcccagccacttgagaggctgaggcaggagggtcacttgagcctgggaggtgaagactgtactgaaccatgatcacaccagtgcactctaggctgggcgacagagtgagaccctgtctttaaaaaaaaaataagagagactctctggacctcatggttgtgcggatgtaaaggaattgtagtaacagtaattccaatttccctagttcctgttctcttctgaccaagaacttggagctgccagctagtctcagcctggtgtatctcggagtcctcagaggccatcttacatgaaaatcggtcttgcagctacagtcccccaggcactgttcctgttattgctgagagctcattgcctgtgaagcttcatgatggcccagcactcgcactgctgctgctgaccaggggagaatgcgggtgtccactgtggaggcctctctcctctgaggacccatgtgtgtgttttaaggcctgtggccattctgcattcgggtaggaaagagggcatctccctggtactcactgtgtcttgggcacttttttacactcacatctcacagtgaaaataacgcctccaagcctctttctctgtgacctcccatggctgagcagagacagctgctaaagaaacgtactgtgctgttttctcacgccccattcctccgcgtgttctccccgcccttgcatacagatcagttcatactcatacatgacttcctgctgcttgccctgtcagaccacctgacatgtctggacgagtctatcctagcatgggcacgaggcctcagctgggcattccctccccaccgtggggccaggtcttcatggcagcttccccggcaagtaccacgtacaaaagacttttccatttcccagtgcctcttcttgggctccaacttagaggtggaagagccagaaggaggggaaagaggtgaagaaagagtgaaggatggacctgctgcccttccccggagctgtgggtcgggctgaaaattgaatgggctgtggggttgatgtttttctttttttctcatcccccaacctcaattctcatcatgacattttccaaacatacaagttaaaaatgagcataatgaatatctgcaaactcaacttccagaggttttaattttttttttttttttttttttgagatggagtttcactcttgttgcccaggctggagtgcaatggtgtgatctcggctcactgcaacctctgcctcccgggttcaagcaattctcctgcctcagcctcccgagtagctgggattacaggcatgcacaacgcccagctaattttgtatttttagtagagacggggtttctccgtgttggtcaggctggtctcgaactcccaacctcaggtgatctgcctgcctcagcctcccaaagttttaattttcgaatataagttttgagtggactaacctggaatgagttttaattactaaaatgagacttttatcttctttttcaaaaatccagttaaaaaataatagtattattattttgtgttttttaaaaaagatccaagttctacatgtaaacagtcaaatggttttacaaaatttgttgcaaaaaataatcagattcttgccctcttcccccatctctcgcttcctatctggtgtttagtgcttgtttcttaatgaccgcttttactgttacttcttgaattttgagttttacgtattaacaattatctttagaaaatgaggatttaggttctttgtcctgccctagtctataccacacacatccacatttcctacctcttgatcttcctaatgcaattatatcttcattttcttagactagtaatgagtgcttgtatcattatgaatatgtgctattcagaagtgaaccattagtaaactaggtatttttctttgttttttttcccccttatttgcatagtttcctatgtacttatcatgaaggctggatatagtttatattggtggtcttctttaagaaaacaaatataaaattgtaaacacaaaattaggtatagggtcttggaaaggactcttgcagattaagtgttctgaaatttaaatttgattaactttacagtaaatccacctctgattatcattaatttcactttaaacttttcacgaattatttaaatctcctcttaagacattcagatgtattaggcagtttctttttatcttaggaaaaaaaaattcctagcgctctctgacctgctccaagttggactggtggctccttgttgctgtgcctgctttcatcctgggatctcccttcaccatcaggattgccttcacctcattccagtcttggatctttcttcttgtttcttgagtattttttttttttttttgctgcattcccttcagtggcctcttgggaaaagatgtgtagggagaaaaattttctttagaaacttgcatatctgacaatatatttatcctatcctgacatttggtagatagttcagctgggtacagaattctaattaattttccttcctgatttataagacattgctccattttcttctggcttccaatattgctgctgagaagtctgacaccattcaaatgcctgattttttccatgtgattgttgttttctgtctggagtgttgtaggattgcctctttatctacagtgttctgaaatttcatgacgtaggtctttcttcattcattatggtagacactcagtgggccatttaatcgggaaaaacatgtgttcttcaagttctacaaactttattacttcctttttcttgtgtctttctctggtctgttttcagccccgagtctcttagatctgtcctctaatattcctattgactttacttcattttctaagtctttatccttttgctttactttccgagagacctgcttaaccttatctcccaactcttttattgaatttcatttcttttactatatattttttactttgaatacacctctctcttcctcacattttcccccatagtattttgtcttcaattgacagttctactatcttattactctggagatattaataatagtttttaaatttttatttatttttattttcaaaacagtgtcttactctgtcactcaggctggagtgcagtggtgtgatcatggatcactgcagccttgatctctgagctcaagctatcctcctgcttcagcctcccaagtagctggaaccacaggcatgtgtcaccatacccagctaatttttttgtttttgaggtggagtctcactctgtagcccggtctggagtgcagtggtgcaatctgggctcacagcaacctctgcctcctgggtcctggttcaagcaattctcctgcctcagcctcctgagtagctgggattacagaaacacactaccatgcccagctaatttttgtatttttgtagagacagggtttcaccatgttggccaggctggtcttgaactcctgaccttgtgatctgcccaccttggcctcccaaagtgctgggattacaggcgtgagccactgcacccggccactaatttttaaattgttaataaagacgaggtcttgctatgttgcccagtatggtcttgaactcctgggcttaagtaatcctcctgcctcagcctcccaaagtgttgggattacaggtgtgagccactgaatctgacattttttaaaagttttcttctctttaccaagtcttttttcccctttctgcttttttgggttgttttattttgatctctatcttgctagaaactttctgcagacgtttagtaatactagatttttgagagtgggcaactggaaagctgattggaaactctgaatacatgggtgaggcttgttggctgtgagtgtcattgcttgatgtcctggcaaggccaatgggtttgggacccctactattagtataggcctgattccctgggaaaggctcttttgatctcctgcctggaggataaaggcctggctaccagccttctgtgtgtaatgtgagggagaagggctggagtattcaacatcatgctgaatcctttcaatgatcatcttgtttttagtaatctcctaccttaactctctgtcttctgctagtatgggaaagatgacctgaaaatctaaccatttatttttcccccattaatatcattttatgattattcagaagttaaataattgtcatgctgtcctccaaaaagactgaatcaactagcaacaaataagaattttctcacagctctgccagcattttaaaagaatagctttattgagcccaggaggtcaaggctgcagtgagctgtgattacaccactctaccccagcctgggtgacagagcaaaaccctgtctcaaaaaagaaatttaaggaacagctttattgttgtaaaatagacatacaataaacagagcacatatttaaattgtgcaacttatactttgatataaccctgtgaaaacatcaccacaatcaagatagtgaatatatttatcacctcctgatacagtttagctctgtgtccccacctaagtctcatgttgaattgtaatccccaatgctgggggaggggctttgtgggaggtgattgaattgtgggggtgcacttcccccttgctgttcttgagatagtgaatgagctctcatgagctccccttcactcactctctttcctgctgccatgtgaggatgtgcttgcctcttctttgcccttctgccatgatgtgtttcctgagtcctccctaaccatgcctcctgtacagcttgcagaactgtgagtcagttaaatctcttttcttcataaattacccagtctcaggtggctctttatagcagtgtgacaaggaactaatatacctcctcagttacctcaagcttcttcttaattccttctcctcccttccttcattgccaagcaaacaaccacctgttttctgtcactatagattagtttacattttgtgggttttttttttttttgagacaaggtctcactctgttgcccaggatggagtgcagtggtgcgatcatagctcattgcagccttgaactcctagtttcaagtggtcctcccacttcagcctcctgagtacctgggactacaggggtacaccaccacaactggcttaaaaaattttttaaataaaaatggggtcttgttatgtttctcaggctggtctcgaactcctcgcctcaagcagccctccctccttggcctcccaaattgttgggattacaggcatgagtcatgtactcctggcctagtttacattttctagagttttgtataaatggaaacatacagaatgtatttttttgcggagtgggggagtgtttctatttctttctttcttttttcttttttttttttttttgagacggagtctcgctctgtctgttgcccaggctggagtgcagtggtgcgatctcggctcaccgcaagctccacctcccgggttcaagcaattctcctgcctcagcctcctgagtagctgggactacaggcgcccgccaccacacctggctaattttttttgtatttttggtagagacggggtttcaccatgttagccaggatggtctcgatctcctgacctcgtgatctgcccgcttcggcctccctaagtgctgggattacaggcgtgagccaccgtgcccggcccaagtgtttctatttcttaaccagctttcatgcaatctttttttattttaccatctctgtgatcccactcccaaaggtactagatgtcgattggtccttaggatcagctaccatttgcccaactgctttccagccttccaaaaatttttttctttttttcttaaagatactcctgtgtgaggctcagaactcttgaattgctactgcaaatatgaactcggtgatgtgaatgccagggaattgcctgattgatcaaagaaatgtatccccttctccctcactcttgctgtcttctcatttgttttccccatccttgtggattcgtgaatttaaatatccctttaatgttataatattttaatggcgtttggcgaaaagtacagaattaggtgcaagagtgcatagctgttatttttttttttggcctctgagactgttcatatatgcaagttatttaacagaaagttctgcagtgacctgagatgtcaggggggtctgatagagtacgtttgaaggcagttactggaaaaaaataatgccatttctggtttgtacttcggtaagttcagatgacccaatatattgtttacatgtggcattcagtaaaaaagtagcttcccctccctttcttcttccttttctcctttcctgcttctataaagcatctgctttgggaaacttcttaggaggagagcttgccagcccgtgggtaatggagaggtcttgcagagataaaagagatgctcccactcaatgcaggatggtgtggaggtaaatggggatatgtctggcatcactcaggaatgggccttcctggcagggaagagaagggaggggaaagaggaagggagtcaaagatgaattgctgaatacggggattccagggcctggagccaggaagagaactttgggaggtgtgaacctggagggcatcagctgatgaggagcagcctgaagtccggggaggacctgtttttggtggccaggaagaaagtgccttccacacacagggaggccacaaggctgatgggctgggggttggaaggacagccctaggacaggcttgggaagcaggctcaggtagggactgtgaggttcttgttgagtctttttcattcctggtcttagaaaatagaatccaaggcctcttgagagtggaaggtgggttgggaggagggcagatggggcttaggcccaggacacccgtagagctactgcccagctgtctctcagggactctgctgaggtcactccaaggatcattcttagccttgctagacagtactgacagagggaaccgtagtatcgcacccacttccttctctttcaatgaaagtttaaaggtcaccatttcctctggcaaaggaagttccacaaatattccatttccggtcttagaaacagcaaggtatcaagcaattgcaaacttcctgtgctggggaattcccaaggaagtaggggcagagttctggtggagacaaagtgaattccgagtgattagtcagtagcagtagcagtagcagtagcagtagcagtagcagtagcagtagcagcagcagaaccagaatttccccgcacgtgtctcaggctctcatttgccaactcagtctctaagtatttttattggcaggaaaaataaaatagctatgagtgaaataattcattagacctgagcctccatcaattttgtgtttaaaggcctgactctctttacctttccctgggatggaagatgcaaatgttcctgatgtcactgtcaaaaaagaagaaccagtgggtatattgtatgcttgagttccagccatttgtcacaatagatagagatgactgccatgtgtgtagactttctatagactgtgtgctaaacccgacctgccacttccaaggagtagatgaggaatgtccatggttctggggagccctaccccaatttggggcagacattccaaagctcattttctgtggagggggttgatggttaaaggacggcctgggagtaactcgtctgtactagggcccaggagagttacatgctgcttcccatgttattcatcattcccccatgtgaatagctatggcgtgaggtccaaggttagggcctttctaccataaatgggggaataaaattcccctaccagcctgagaagtttctgttataaagaggcctttttttttgcgggggtgggggagcaagccgactaatgtgttatttccatacggtttgttttaaaatgtagacgtcatatgcaggagaggtggtgtagtgagtcacaacgggattagaaggaccagtccgaaaagcagaagagggtcaagttcagggcacggaggactactgcattcagtggcgtgaaaggcagatggctgaacaggagggggacattacattgcttgttctccttgagcctcgatttcctcatctaaaaagagggtcatttattcacagaacatttattaaacttgtgccaggcaccgtgccaggagctggactaaaaattaaatccacccctgtgagctgctctgaaggctaaaatatgaagtatgtaaaagtaaccaagtgctgtacacatgcagctattcaatgactgtgtgggcattgcggcagattttaattttcttttttatttctttctctttagtgagaggtgttggttgttattattgtcgtcgctgtaactgtctatttcacttgcttttttgttgcctccagcccattccagggctgtcatctaggacacttcttatcacctaaataaccggggaggcaaagcgctttcttaagagatggatccagaagaacaatgctggttttctgtacaaaaaggggctgtgggaagtagagataagaagggaattggccaagatgaatgtacagagccttattttttttataacacagcaagattagatacaaaacaggacaatagcatcatctgtttttataactggaaaggacctcactttacaggtggggaagaatagagtggagaagtgaagagaatggtcacagagtcaatcagcatgtctgcgtcaaagctgggattcccgattcagggctcttactacagtgacgtatggctaatattttggcattgtttcggggaaaagctgaagccctgatggtgtacgtcactcttgagatagtctgtagtccagcagggaggaaagcaaggaagggaggtggaggcagcatttttgggtgtaacatttcgttcttgttttgtggccaaatcatagtgtgattgggacaagccactgcctttctctgagcctccactttctttttcttcttaagagggagggaatagtagagtaaaagtagtcattttatcaaacacctgctattttggagccatattgcaagtgggttgggggttgaaccagttggctttattacccataggattaaatccaacctcgatactgtggcattcccaaactccagtctaatcttcttctccatcagccatgccccacgacaccctggtcatatctgatgttgccccttgcacttgccccctccttatctttgctttctgacctaccatatggctattggttgaaattctcattttccagggccttgcttaaatatcatctcatccattaaaactttcttgaacctccccttgccctgttcctccctaatgtctcaagccagaatttatttccttttgtggccaagggactgggtttgtgacctctctcacgagacttaatattgagaccaaacgtctttagacctcaccagccagagagatgagcatctatggaatgcaggcttttgcctggacttgctgatgcagggcctctgccttcctccagggcctctcctgctgttttaggaatttccctcatggcacagtccatgagctcagggtcaagttcatacatgtttttacttcttctactctgcaaatggtcttcttgaactctgagggtcctaaagctgctctgcagtttgtggggtgagtagaaaggggctttcaaaagttgtgctgttgtttcccaccccaatagcatgaaacacaaagatgcttacaaatagctgccttgctttctagtcccaacttctctctcctgaggctttaaaacaagtcccctaggttgagctggactggagttgtatcctatcttcattatctgtctactctctttctgctctctagagaagatattatatatgtgtgtatgtatgtgtaaatatataatatccatatatagaacatatattgttatatttacatatacatacataacatatgcatgtattcatatatacatatgtagtatcaaagttggaattaaactgtatattttgtaatttgcttttatttgcatctatcactgtaaaatgaatatttatccataccgtaagatattcttcaatgtattttttttttttttgagacagggtcttgctttgttgcccaggctggagtgcaatgacccgatcttgggtcactgcagccttgacctccccggctcaagtgatcttcccaccttagccctctgagtagctgggactagaggtgtgtgcctccacacccagctttttaattttttttgtattttttttttagagacagggttttgccacattgcccaagctggtcttgagctcctgggtccaagcaatcctcccactttggcctcccaaagtgctaagattacaagcatgagccaccacacctggcctcaatgtaatttttaatggctgtatagtattccatcatgtggttgtacccaaaattatttaaccagtccccagtttatttcaatttttttttactattttgaataatgttttagtaaatacccacaaaatatgtacaatggctgggcttagtggctcacccctgtaatcccaacactttgggagtctgaggcaggtgggtcacctgaggtcaggagttcgagaccatcttggttaacatggtgaaaccccgtctctaccaaaaatacaaaaattagccgggtgctggtggcacacacctgtaatcgcagctacttgggaggctgaagtaggaaaatcacttgaacctaggaggcggaggttgcagtgagccgagatcacactcactgtactccagcatgggcaacagtgagactccatctcaaaaaaaaaaaaaaaaaaaaaaaagtacaatttgttgtacctccctgattatttcttttaagtagaattttcttataattttttttataagtaaaattttgaatcaagggagaagcacctggagtccttcagatacctattgccaaactgaacttttctgttccaggtttactacattcagcctgactcagggtttggggagtagaggagggggtggaggcagagggcctctccctgtccccacagacctcccttggtgaggtccaagtctggacaggtggagtgtggcattgcaccgtcaggtcctgcttcctgtaattcccctaaatccatccagtggagcctcattgttcaagtcttttttttttttttttttttaactcccctgaagacggagtctcactctgtcgcccaggctggagtgcagtggcacgatcttgactcatttcaacctctgcctcccaggttcaagtaattctcctgcctcagcctcctgagtagctggcactacaggcgtgtaccatcacgcccggctaatttttttttgtatttttagtagagacggggtttcaccatgttggccaggctggtctcgaactcctaaccttgtgatctacccgcctctgcctcccaaagtgctgggcttacaggtgtgagccaccaggcctggcctcaagtctattttttaactccaggaggcctggtattcagagggattagggctggcagaagggcctcaaagctttcaaggcctggggaataggctgcagcctggttcagggtaacccaagtgattttggttccaaagggacaggaaaaaaagtgattgatatggaagttgtcaaagtgcaactgtcaagacattaaaaaatgtaacccttttactaatatacagtagacttgtgttaaatatttaactgattgtaaaaggaaaaaagccagacgcagttttccctaccatactgtcacaacacctcaacactgagttcttctgtgacctctagtcaccgaaatgcttggggatttctcccaccactagtcctccagcagccgacaccagttgggtgtcctaattcactccaacactatctacctggagttagcgttagatcccacaggttgagggctcagtctcacaagactgcctcccacttcaggtgccagttacaagtggtaggttgtcacctatgcttctgactgatggctataaatctgggtttgcttccctcgggttccgtgaatttgctagagcagctcacagaactcaggaaaacacttaagtttaccagtttattctaaaagatattacaaaggatacagatgaacaccagatgaagagatgcgcagagcaaagcatgtgagaaggggtgtggagcttccatgcccctctggggcaccaccctccaggaaccttcatgtgtccagctatctgggagcccttccaaaccctgtcctttttgggtttttaagagtggctttattacgtacacatgattgaccgaaccattggccattggtgactgacacaaccttcagcccctccactccctccagtggttggggagtggggctaacagtctcaagtctccaatcctgccttggtctttcctgtgacaaaccccatcatgaagctactgcattggggctgccagccagcagtcatctattagcatgcaaaagacactcttattattccagagattccaagggtttttaaaagctgtatgtcaggaaacaggagatgaagaacaaatatatatttcacaacatcacactcgttgggggaattgacaggatagcaaaactgattaaaggaggataggagagactgagatatatatttccatatatatatatagagagagagagatatttccatatatatatatatagagagagagagagagagagagagagagatgatgcagatatacatatacatataatcagtggaataaaaagtgctggaatgagaagcaaagttagctgcatgcagtggtttgtgcctgtaatcccagctatgcagtaggctaaggtgggagagtcacttgaggccaggagttcaagaccagcctgggcaacctagtgagaccctgtctcaaatttattaaaaaatatatatttttaaaagaagcatagttatatacaaattagggcaataatattaatttgttaaaaaatgaagcaaagttacatacaaaacaggacaataatataacagttgggtttatcttttctactgaacagaaataattttatattctggtgaataaaaattacttgccactcatcaatcttctgcaagttaacaagtaactctacagagccttgtgttcaatcaatggtaaacagcaagtcaaacaaaaatactttcctttacagaaggggtcagcaaactatggcccatgggtcagctctggcctcttgcctgtttttgtaatcaagatttactggaacacagccacactcatttgtcatgtgttgtctgttggctgctttcatgttgtaatggtggttgagtatttgtgacagagacctcatgctcttcacgctgaaaagatttactatctgatcttttacaaaaaaaaatttgtggactcctgcctgagagcatcagatgccccttgggcaggcagcttagacactaaaaaggcacacctactctctttgccttttcctcacatttggataatttttaacacagtgttttggccttttccttcttatgtctgctgtcataagggcagttctgccttagtcagtctaattgtttagacttttgtgatgctaaatctgtaaaaatgcagggatccagcctgggtgcagtgcctcacacttgtaatcccagcactttgggaagccgaggcaggaggatcacttaagcccaggggttctagaccagcctgggcaacctggcaagaccgtgtctctacaaaataaaagaaaaaaattagctaggcatggtagcacatacctgaactcccagctactggggaggctgaggcaagagaattacttgagcccaggaggttgaggctgcagtgagccatgatcatgccactgcactccagcatggaagacacaagaccctgtctcaggaaaacaaaaaacaaaaaacaacttagggatctgggacatggagtagggattttttttttttttaatttaaatcagagcagcctccattccacaaaattgaataaaagttcgctggggcagggattttaacagggagtttggaagagaaaggtggagacagcagtaaggaaaatggatatgagagaaaaagagaatattaagaaatgttgcttggacaatgtacaattttcatggagtttgtggaaataagcaaaggatcagaattattttaaattgctttttttttttctttttcggagccagaacgtgtgtgcatgtgtgaatgtgtgtgtaagtgtgagcgtgtggtgggtgggtggatgttttcctgactggaactcagtgctgaaacgggcctcacagttgctcatcgtcagggatacagaggatccaacaaggatgaagtacgcaaggattgtcaacctgtgggggatgactggccgcacagccccatgaagaccacctgggcagctcctctctcaggccttctgacttgaagaatggccagctcctgtggggtcaatacaagaataacttatgtgcacagaaagaatatttacaattacttgagcttaaatttatgtaattaaatttattataattataaatttaaaaacataattttctttttctttttctttttttgagacagggtctcactttgtagcccctgctggaatgcagtagtacaatctcagctctcaccgcagccttgacctcctgggctcagatgatcctcccacctcagcctcccgagtagctgggaccacagctgtgtgctaccacacctgactaatttttttttttttttttgaggatgagtcaagagggggggcagaggacaaggatgggcagagaggtcaaggggagaggactgcaagcgacgcagcagacgtagaggggattccgcagactggagcgcaagcgaggagcagggagtgagagagacgcgccgcgcgcgagggagtcgaggggaggttgacggggcaggagagaggttgcacgagagagccagaaccaggctagtcacaaatgccagagcgcacaagggtcctgccgccttgggcctcccaaagtgctgggattacaggcatgagccactgcacctggcctaattttttttaattttttagtagagatgaggtctgtgttgaccagactggtcttgaactccctgggctcaagcaatcctcctgtcttggcctcccaaagtgctgggattacaggtgtgagccaccctgcctggcccctaaattttcttcatgctttaagttcaacttacaaatcttactatcctatttataaggcctctttttaatacaacaaagagaaaagccacttttctttgaatcagtgttcagttatgccattgctttacatcaccaacctaaatcacaaacagagagaggctctctaaaagaaaatgatgtttgtttgggaatagagcattgcaacaggaatatgcacttcatagtaaactctgtgcatattcagggtaagtaaagaagacaaaggtttttacaggaagacaaaagttttcaaaagaaaaaaaatgagcattacatcactgttttgaaatagttatgctgggctactaagatcaataacaaagatattgccagtctgaggttggacaggcagttgctgggcacatgtccttttaaagtagtattttttgtgtaaggttgcaatggcctttgtgcaaggttttgttttttgcagagtctttttcatgatcagggatacaagtgtgagaactctttcttcatggccttccctggctccatttatcagggttttcttaacattagtgtctccattttgattttcacaactttaacaccatattaaatcctcctaaatacttaactctcttttctagcatagttaattgagttcccttaaatattttaaactacaaatttgatatatctgattctttcaaacactgcaagtgcctgccaaggcagacttaaaaatctgatgaataaaatctttctagccatctaagcaatccctaaaactccaaaaaaaaagaaaattaaaaaaaaatgtagtaaatcagactcaaaattcacacaccttttacaaacttaaccacattgttttagacatttcaaattaaaatagaagtctaatgtcaattacacatttcaaattggaattacaaggtaatattttatattctttaatgtgcagaattgtctcagacacattaaataacaaaggcattacctggaggattctaaaacaacacttatttgtaaacttaacacaaaagcgttgctgcaatgggtttcctttaggtcatcagctctatgccttccccctccccgcccccggtgttgtaaagccctgaactaaggggtgcaaattgcagttaaccactacaggtggttcctaggtcaaaggttctgacactgaggtttctgagtcaaagtttcaagtacttgatatgggctgttggctagtgactctgagacaggatcattggtctacactagccacagggtaacacactgagtcattctcagagttgggatcaggctcctaagtcagcgagaggtcctaagactttttagttgtgagttggttttgtaaccacgtcccatgaataccttttaaatgtcatgcttacctattttatcttatctgctttcaactttttccatctgatttatgtaggtacaattttgcacctcctatctggtttgtagttaatatcttttattgctttatcctactcaactaatttttttagtgcctgttttttttttttttaatgtgtgttgatgactacaattctaaactcattctactgattcatgggtgctttaaaatctgagcagtctttcgcatttactgcctgtgatggcccatcccaccagctaaagtgtgtggccactgcttacagcaccatgtgataacgagtaagggagagatgccgcccagactcttctaggagcagccagtaggaccttccaggggttgcaagcaaaccacagcaatatgtggagtgtggcagaggatggccccaagaggatgtggcagcggctagtgcagctcagcttagtctgagaggaaatgctggagaggagagcccagtctgtacaggcatgacagccacaaggacttcaacagctaacatggctgagtggactttatgtgctatctcattcagaaaacaggagcaatcagaaaggagtcacctcctatttgtaccccaggaattgctaacctacttgcatctgaatgatgtccatcacttcccttcatcacctcctctgggggctctgcaaggatttgactcctgcattagtgatctgtctcacctacgttgtgattcacatgaacttactaatgtgctatgtgacaactaccatcttaaacacaaaaaccctcttttgattctgtggctccctccagctacccctgcatttctctgtccccctgccccgtctctgcactcacttttattttacagcaaaactactcaagggagtctcagtgctccttggctccatgtctccacctttcattctctcctcagttcactcctgtcaggcttccgtcctcaagctcttcttcacttttgttctagggccgctgacatcctctttcttgccaaattcagtggccaggtcctcacttactcaactgctcagcattgttgggcctggtggaccacattctccttcacccaccttttgctgctctctcttctctccagatgtttctctcttctcactggctactcctcttttgtctcctttgttagctccatttcttccttccaacctcactgtgctggtgtgcccagtgctcagtttttagctattctctcttttccagtggcattcattagatggtatcatgtgacccatggcattatatgccttctacatgacagttactcctgaatatgaatctcaggaaagatttgcatttatttttaattaatttttttaaattttattttaataaatgaggtctctctctgtcatccaggctggagtgtagtattgagtgatgtgattatagctcactgcagccttgaaccatgggctcaagtgatcctcctgcctcagcttcctgagtacctgggactacaggcatgtgccaccatgcctggatgactttttgtgtgtgtgtgtgtgtgtggagacagggtcttgctctattgcccaggctgatcacaaactcctggcctcaagtgatcctctcacctcagcctcccaaagtgctgggattacaggtgtgagaccatcctgggctaagattcagattttgtattcaattgactgtttgacatcttcacttggacacctaagaggtatctcaaatattaattaacttggccaaaatacagaacttttgacccctgcccccacaatacttgccccttccccagacttctccatttctgttaaaaatccccagttactcaaccctctaaactatgaatgccctttgatttctttctttccctattctactacgctgggtacttcagcttgcccggttatctttatgcccagaatataatcctcaccaccttctctcctattgcccgagtctaagatgtcagtctctcctgcacagtccattgccctgacctcctgagtggtctgcttccacttttgacatttctactcctccttcccccagggtcaatttttcacagcaagagtggcattttttttttttttttttttgagacggagtctcgctctgtcgcccaggccggactgcggactgcagtggcgcaatctcggctcactgcaagctccgcctcccgggttcacgccattctcctgcctcagcctcccgagtagctggggactacaggcgcccgccaccgcgcccggctaattttttgtatttttagtagagacggggtttcaccttgttagccaggatggtctcgatctcctgacctcatgatccacccgcctcggcctcccaaagtgctgggattacaggcgtgagccaccgcgcccggccaagagtggcatttttaaaaccatatattagatcatcgcttttgtgtttgggaacctccaagggctttgcatcatatatcaagttgacacctctcctacccaagcctggctctttcctgctcctctgtcctctcagcccctccacccattgttcatgctgcttcagccacactggccttcttgccatgccacatttgtgctaagcccacatccaatctcggggcctttgcactcgcatttcctctgcttggcatgctgtaccccagatctttcatgattggcagcttctgtacattcagccacctgctcaagccaccctttcagagggccttccctggccacctcacctgaaatagcacctccgattgcacccatccggttattctccatcctgttctcttgcttggtgattttccatcactgatgaggaaatgaaccatggaatgctagggctgatgaccagaactttcccccacccccacattattacagaggaggaaatgaggtcggaggtaagatgggcccaggatttctactcccgcctggactgcaggcacagcactgacctcagctgtgctcactcttggcattcacccaacccttctatctccaactgccccatttaccagaaagtgaaatgttctcagagacggtgagccacctgacttggacagcagcccagggcccctggcaccctgctttcttcctccctgccatcctttcctctccaagacctacctttccctgtgattcttgcccacatgctgcatttcatggttttatgacctgatttctgagagggatttgaattttcatgattatttatgtaagcaaatcattatgcttatacaaatgagaaaaggagtgcttctggacttcccagggacaaaatcttgtcacttggcttgctttcatattgctaattaaggacccaggatgtgggtgagatgtgctaaaagctgagaggaggctctggactctgactatgggcccacacccctgggcaggcatcacactagtcctttaggtcatcctcaacccagcttccagttgaatcagatgtttgtgaataactcagcaaggctgtatgggaaatgaagaatgaggtggggaagaggcctgtgcagaagacacactgacttacccctctacctctaactagggtgttgtagcagccacccacccaccaagtctgtcttccagaccacgtatgctttcctccacctttgcatcttttatcttctgccagcccagatgcttgctgactccagcccaagcctataggataagccacagcctgtccctacagactacgcattgcagaatctaagacatcaagtcaagttcggaagcacttgccttctcctctccaggtacacaggctctcctggaaagctggtagcagctgtggaggtgtggtgtgttacctgctgcaggtgcagagaagttgacttcacagcccttcagaaagactgccttcttccagttgtatttgtgtacttgcttgggtgtggggaggattctcagctttctccactcaaattatcagaccctttccatttagtggtagaccatttccctcgtccaggccaagggcacatagtacagagaaatagggagttgttacccagggagagaacttggctctaaacctgtaatagaaaggtcagttctggtctggagggtcaattttgatctttggctcagatccaggaattggaaccaaggcttttgaacattttaatgcaggggattaaaaaaatgatacgagtcattcacgaatatatttgcttaacatctaaagagatccctcaaaacactagaaaaaataagaacaaaaatctaataaaacaaaatttgttaaacacatttaccaaatttttttttttggtaaaaattcaaatgtcataaataaagctaaagttcctcttgatgactcgctcctctgccctattccactccaagtaaccactattatcagtcttgccaatacccttccagacctctctacctctatataccattagaagcacatggttttgcattgaggatgtgcagtgttttgttttacgtaaatgttatcactctgttcttgttccataatttgcctttttctctcaatgatttgcttggctatctttctatttcagtagcatctcctttctttttaacttaccattgtttatttaaccttgcctctatcaacagatatgtaggttgtttctagttgatttcattaagtatttataaacaacgcatcagtagatgtccataaatttctttacggaagatggcaagtagtggaattgctgagccaaagaacatgtttaaaaaacccaaaaaaactagacgctaccaattttctctccaaaatggccatacccacttacccatacagagatgatttggaatctggcttcctcacaaggtgagatgccttcacagtttcattcttcctggcatgtcttcccttttgtatctgagagagctggcagaattgtgtcactaaatcaaggatagagggtcaaatgacagctcaagctcacaggcaccctctgctttcttcccagaccacctgctttcctgccaccagctctgttccatcttatagaatggttgccacttgggtgtctgctccgacagccatgtcatcctttgcactgcagttatgaagcagacagagctaggagaggggctttgccagcctctgccctagcttggagaacttcaaagaaggagggtattgagagtgagctgccgaagactggcagctccctcaactcaacagttgtccttccacaagaagtcagatacatttttttgggataaaatatttaaaaattattattttatttctgaataatatatttacatgattcaaaaatcaaactgtaggccaggcatggctgcttatgcctgtaatcctagcaatttaggaggccgaggcgggaggatcacttcagcccaggagttcaagaccagcctgggtaacatagtgagaccctgtatctacaaaaatttaaaaacaaaaattagttgggcatggtggctgatatggtttggctctgtgacccaactcaaacctcatgttgaattttaatcctcaatgttgagggagggtcctggtgggaggtgattggatcatgggggtgggttctcccttgctgttctcatgatagtgagtgagttctcacaagacctggttatttgaaagtgtgtagcacctcccccttcactctctcactctcctgctccgccatagtaagacgtgtgtgtttcccctttgccttccgccatgattgtaagtttcctgaagcctcccagctatgcttcctgtacagcctgtagaactgtgaatcagttagacctcttttcttcataaattacccagtctcaggtcattctttatagcagtgtgagagtggatgaatatagtgccatatgtttgtattcccagctacccaggaggctgaggtaagaggattgcttgagcctgggagtttaaggctgcagtgagccatgactgtaccactgctctccagcctgggtgacagcgagaccttgtctccaaaaaaaaaaaacccaaactgtgtaaaatgtgttcataaaagtgtcttgctcccacacctgtccctatatatcttattcctcagcctctgacaactactttattcatttcttatgtatcttccagaatcaaaaaaaaaaatcaaatacaagcacagtggaatgtattgcccttcttcccctcccttttgttacatcagagttagcatatcataaatacggtctgcattttcttctttttcagctatcagcatgttttggagaggatttcatattcgtgcagacagcatgtattagtcagtccttgcattgctataaggaaatacctgagactgcataatttataaagaaaagaggtttaattggctcacagcttcgcaggctgttccacaggaagcatggcagcatctgcttctggggaggccttaggaagcttttactcatgcagaagacaaagcgggagtggatgtcttatatggcaggagcaggactgagagagagagagagagagagaaaggatgccacatacttttaaacaaccagatcttgtgggaactctgtcacgagaacagcaccaaagggatagtgctaaaccattcataagaactccacccccatgatccaatcaccccacaccaggccccacctccaacatcggggattacaatttgacatgagatttgggctgggacacagaaccaaacaataccagagtgctttctcattcttttctatagctgcctagtattctatgtcctttacttcatttaggcagtctcttgttgatagacacttgggttacttccaatttttcctattacaaatgatgtgcaatgaataattttgatcattttccatttcacatgggttatgtccatctgtgggataaatctccaggagtgaaattgctggatcaaaggggaagtgcacttgtgattttcatagttagcaaattttgttctataagggtcatatcaatttatagtcccacgcgtaatatttaacagtggggatttcccgacagtttgaccaacaaggtctgttgttaaacttttgatttttgtcaatctgatgggaaaatactagtatctcaaagtgcttttaatttgactttcttattacaatgttaagcatcattttactctgcccaagatcaaatagtattttcttttctgtgaacagactgttaagatcccttgcctcttgttttgctggatttttgttcttttttttcaaatgttttgaggcagttctttacatgtgaaacaagttatctctttatctggggtgtgagttacaactacttttcctctggcttgttttgcgctttgactttgcttctggtgattcccgcaattctgaaagtgtactttttgcatcattcattcttatacacccatgctcttgttcacactggttcctctacctgagggctttttcttttcttttctatctgggaacattttttagagacagggtctcactctgtcacccaggctggagtgcaatggtgcgatcacagctcactgcagtcttgaacttctgggctcaagcaatcctccagtgtcagcttcccaagtagctaggactacaggtgcatgccagcatgcctggctgattgttttatttatttatttattttttgtagagatgggagtctcactatgttgcccaggctggtcttgaactcctgggctcaagcgatctttctgcccctgccacccaaagtgctgggattacaggcgtaagccaccatgcccagcccatgtgtggaaatcttctgtttatccctttaggcttgattcttatgtcgttctcctccctccttcctggctactcctcttgttctttatcttactctacttgtcatgttaccttgtttctgcttataactagctgcctctcctatctgaggagggacttgtgactgttctcatctctgtactcccagctcctagtacatagcgcttgctcaacagatgtttggtgcattgatagataaatcactggtagctgttactaccagtcctgactccctgcagtgcttcagctgatcctgttccaaatgtgcactgaatatccttctgttgaacaacagaaataaaggggatgggtgaggaggatagtcttcggtggccaaggatatttctaggtactttgcagcactcagcaatgaggagtgggctttagtcccccaagaactctcacagccctgtttgtctttactgttcagtgtcaaatccaagacaagtcaatgatcaggaaagaccctttttttttcttcagtgaagtttatttcagaaccattgaacagtatgatatttgctcatttataaatattcccatttaaataatctgagcttatatattttcagtcttaattaaaggacttgatttaaagagagcacaccagtccaaattgaattgattccatagctattaaaaactaggctcttttacagacactgctacttcttgccccctttgaataaattagaccaatgaataaaacaaacaaacaaataaataaataaatagggaagcggttgctcatcagaatgtgggagcgaatgacagagggtttcttagaaccaaatgtggccgtggtttctgtcaggcgggctttaagtgagtaggagaggtgagagaggcctggctcaacaaaagggctggggattggccctgaaaggagagagctgactgtcctggctgatggacaggagatcctcttagcactaccctaaggcaggcagttgggcattggtgtagacaacaggaaagtccaggctatagccgtactcaaaaacctttctgttccctttctgccagccctagggattgagtccacattcagcacaggactctctgggtacagctctctttaggaagacacaaattgcatggtgaagtcagttatatcctggccgcctttggtccctcccaggaagacgggcatgttttctgcttgagaggtgctgatgtaccagttggggaactgggcagactcaaattccagcttgttattgatttctatcttgttgaagacaaatcgcttttccatcttcttctttgggtaatttttgggatctacactctgcagcgaaagagaaagaagaatttttgtggggcaagggacaaagatgctatgggaaagatgttctttgggttggccagaaaggaaactgacgagcaggtcacatgatcaggagccagactcctgagttgtaactgggcccccaactttccgtgtgattattaaaagagcccttcttcttttctaaaacttagtgccaaatgctgaggagcataatgtaggtgagaattttttttttttgggggggtgaaaattaagctagagcttcttgaagtacctagtttccaggggctttttattgtatttttccttatggtcctagaatgacatcaacttggaaatgaagcttttgctgagaaagctggaggtgatagtggtggtaattttgggagtggagtggacatgataatgggaccctttaagtcatctatttcccaaggtgtctatcaaatgagagcagccctaacaatatataatctgttggggttgtaactatggtaggacataataacatcggcaaaatgatttaattttctgcagcaggattgaaggttgcacgcagttaaaaattatgttaaatttatttacattaatgcaaaattgtcaaatagacctgttcccagcttttcctagggatgggggcggggagaaggtggttgtctgggaataagtggtagcaggaggctgagaagggcttcattccatagcattcacttacctccagctgtagagtgggcttatcatctttcaacacgcaggacaggtacagattcttttccttgaggcccaaggccacaggtattttgtcattactttcttctccttgtacaaaggacatggagaacaccactgaagaaagaagggggtcttgtggttagggacacagcagtgcagggtcaccccaacccctaggccccatgagtaggatacatgtaatttggtagcctctgtgggaacccacagtgaggttccttggcctaagacacaggataacttgacttctcacagacaatagcagggtcattttgttgatttagggtttcccctcaaaggcctgagggtttctcagagcctcatagcagtaggaacggaggtcttcaccacggggtggaaggtaacgcgtcggtgtagactacaggaaggaagccattgtgtcactggctggcaatgtgcccatccacaggagcggaacaacttgatcaatgtggaaggaaaggaaagaggtgaagctgtacttctgccagaaatcaggcaccagaactgtttcaggaacagagagtagcccatgggaagaaactgggagaggagaggctgagctgggaaagtggctccaaagagagacactcattttgatcttcctcagtcacagcagtgtcaattggaggccctgggatcactcttactacccgattccaaagaaacaggattttcttggcctggctgagagcaaatagcttccccctgagtgaggctgtccttcaaagtcagcagccttagttgcccacactcctgtgcagaggctttggctactgtggcacgatgcaggcagatcaccacagctaatgatgggttcaccgcacttgaaacttttgcccgttacagcggagagatataagttcctgctgggcggtaaaatttccctacaaggaaccacctggcattgggtgggacggatgttggggcaaggggggaagactggggagggggatggacacattatcgctccagcactcttgtttcagcctcaacaacaggaagagagaacccacaggcagttaggcatgtcatcaaatgacccatattgtggcagaattgacattgcactatgcccaagagacttgggtggacatggtctgggagtgcttgagccgtctaatttctcagggtcacactcctgttaacaaatgcactggccagtgcaatcaaatgtgccatttctaggaccaaagtttgtatattcctttttaatattttttttcacttgtgttgatcatttgccttaaattaactttctactttgtttaaaacatggagaattagcaagctgccaggaggccaggcagggaaaccaggatgtttccatttaccttgttgctccatatcctgtccctggaggtggagagctttcagttcatatggaccagacatcaccaagcttttttgctgtgagtcccggagcgtgcagttcagtgatcgtacaggtgcatcgtgcacataagcctcgttatcccatgtgtcgaagaagataggttctgaaatgtggagcacatgttgtttaggtataaaatcagaagggcaggcctcgtgaggcgaggcggcaaaatttgatttcttggaggacacctgagcatatacggtcaaagtctgatgacaacaccagtagggatgaagctgggagtggggtggctaagaacactggacctgacactattagacatgggttccagcttcaggtctattactgctcactgtggccgagcaacagagctacttaggtaaaatggtgatggtcataacactagcccacagggaggttacgaacctctggtgacaatgtaagtgaaaggcccctgagaaagagtgagggagttgcaaatgtcagtagccatcaagatcttctttaagaatagtttccactaaagagatgattgctttggtttccagccttctttgttttgtctccccgctgggccttctacctttaaagggctttggctctgggggaattgagttggctggggcttgatgacttccaagaggacacaagtggagatctactgcctgctcttggctaactaccttcttcaaagatgaagggaaagaaggtgctcaggtcattctcctggaaggtctgtgggcagggaaccagcatcttcctcagcttgtccatggccacaacaactgacgcggcctgcctgaagcccttgctgtagtggtggtcggagattcgtagctggatgccgccatccagagggcagaggtccaggtcctggaaggagcactgcggagagagcgagggagggagcctggtgaggtggtcctgccaggaaccatgctttgacatcagagagtagaaagctcagagaggaggaaagggcttgaaagaatcccgagcttctaaagatcatccctctctgggccaggcgtggtggctcatgcctgtaatcccagcactttgggaagccgaggtggatgaatcatttaggtcaggacttcaaaaccagcctggccaacatggcgaaaccccttctctactaaaaatacaaaaattagctgggtgtggtggggtgcactgtaatcctagctattcaggagactgaggaaggagaatcgcttgaactcaggaggtggaggatgcagtaagccaagattgtaccactgcactccagcctgggcaacagagtgagactctgtctcataaaacaaaacaaaacaaaacaaaacaaaataaaataaaataaaatataaagattatccctctctgaagctcaaggaggttaagtgtgtactcaagggcacacagcaggttagaggcagactcaagactagaatgtgggctttctgacaccttacaggctattcttttagaataaatcccatttctactttgttcatcttttttgtacatgccccacctacaccatacatgtataccttctctatatctttttgtatccctaatgctgtcacactatgatttgctttttcatgcagatgaccataacattttccattcacctatgctcactcagcaagtattcaatttttctacactgttcttttttttcctttttcataacactgtctcataggcattctgcaaatcctgtgagagtactttttgtgaaatgttaccactttcctcttattcagagaagctccgtattaaggcttcactgaggttgccttaaggcatgataatggttcaaaggcttgaaagacagttaaagagacctgtaagtgcacaaaagaaagttgagcaggagagaatttcctgcctggagcagagccaagctgctggaagaggcaatgggggcaaaggccaggcagacaagccaatgggctcctcccacagctgcagccaacaagttatgccagtcttaaaacttctaaagaaatatgtttttaacaagattgaggactggattatgaggctaggggaggctatcacaaactggaataaaataaagccagagaaaagtggctgcctcccaacctgcacaactgacctagctaggctgatggctgggccacctaggaaggctactgagcatcatataaaacagaagggacagcaggaatataacatggctctttgtaaggatgagtctgaaaaatgaccatttgctgcccaaatgcccttagctacaactgaaaatatttcagaactggaggttgcaggatgctggaatctcagagatcatccagctcagccctttatttttcagatgaggtccaaagcgggtaaaatgacttgtcaaggtcaaacagcaagtgaatggttttctttcaagtctcaattcatctttttgtttatatcatctatgtcttgttgttataagcttcaccccaggtagcaaaaaactattctactcaaaaggggtagacatatgttagttctcaagatcatctcttggtttcagagtttaactcaagtgattggcataggctgaatccatctcttaaaaggataatcaaatttatgttgaagacttggttgtcttcctactatgaaatgggaaacattatcactactcctcccctgtcaccaccaagtgtggccaccaccaccaacgttagtgagtgactgtggtgatatgatgaccaagtggccaggtcagcaagtggtgcagcctgtgtctcactggaagaggttaaagtctttctaaaacaaaataccatggcatcaaagtggcccagaactcccttctttgagctttccctgtgttagagcccttccttgggttgggagttaaacccatagtcttaccttcatctgtttagggccatcagcttcaaagaacaagtcatcctcattgccactgtaataaaaacagggacatgtctcaattatgtcttctaaacaggtttatttttccttccctgtgtacaagacttgactgttcataagaaactgcaaacagcctgcctctcaaagctgcctgaaacacctggcaagtttcacagtgatatgcgcagaacagtccagaaggcagattctaggcctggcaggtgggcacctgggtgctccctgttggatcttgaggcctaacctctagcccagcagagtcagctaaaatctgagctctccctctccctccaagccacactttgcaaagggattccttgtattgtgggcttggagtcttttctccccatttgcctctgcaggaagcccttgcaacaacacatctggatagcctccaggtcccaaggctggagggacttgtaatgggaaagtagtctttaaatcagatttacttggcaccctgtttgccactgaaagaggcaatttaggggaaaaatctggtctccaagcacagataaccctctactcttgaaagaggagacccgctcatgttactggtctcagcgtctccactgacctgtaataagccatcatttcactggcgagctcaggtacttctgccatggctgcttccagacacctgtgtaaaaaggagaaaatgagtgacttccccatgacggctacgttcatgtgtgatttctctcagcatccagtgcatggcagtcatgcaaagaaatgatctctgagtaaatgaatgaatgtgtgaaagagaagtcctttgggtctagagaaaagcatttgctaaaccaaaccccaactagcaatgtattggctaggagagctggagcagaggctttgacactaacctttagggtgtcagctgttagataagcagtatccattcccagaatatttcccgagtcataagcattatattacacctggcatttttgcaaaaagctgagagagggaggcagagagggaaggagagggagagacagagaaagaaagagagagagagagagaatatgcatacacacaaagaggcaagagacagagagactcccttagcacctagttgtaaggaagattaaagtcatacttgagcaatgaagattggctgaagagaatcccagagcagcctgttgtgccttgtgcctcgaagaggtttggtatctgccagtttctccctcgctgtttttatggctttcaaaagcagaagtaggaggctgagaaatttctctgttgaatacctgatttcacaatcaagttaaaggaaaggggaaaagagtattggtggaagcttcttaggggaggggactaataaactgagataattctctggttcatggaagggcaaggagtagcaaactatgacacattttgcaaatgtatcaccatgcaaatatgcattgttttcctgacaatcgttgtgcagttgatgtccacattaaaatactggattttcccacgttagaagaatgtttaaatttagtatatgtgggacaaagtggaagacacacagatttatacatgcacatacttttcttcattcacttctttgtacttaagtttaggaatcttcccacttacagatggataaatgggtacaatgaagggccaatagccctccctgtctgtattgagggtgtgggtctctaccttgggtgctgttctctgcctcaggagctctctgtcaattgcaggagcctctgaggagaaaattgacctttcttggctggggcagagaacatacggtatgcagggttcaggctcctgacggagttggggcaaccctggagataagctcacacaaccctgcaagaccaggtgctgttaccctagccaatctcatggatgaaccagatcaatgccagatgagctctgcctaaaatgattttttggtgaactctgaaaagtggaatattgtttctgtaagaatatccatctgagactctatctcttggtaataccaaccaagagttatcagtttctctttaaccgagacaccagcaaagtgcctgctccagggtactgcccaggggagccctccatttgtagaatgaatgagagtccaggttatgaacagtgcctggagtgtaggaacaccctcctttgcctctttgacaggtctgcatcataacactttttttttttttttgagacagagtctcactctgtcgcccaggctggagtgcagtggcacaatctcggccccctgcaagttccgcctcccgggttcacaccattctcctgcctcagcctccccagcagctgggactacaggcacctgccaccacgcccggctaattttttgtatttttagctagagacagggtttcaccatgttagccaggatggtctcgatctcctgaccttgtgatctgcccgcctcggcctcccaaagtgttgggattacaggcgtgagctcaccgtgtccagcctgtaacacttcttatagcactgagttgaaaccttgctcctcctggcttctctgcgcaggaaactcgaaatctttttgagccaagtctagcacagtgcctggcatgtacattcaggtggtagagtttgctgcttgaatgggtgaatgggaatttgacagcatttttattcaaattagtatgtgccaggtatcgtgctcgctctgcattatccaagggagtgagcctctgtgcaagtatttgagacacgagggaaataggttctactgtgggaaaaagagcatttcatggacttgctctccaagcagccttctgatttttaatttggctcccagtatcttgatatcaggagtcagtcacaagaactccatctttagtaagttatattttccacaggaaatctaaaagctgttcaacatgttagtttcctgtgaatttgataagccataatccattcctaacactgagccctcctgaaatttggtgtctggtcctgcagatagctaaaagccctgtctgggtggcctaggggactcctctgttttgcctccacaggatccactttgcaaattaaccactggttctcccgttgtaggaactgccaccttcctcagagcctgtctttcttccttccttccttccttcctctttctttttctttctctctctctttctttcttttcttttctttctttctttctttctttctttctttctttctttctttcttcctttctttctctttctctctttctctctttctctttctttctttctttctctctccctccctccctctctctctttctttctttttctttcttttctcttttctttctctctttctttctccctccctctctctctttttctttgtctctccctcccttctctctctctttctctttctctctctctctctcctagacaggatctacctttatcccccaggctggagtgcagtggtacaatcatgcattcattgcatgatcacagcagcctcaaacccttcctcagagtctttatgcggcaaccagcagggtctggagggttggtggctctgtgaactctcctgacagaacacagagatgtctttggtctgttgatgtgattacaagctgaacgaaggaggatcaaagccagtgacaggaagggagatatgcaagggacccgagcatcagctctgagttagtccattctgcttctgggacttgggatacaggtcagaaaccttgagcttctacttctccatcttccaattgtagcatccaggacctcagaatctgccagctaagaggagccctaatgattgtctggtgggatatggtgggaccacagagatgaagacatgaatagctatttgaatgtgaacagcagacgaagaaatcaaggctaggagggtggaagtgactcatccaatagcacagtgtggttgaagcagcactagtatccaggttgcatgagcccctgatgctttcgctcgagggaaattttggagccatggggcaatgccccctgacgtaacagtctccacagttctgccatgtctcatcctggccctgtaacctggacccaaatctgctaccatcccatccatctcaggaagtgaaacctcttatgtcaaataggttgtgcaacgtatgtatcagatcctgtcttcccaaggagaccgctcaggccacagcacttccttccgatccccaatgagcagaaaatatctcgctataaacatagttggcactaagggagggagtggaagagtgatgatgatgtagatggtgatgtagccccaaggaagtggaacaagcagagatggggagctggaaatgccaggatgctccagcttttggggaattattcagctcttgagtcactaaagcctttctcagctgcaagttcctctttaccctgtcaggtcattcttccaagacaggagactgacatttattcaaagcagcaagtgccctgataccatcttgtgtctaatcatgggcttcgcagccagttatcaaggttgatctcatctcattggtcttcaatcattttgaacaagaagacaagcaaaataatcatgggttagttcttatattattgtgtgtacatgcagtgatgtctgttctttgtagtgagctgttccttccttgttcaccctcttgcttagaacagaactaagcaatctgcccccaacattttccccaatttcccatctcattcttggcactggcttcctaatatttgttcttatgagtcattttcttgtatcatttccatgagtccctctgggatcttaaagtatgaaaaatgttgtgtgtacccacacctgtctttgtggatatttctctcctttcccttctgcttctgggattatttgggaatgggcactatgatttttatcatatcgcttccacttcctttatggcatcatctccaatgggcttcttctccctcttggatccaggttctcagattggggacatgcagagtccaagggacattccattctcctccctggtctagaacaaggagggcttagatatatgagcaggtggctggggctggcgagctatgtagtctccaatggcttttccctgatgtcggagttgttatgtcagttctgggagaccaataagaccttgtccttcctttggatccatcagaaaaagcccctgggtgggtaagatggatggcagggctctcctactctatgtcttttctcacacctagtgggtataagagaggggaccacaaacagagggggctctggtaccacttatccagggtctggaaacattttctgtaaagggccagataataaatgtttcaggtacaactactcaaccttgcatcatttcagaaaagcagtcagataatacataaatgaatgggtgtggctggacttgtctgcggtcccctgtcttatatcattgtattatatcattttttcttacatacaaatttagaagcaatacttaaaaaaaaaaagccgtcctttattgagcacctactaagtgccaggtacctttttttccctcattatcttattaactcttcataataacctttaaagtagataatattgaaccatttgacctatgcagaaactgaggttgagacaataaattatttaagaccgcacaaacagtaaatgctggaactacgactcaaatatgggttaactgaaccaaaaccagatctttatttctcacttttaattgttacatatgtttattgcctcatctcctgtccacatggtgcccatcggcagactcctttctcattctcagtgattgagtgacattctaaactacattggcctggcagattcacctctgtcccctaaatgtttccacattgtccttttaggattgagatcctctctgttcccttgtcttccctcctttcttcttctggcggtgacgtgctgtgtgaatttgtttctttctcctctcagggtagtactgggactttccaaatcagggtttttagtgatctctcttcccttttctgagtttcttccttattcccattcactttctcatctataagtggcagctttgttgctggaggatttcctttgtccttttattcttctttaagactttgtcataactgtcaaaagcaatcccttgaaggtatctgtccttggaattgtgtgcttatgatgctgaaaaatacttctcttctaaaagctatgataaaatgcttctctcccaaaatgtctgtcgttgctgtattctactctctggttattacacaatcaaagatgatttggtcatttccttccaggactttgttaatttcacttcttcagctgcttcccccttgttggctggaactgagttttctatcttctgggagaagtcctcagcaaggccactcaggatctgttgggtgcattttgtcaagtctaggacccaggctctgggtgactgatttcctctaattaccgagcaatgtaaaatgaggaagtctgattgtgtaaaggtgttaaacttttgtgtgacggcaaaactttaataccatgaatagagattccagaattttccaacttctaacgggattcctttcactccctgacattagaatgttagaaaatctaccacaaaacatctgtgaggctatcctacaaggcccgtttttcaaaataggtttttacaaggattgctatttgggatgatagtttcagaaaggcgctatcaaagttaattgatgatgtgtgcaagctgaaagttatatgttagaactagcagtgatttcaaaaatatcccttttaggctttttgctaatatatctgctcattttcaaagttccaaatattataaaagtatttaaagcaaaaagaagaagccctccatttctgctggcccacttccctgtctcaactagaaagtattttcccaggcaatgctatcccaggactcacactccatccatccatcacctaccataagttctttgaagggctcattctgagcgcttcctgagtgcctgggatctgttatttctctccatttctgctgctgcatggtagtccaagtcctcctcccttttcccctaggccatttgaatcatctgctaattggttttcctgattgccacggaaacttcctccatcccttcctcacatatcagccacagaagtatctccaaaaagcaaatctggtgacatgaagcccttgcacaaaacccattcattactggttccacatctcctttgtggataagttcaagctcctgagtgtggcaagcagggcccacctggaatcccctgccctcctctcctatcccacgcatcaacctttcctgtctatttgcagttccttgaatgtgatattctttctagtctctgtgcttttgcataacctgttcttcctgactggaaactccttctcctccttgtagtttggctaatttctagtctttcaagactcagctcatgcttcaccccctctataacaagtcctttcccaagctgggtggtggatgctcctctgtgctgtgtgagtcttgaacatcctcagcaaacctcagctttgtttgcttgtctcccttgctgtcaatgcacctgattcagggctggcatatactgttcacctccatgactggctcatggtggtgctccgtgaatatcatccacccaaacggatgagagctaccatgccatcacttgtgacttccatctggagctaacctcccccgacaggaaagcgtttccttaggaaagaatatctttgggttaaatagaagtagagactcaccagaagcactatgtccagctcagaatgaactgctcagtaagcagccttgtcaatgaggaggcagcaggccagccccagaggcctcaaagtgggagagtagagaagcgcagttcctgccacaaaggcacagtggacaccttgctcccctggctggctggaagcagatggtgtccacctgcttccatgggaattctgcacctttaataaagttttatgggacaggaaggtgactggcattgacattgtaacgaggaatgggtggtgccacctttgctgtgtcttaccagaaatacctgtggcaggtaaatttctagagagaccctcccatttctcccatatagcaattttgaaatgtttcctgagggctttccaaattcatctgggaacataggagttccagaaagatgaaatcaaaggtgatggtatgccaaagaaagtagcttttagaatgacttacattagccattcatccattcagcacaccaggcattcagtttgaggggtgtgtgtgtgtgtgtgtgtgcgcgccgtgcgtgtacataggggaagggaaacaaaagtacacaagacatgatagttgtcctcaaggaggttttgcaaatgttcacaatttaagagaatatgctgtgctgtggctggtgtataaaccaactgctagggagaggccttccacacacacttggggcaaatgcgacctctaggactgccagtggaatctgggcatgctgtttgtggtcgataaaccctggtcccttgatcagggacctatgtttacttttcctctccctggaagtcttcattagtgggcatccagaaggtcttgcacagggcagagggaggcacaaagacaagagtttgaaaccagcctggacaacaaaatgagtttctatctttacaaaaaaaatttttaaaaaattagccaggtaggattgcatgtgcctgtagtcccagctattcaggaagctgaggcaggaggattccctgagaccaggaattttgaggctgcagtgagctattaagttggcgcaaaagtaatcgtggtttttatcattaaaagtaatggcaaaacttttaatgacaaaaaccgtgattacttttgcaccaatctaatatgattgcacgactgcactgtgctccagcctgggcaacagagtgggaccctgtcacaaaataataaataaataaaatgtaaacatgtaaaaaaaaccccaaaaacaaaaaaaatgggtgttgagacccctgaattgaggaataataggaaggagtgtgattctgtgtgtgcatgcatgggtgtgcaccctcagtgcctgggtggcttaccctgggctagttcaggtggcaaatggttttcctccagctgggctaccaccatcttcccccagggcctgtccatgtatttggtggcaagatacctatggactagagtccctcctcagaggaaaggctcctcccatttctctggctttcaggtagtagtccatgacttcaacaggtccccactgcaatgttatgggttagtttaggtggggtctcctctgagagcctcccatagcccaaaaggccctgtcctagctggcactgcatctccctcttcccagctctcagcctttctctttgctcatcccactccgcacaggctttctgcctgatccttggatgtgtcaatcctgcccctaagggatacaaggcaatttgtccttttattattaagatctctcctgaggccacgtgtggtggctcacacctgtagtcctagaactttggtaggccaaggtaggagaattgcttgagctcaggagttccaggctgtagtgaaccatgattgcaccattgcattccagcctgtgtgacacagcgagaccctgtcttttttctttttttttttgagacagggtctcgctctgtcatccaggctagagtgcagcggtgtttttctgctcactgcagcctcaacctgcacattttttgtagagacggtgtcttgctatgttgcccagagtggcctcaaactcctgggctcaagagatctttccacctcagccttccaaagtgctgggactacaggcgtgagtaccgcgcccaacaaagaccctgtcttaaaaagaaaacaaaaataaacaactccctcaagtcttttttttttttttgagacggagtctcgctctgtcgcccaggctggagggcagtggcgcaatcttggctcactgcaagctctgcctcccgggttcacgccattctcttgcctcagcctcccgagtagctgggactacaggtgcccgccaccacgcctggctaatattttgtagttttagtagagatggggtttcactgcgttagccaggatggtcttgatctcctcaccttgtgatccgcccgcctcggcctcccaaagtgctgggattacaggcatgagccaccgcgcccagccagacctcttgagtcttaaactcctctgtagttccagccaccctttagcacatgactctgttaattttgttctcactgtctgaaatcatctcctgtccactcttgactgacaggtctctgcactagcccactgcttaatcagagtaggtccctgtcaacttattcatattgtgtccccatgccagtgtggatgattaaaattgttgagtggaggctgatcagatgagccatctccttccaagtcctcacttgctggctcctgtcttagttttagtccccattcttcaaagaacgtgagccctggaaagtattttagtcatttagttcagtgcctttggatgggaggatcacatccctgggtcccgtcctgcagactgttttgctctagctgactaggcaggattccctgccttctctcacttctgcatgggacttccttctgaaattgctgctcagtcaagagaatgaccttccccaacataatcctactccacagggacttaaaggtgtgtcagagatctcttgctcatctttctggccaggtgccaacgtcagtttatagccaagggacaagactagttagcagatcaggcaggtcttagaccccagcgtaagtgccagacttctagctgcagttgttcctgcccacactgggcgttcaggtggagagagggcatggcactacactgagctctcggcgaaacccaggactctgaaatctcggtgtcagccccaggccactctcttcagcagaacttcagtcagtcctgtcactaggagatgggaccctgcctgattgcattcttacaaatggctacattgacaaggggactagacttgactgagtggagattgggggaaaaggaaataagccctcagtgctttctctgagcacatcacccttgctggcttagcatctattgtttgtcagaagacttagctattatcttggcaaatattctctgcttgaccaaattttagtcaggctcctgaaccttctcccaggcacatttgtacactttcttgtaaactccttttttagcaagaaccttctatgttcaatatctgatcacccttgaaatctcactgattccccatcctccaccatccccaaagtggtgtccaatcaccctgtcctgtcttcagcaaggatccggttaggtgggtttaggcagaagctcccttatttttcatgtttcctcttagtaatttcgcatccactgatctttgctctgcttcctggctatgaatatgtccttgcccgtgctgtatatgtagttgtgttcaatctctctcccccaccgcaaagtcccattgcagtgtttcctatatcttctgtgctggttctgaatgaaatcttccttaccatgaatttaaaaatatcattgaatttttttttttttttgagacaaagtcttgctctgttgcccaggctggggtgcagtggcttgaacttggctcactgcaacttcctcctcccgggttcaagcgattctcctgcctcagcctcccgtgtagctgggattacaggtgcccaccaccacacctggctaattttttttgtatttttagtagagatggggtttcaccatgttggccaggctggtctcgaactcctgacctcaggtgatccacctgcctcagcctcccaaagtgctgggattataggcatgagccgccgtgcctggccaaataattttttctttgacaacattgtcctgtagataactggatttcaaggaattaacctttgtgaaatctagcatgttctttgacttccttcttctaaaggttgattttataggaggcaatattttaaagtatcaaggccacctgggaattcatttcaagctcactttgtgccagggaagggaaattttactgaaaatttcttttaagttctagccagaaaaaaagcaatcttaagaataaggaaatagacccatcattttaaaacccagaaaagaacctttcaacatagcattccccaggtaccaagcctccctgattagtaggaggttgctttgattgtgactggtcaggaacatacctggccctcctcaccagtgtgtaagttcctggagagctgtgacacaatcgcccacatccactcctcctgtgccaacttacctatagtatgcacttcacaaatgggctggtggattgcagggggcactcagtggataagccagaaaaaacaaagaggggtttatatgtagctttgccctctcagctatgtccccagaactcaacttcctggctggatgtcctcatgttcaaaatgtggacatcaagacctacctctcagagttattataaagataaacaaagtcacacatgggaaatcacctaacagagatggacgtggttgacaagcaggaaagattcgtttgccctcctccctcctccttcctttccttcctaatgaggatagccttgtcttcattgctgccatcgaatctctgatgtcagtggtcacccaacagggatcagtggtcacaggtgggcatgtgtgttaagactgcaaagtgttccctggtaacgtttactcataaagcagtcagctggcctgagctgcagtagggatggggaatgctgctccagcatgcatctctgtccctaggtctcatccgttccctgaggcctttgtccgaatggagacctgcattgggctcaccacaggctcatactcaggctcaggatcagggacgtcttgagttttccagcatccttaacaatttagcagcacacattctcaaaggtttgatacctttcatataatatttttagtactgctaggaagacacagatgaattaaatatgggtacttctcttctgggaacttattatcttgagtacaaggaattaagagtaggaggtgagaagaggcactccctttggccacccccatggtctggtgactcttggaatcatgttcacagatgtccgcctcttggatgacagcctccagccttcctgctttctcaccctctctcttctcaaagcaccagtgatttgtccttttcagaatcgcgaacccatagatatcccctctctctatcggccctttctgcttttccgtcctttttgatccagcttaatttctgtgccccatctcttcaaccattttcttgctggtctcttcagcacccttcccatttttattccattacactcaccagacaaaacttcaggctgggttgtatcgctagtctgcttcctctgtatctccactggggctgctagaggaggttgggaaatgagtttactcagcctcacaggtggttgctaccattggcacaggaccaccaccccccactgggctctcacactgcccactagtcctacaaagctttcctagtcagctgcccacagtgatgtagaaggaaaataaatcttggggcctccaaatcactaagctaaagggaaaagtcaagctgggaactgcttagggcaaacctgcctcccattctattcaaagtcacccctctgctcactgtgataaatgcatatctgattgcctcctttggaaaggctaatcagacactcagaagaatgcaattgtttgtctctcacctacctgtgacctggaagctccctccctgcttcaagttgttctgcctttctggagggaaccagtgtacatcttacatatattcactgatgtctcatgtctccctaaaatgtgtaaaaccaagctgtgctcagaccaccctgagcacatgtggtcaggacctcctgatgctctgtcatgggtgggtgtcctcaaccgtggcaaaataaactttctaaattaactgagacctgtctcagatttccaaggttcacatgttggtaaccacgaagggattctgagtggagatgcctcttacctttgacaaatctcctactggtgtttggtaccagcatgagctaactttatggctcaaaccaacaggacaatttgctgaggtctgaaagcatctccttcagagaattcctgatctcccaaaatttggtcaaaatcaaaagtttattttgctgtacaactccctgtttttttctttgtttgttttgagttttacttgcttccaacaaggaaggcaagatttcctgcttccctgatgatggaaggcaggtaactcctttaaggagtttgagctcactccccgcaggtaagagaggagaccacccctcatattgtcttatgcccaatttctgcctccaaagaaagaagtaataactaaaaggcagaaatgaaatccacaagcagacagcccggtgacacaccctgggcctggtaaagatcgacccctgatctaatcggttatttgcataagaaaagcactgtgaagatccctgtcatgttctgttccattctaactacaggtgcatgcagcccccagtcacataccccctgcttgctcaatctatcacgactctctcatgtggaccgccttagagttgtgagcccttaaaagggacaggaattgcacactcggggagctcggttgttggagacgtgagtcttgccgcagctccaggcccaataaagcccttccttctttaatttggtgtctgagggattttgtctgcggcttgtcctgctacacaggtaagacgagttcaagttttatttcttgcttctagaacggtagtgagcggtcttcagcctgagacccaaccctaggtaagtagctgaattggggttttgtcttggctaaagtttaacaaccagctggtcttaatttctccttaccattagagcactcagtaatcatataagttgtgtgatcattcattttgcttaactgtttgtttctgtttttattgctgtttcagtctttttcccattgggtttgacctactctatctgacttgatcaaatccaaaggaaatttccaaattatggggaatgaggcctctgaagtggctaaattcccaccctcccacacacacaaacgtggtatggtgggggaaaaaacggccagcaaaagaaaaaaaaaaaaggaaaagatgtttcattttgaccaccaaacgggctttatttacataacaaggccacctttttgctagccaggccatactgaaagagcaatggctgttgccccatgctgtgggttccatagctaaggttctgccttttttcctaccacgacagcctgggtttggttcctaaatcaagccttttctggtttgatacttggtaatgctgaaatagcagcaatttgtcctagctgaaatatcgtaataagattttaaaagatttattttaaaggacctcaatagttaaaagtcagcttaattaaaagctaacatccaagatgtgtgcatgtgtatgtatgcgtctttgtatttaaatagccctcatgttttttttttctttcctaggaacttgcctttttttgagcaaaagtttttttcttctctgttgactggattctgttttcttcatttacttctgctgtctctcctttctcttgcaccgtctgctgcatgagagccctaaaatagtttataatagcctggggttccttaaagaaaatggagaaggtgccaggctcccttttagggagaaacttctatttttccttatggaatccctagagtgtaaacagacaagttcatttcagctcttaaactgcttgcgtttgtgttgtgttacctgatttttttgactattatatttttgactagctattgcaacagaagctactcttgggttttcaaggaagattgtagtttagacatgtagaaatgtcttttaaaaaaaaaacaaacttttttttaagtgcactgtaaaagcatcatatggtctagcctcctaataattttccctttttggagaccaggattcagggtgggctctgcccagagctcagagatccagttaaaagagaggtagtctcggccgggcgtagaggccagcctgtaatcccagcactttgggaggccgaggcgggcggatcacgaggtcaggagatcgagaccatcctggccaacatggtgaaaccccgtctctactaaaaatacaaaaattagctgggtgtggtggcaggtgcctgtagtcccagccactcgggaggctgaggaaagaggagaatcgtttgaacccgggaggtggagcttgcagtgagacgagatggcgccactgcactccagcctggcgacacgtgagactccgtctcaaaaaaaaaaaagataggtagactcgatgttgtcgtacccgagcaagttagagcaacgccacactttgagacgaatttaagagtcctttatcagccggcgaccaagagacggctaacgctcgaaattctctcggccccttggaaggggcttgattttcctttatgctttggtttaggaaggggaggggagctcagttgcaacaattctacaggagtaaaaacatgcaaagaaattaaaaagacaagtggttacagggaaacaaacagttccaggtgcaggggctctaaatctatcataagatgttaggtatgggggctctgccggacacaaactcaaggctttatgctgttatctcttgagcgaaatcctgggaacttcgtacattgcttgcttcagtaccttatcagttaattggactctttgatatgttgggagtcagcgtacacaagttaactccttgaggaagggggtgggtaaggagtccttgatgtctggtaaatgaaggagcgaaatcgagttcctctggctttctcagctaagggagagcttattcatgtggaaacaaggctaggtgattaagggagaaagggagagtctgaaaacaaggttaggtattacaatgtcaataaaattggtctccttatacagtactatggtagatttctttccatctttaatctccctctagcaccaccagactttttctctctgtaccttgagatgtaaattttgctatctgaattttcgtctaagagttgtttcctttaatatgcaaatttagggttatttagctgacaactgccaaagtagtgaaacaagttatcaagaacttgaacgtctaaggtaggaaaaaaaaaagtctttatgaatctataagatgtatttctattggcatgcctaatacgtctatgtatttacgtgttgtgtacacagtttttcactactgaaaatatatagaggagttctaattaattgacttaagacaataaaagcgcttgaatcaaataccttatcaggaaaaaggaaaagacaagtcaaatgcttgttcaagtttatataacttaagtaaaatctttaataaataagctagctttaacattatttgaaatgtcttaagaattgccagcaggttctgggttacagaactagtgggggtgcagtggggtgagggttggtggggtggggggtggtacgggggcttcgttttttcttgctgcccccttctgggttggggaagtggcaggaccttggcagcaccccgagccggcatggcgctaataatggagggatgccagacccaagtggctaaggcccggctgcagagccaagttggcatttccagactggggctcgggccgcaccctctccaggaccctccccttgtaccgagcagattgtcgcgggcagtttgggccagctgtcctggcgtggaatttcccaaattcaacaaatcctccaagaaatcaatccatccattcatccatccatccatccatccatccatccatccatccatccgtggcagattatgaagcatggatcattacttttgggatgtggatatattcagttaacaaggagcagctttcaagagctggattttatgctttaggtgaaggtgataaagtaaagtgctttcactgtggaggggggctaactgattggaagcccagcgaagacccttgggaacaacatgataaatggcatccagggtgtaaatatctgttagaacagaagacacgaaaatatataaacaatattcatttatcccattcacttgaggagtgtctggtaagaactgctgaaaaaacgccatcactaactagaaaaattgataccatcttccataatcctatggtacaagaagctatatgaatggggttcagtttcaaagacattaagaaaataatggaggaaaaaattcagacatctgggagcaactgtaaatcacttgaggttctgattgcagatccagtgaaggctcagaaagacagtacacaagacgaatcaagtcagacttcattgcagaaagagattagtactgaagagcagctaagacacctgcaagaggagaagctttgcaaaatctgtatggatagaaatattgctgtcgtttttattccttgtggacatccagtcactcgtaaacaatgtgctgaagtggttgacaaatgtctcaagtggtacgcagtcattactttcaagcaaaaaaattttatgtcttaatctaacgctatagtaggcatattatgttcgtattatcctgattgaatgtgtgatgtgaactgactttaagtaatcaggattgaattccattagcatttgctaccaagtaggaaaaaaaaatgtaaatggcagtgttttagttggcaatataatctttgaatttctggatttttcagttattagctgtcttatttatccaattttttttactgttatttaattgaaaccctagactaagaagcatcatattataactgatcacaatgtgtattcatagtatattgacttaatttctaagtgtaagtgaattaatcatctgaattttttattttcagataggcttaacaaatagaacattctgtatataaatgtgtagattagagttaatctttccaatcacataattcgttttatgtgaaaaaggaatgaactgttccatgctggtggaaagatagagattatttttagaggtttgtcgttgtgttttgggattctgttttcttttaaaattgtaaatatgtacttgtgtgaatgattttttaaaatgattttaccatttttggaagggtatttaatgatagaatatcatcgagccaacatgcactgacatagaaagatgtcaaagatatattaagtgtaaaatgcaagagggaaaacactatgtacagtctgagccaaatcaaagcatgtatgttttttatatgtgtacaacaaaaggtttggaaagatatgcaccaaattgttaaatgtggtttcacttgagggggtgggaggatgggccccagaggggtttttataggggcctttcacttggtatttttttcattttgtctctgtttgaaattttgttttttctttttaaatggagtttcactcttgtcgcctaggctgcaatgtagtggcgtgaactcagctcactgcaacctccgcctcccaggttcaagtgattctcctgcctcagcctcccatgcctcctgtgtagctgggattacaggcacccatcaccatgcctggctaatttttgtattttcagtagagatggggtttcaccatgttggccaggctggtctgtaattcctgacctcaagtgatccacccaccttggcctcccaaagtgctgggatttcaggtgtgagccaccacgcccagccctgtttaaattttttataagtatgtactacttttgtaatcagaattattagaaagcattttactgatttaaaagcttagacatgttcaaatgcctgcaaaactacttaacactcagctttagtttttctaatccaaaaaggccgggcagttaatctttttggtgccaatgtgaaatttaaacggttttatgtttttcctgtgttgtgaatgaaaaatatttctgagtggtggttttttgacaggtagaccatgtcttgtcttgtttcaaaataagtatttctgattttgtaaaatgaaatatacaatatgtcacagatcttccaattaagtagtaagggtttatccttaatccttgctaatttaagcttgcataagtcactttactaaaagatctttgttaagctagtattttaaacatctgtcagcttatgtaggtaaaagtagaagcatgtttgtacactgttgtagttatagtgacagctttccatgttgaggttctcatatcaccttgtatcttgaagtttcatgtgagtttttaccattaggatgattaagatgtatataggacaaaatattaagtctttcctttacctaagtttgctttcttgactagtaatagtagtagatatttctgtaataaatgttctctcaagatccttaaaatctcttggaaattataaaaatattggaaagagaagaacagtttttaaaatatatatatatatatatattttttttgagatggagtcttgctctgtcgtccaggctggagtgcagtggcgcaaacttggttcaccacaacctctgcctcccgggttcaagcgattcttctgcctcagcctcctgagtagctgggactacaggcgcccgccaccacgcccagctaatttttgtatttttagtagagacgaggttttactatgttggctaggctggtctcaaactcctgaccttgtgatctgcccgccttggcctcccaaagtgctgggattacaggtgtgagccactgcacctggccagttttttaaatatatttttaaaaacacttgaataagagtcagtgtaaactagaagtttaaaaatgcttcacagaacacccagggtttacattacaagattctcacaacaaacctattgtaaaggtgagtaaggcatgttattacagagaaaagtttgggagcaaaactgtaaaaaattatatttttgttgtattttctaagagaaagagtattgttatgttctcctaacctctgttgattactactttaagtgatgttcatttaaaacattgcaaatttaaataagagttttaaaaattaagtaatgactgccctgaaacaaaatcattcccagcatacatttttgtttggatttatcaatcaagcaattttatacttatccctgtcaaatactataaggtgtcaaaatttggcataggggttacaaaactataaacccagccaaaacagaataatctttgctttttcaatctttgattaaaaagacattactattggtttaatgaaaatagctacatcttgcattatttagtaaaattaccataacttctaactttgtggctttaggcagtctagtccacaggcaggaaggaggtttgttttggaaaatgactgttatcatcttttgtttcaaagctaaactataaactaagttcctcccaaagttaattcagcctatgcccaggaatgaacaaggacagcttggacgttagaagcaaaatggagtcagctaggtcagatctttttcactgtctcagtgatggcagtttcataactttaaatgatggctatcacagttttcataaataatctagataaacagttaaaataaaataattaggtaaatgtaatgggataaatatttgtagacaaactcaccataatttagaatctaaagttaaattaaataataagtatttcattatttgggtattttccaagaaaaacatattgtaggaaaccattctttctaaaaaaaaaagtgtccttttaaaaaggtgaataatttttgtctaattcaaagtttattgaaaagttatgtataaaacaaggtaaaaggaacaaggaaataagggaaatgtaaagaaaattatagaaataaagtggtattttttggtaagaaagcttaaagagaaataattttaggtaagaaagaatcttacctaaaattttgtgctagaataaagtgactggctaagaaagggatgttcaaagctatttatgacaaacccacagccaatatcatactgaatgggcaaaagctggaaacattccctttgagaactggcacaagacaaggatgtcctctctcaccactcctattcaacatagtatcggaagttctggccagggcaatcaagcaagagaaagaaataaagggtattcaaataggaagagaggaagtcaaattttctccgtttgcagatgcatgattgcatatttagaaaaccccatcatttcagccccaaaactccttaagctgataagagacttcagcaaagtctcaggatacaaaatcaatgtgcaaaaatcacaggcattcctatacaccaataatagactaacagagagccaaatcatgagtgaactcccattcacaattgctacaaagagaataaaatacctgggaatacaacttacaatggacatgaaagaccttttcagggtgaactgcaaaccactgctcaaggaaataagagaggaaacaaacaaatggaaaaacattccatgcttatggataggaagaatcaatatcgtgaaaatggccatactgcccaagtaatttatagattcaatgctatccccatcaagctaccattgactttcttcacagaattagaaaaaactaatagccaagacaatcctaagcaaaaagaacaaagctggaggcattgtgctacctgacttcaaactatactacaaggctgcagtaaccaaaacagcatggtactggtaccaaaacagatatatagaccaaaagaacagaacagaggcctcagatataacaccacacatctacaaccatctgatctttgacaaacctaacaaaaataagcaatggggaaaataattccctatttaataaatgatgttgggaaaactggttagccatatgctgaaaactgaaactggaccccttccttacaacttatacaaaaatcaactcaagatggattaaagatttaaacatggctgggcatggtggctcacgcctgtaatcccagcactttgggaggccgagatgggtggatcatgaggtcaggagatggagaccatcctgactaacacagtgaaaccctgtctctactaaaaaatacaaaaaattagctgggcatggtggtgggcgcctgtagtcccagctacttgggaggctgaggcaggagaatggtgtgaaaccaggaggtggagcttgcagggagtggagatcacgccactgcactccagcctgggcaacagagtaagactccatctcaaaaaaaaaaaaaaaaaaaaaaagaaggatttaaacataagacctaaaaccataaaaaccatagaagaaaacctaggcaataccattcaggacataggcatgagcaaagacttcatgattagaacaccaaaagcaattgcaacaaaagccaattgacaaatgggatctaattaaactgaagagcttctgcacagcaaaagaaactattgtcagagtgaacaggcaacctacagaataggagaaaattttttcaatctatccatctgacaaagggctaatatccagaatctacaaggaatttaaacaaatttgcaagaaaaaaaaacccatcaaaaagtgggcaaaagatatgaacagacacatctcagaagaagacatttatgtggccaacaaacatgaaaaaaagctcatcatcactggtcattagagaaatgcaaattgaaaccacaatgagataccatctcatgccagttagaatggcgattattaaaaagtcaggaaacaacagatgctggagaggatgtggagagaataggaatgctttgtacactgttggtgggagtgtcagttagttcaaccattgtggaagacagtgtggcaattcctcaaggatctggaaccagaaataccatttgacccagcaatcccattactgggtatatacctaaaggattagaaatcattctattgtaaagacacatgcacatgtatgtttattgcagcactattcacaatagcaaagacttggaaccaaccctaatgcccaccaatgatagactgggtaaaaaaatgtggcacgtatacaccatggaatactatgcagccataaaaaagaatgagttcatgtcttttgcagggacatggatgaagctggaagccatcattctcagcaaactaacacaggaacagaaaaccaaacactgcatgttctcactcataagtgggagttgaacaatgagaacacatggacacagggaggggaatgtcacacaccagggcctgtcaggaggtggggggcaaggggagggataacattaggaaaaatacctaatatagatgacgggttaatgggtgcagcaaaccaccatggcacatgtacacctacgtaataaacctccaatgttctttaacattgtattcccaaaaacgtaaagggaaaactcttaaaaaaaaacggaagaaggaaaaggaaaggaaaaagggacttgagttttcaagcccggaaccaaaaccccagaaaaggttcacccaggccctgggtcattggaaataacgttctgggggtaacagttgtctataattaaagggaaattataatggtctttctagagattgggttgatgttaaaaaactacttatatattaaaaaattggttagaacaatgaaattttcttacggggttgattcactcttaataaattataagagacttaagaatttttttttaacccaaagttcagcttttattgcatcttgctgtgtttagggttttctctcccctttaaaagggtgggaaatagtaatgccctccttcaactcccttcagctcatatacgttttttaccctcagattctgtttgttgtgtcctgatgctaacaatgttttcttaaaggtctaaaggaaatgttttcttccaacataatattctgtgcattgcagaaggtcttttcttttgccttttggtaactggcttaacagattttatgttttattgaaataatttctatgccattattattaagttttggtttgcttagaaaacactgagattaatacaattttttaaaaattatgattattacatccatatatctttatgtatgtgcttttaaagtccttgtgacattgagttatagggcttgactcctgggtcttaaaaggacaagtcctgctaaatcttaaatactgacagcaattaaaggctcatcttcaggactggtagaaaatgccaatcaaaataaactgcattcttgaaacacagagccagaaattaaagctattcaactcaaggcccaggaactatagtggaagaggtgggtgtgtgagattgtaagggccaattttgagagataaaataagttcaatttctctataaattaatcataatcattgatgtccaagccacactgatgcaagatcagcatatgggtcctgtgtcagattaacaaggttttcttgaagcattaacctactccttaataaaggttatagaggttataaaaggcttctggaagttatagctatggtcaagataaaaatttcatagattgttaatacaattttggaaaacaaatttaattggcttcttgctgtttttattagggcttattgtttggaaaattaagtctcgtctctcaaagaatgaaggctttcaccttttttttttttttttttaatccttgagttatcactttggtcaaatgaatgacttattttacaatgacctttcatcaagtgttttaaacctttcaaatttgacaaactttccaaaatcaaactacaaattatgtctttttatgacctaatgaatcctttaagatactaggttccctaaagtccaaaaaaaaaaaaaaagtaacataatgtggcttatttggtataaaaattttacaggaagcattgtcaaatatgaaatagtgtttggttttgtttgggctgtatttgtataaatatgttattggtatgtgttccaaaattataggaaactcctataattctgatatgacttggtgtacattatcagtaataattataattgttatggtaaattattgtgtgccatggaggtaacaaatttcctcatcaagtgtgtctttgactatggttgccctaaaactttttgccattcacagacaattgtcttgctttggtcctctttagaaggtggttttataatcagctataaaactctaacgggtgctcttgaatgcaggcttaagatagctttggagactgtgacatcagaatagaggaaaaactttcagtattcatggagtgctgaaatattcatgaatatcaagcaaaacaggaattaacttcatagatggaactaaaagaatgctgaagtaatctttttgactttttttcttaaaatgttgatccttcgttttgtttttcagagtcaaggaaatttttctgttgagatattgacagcttttaacaattaagtatactccagtgaacacaatttggagcatatttgtttctctctatatatatttggaaacaatttttgagtattcttaacttatggcaatatatttacataagtacaataagaatctattttcatttgtaacagaacacagttggacaaactgtttattttaccaaggctttgactgcaatgctgtctttactttaaggaatcaaacttgacttatggagccaataaaagccccttagaaaactggcctaatatcttgtctacccagtccccgtacagggttcctgacctgtggtaattaaagaatgtcactctgacaggcccaggagcccaaagtttatcttggaatctcaagaggagaggaattcacccaactcataggtattttgatggtacaaatccatggctgggctcagctttacaaaagtcttatttgagattccttctatggaacaaagttacatcaaagccaatttaaaagtccgtcaaaaactagttattcttgctgcactgtatacaaataaacagctcaagtataataaagcaaatcagtcctaccatgatttgtctagtaaaaatgggaaactggagagagaaaaattgtttcataaaactatagtacacttgttggtagattctagtcttgcttaatgtttttcaatttttattattttctacagtttggactgaattctaatttttcttggctataggtctttaaaataatgttttcaattttttttcttcttttccaccccaagttttcctaattgagagtcactgaaaactaagctatgcttttgtaaagccctccaaactgaagctagacaacttaaacttcagaagaaaacaacagcaacctatttacatacataagccactttcgtatgtgcctactgatgtatagacttcagaggaatgtggcctatatcaattttacagattgttcttttgtttattgttgttttcctcccttcctccccctattttctcttcacaggacatgaaacttcacaacctgctaaaaatgaactttcctaataactcagaacctacctgtctaggaataaaccatcctagccttgagcaatcagatgaaacctgggaccagagactcattttcttctaaaatgctttctctaaaagatttttaaaaagaaaaggggggaaatgtgaaaggaaaataaatcttggggcctccaaatcacaaagctaaaggaaaaagtcaagctgggaacttcttagggcaaacctgcctgtctttctattcaaagtcatccctctgctcactgagataattgcacatctgattgcctcctttggaaaggataatcagaaactcaaagaatgcaactgtttgtctctcacctacctgtgacatggaagccccctccctgcttcaagttgtcctgcctttctaggcagaaccagtgtacatcttacatatattgattgatgacttacgtctccctaaaatatataaaaccaagctgtgctcttaccaccttgggcacatgtggtcaggacctcctgatgctcttgtcgtgagtgggtgggtgttctcaaccttggaaaaataaactttctaaattaactgagacctgggtcagatttttggggttcacagcaacaatttaaaaaactcaccattgacctgaaattttgaccttatgctgttcctcacactcagccatgaaaatagacaccatcctatgagttccctcagccatgtcctgccacacttccaacatgtgtccccatccaccatctgttttcttattgctgcatcctacccaggccctgatctctggacccattgttgtataattaagaatttggggctgggcatggtggctgtggctcactcctgtaatctcagcattttgggaggctgtattagtcaggattctcaagagggatagaaccaataggatatatatatatgatacatatatatatatatacctgtatataataggatattatatatctgtatataataggatattatatatctgtatataatatacaataggatatatatatatgtctgatacatatatatatatctgagtttattaaggaatattgactcacatgatcacaagttaaagtcccacaattggccatctgcaagctgaggagcaaggaagccagtctgagtcccaaaacctcaaaaacagggaagccaacactgcagtcttcaatctgtggttgaaggtccaagagtccaaaaactgaagaacttggaggctgatgttcgagggtaggaagcattcagcatgagagaaagatgtaggctggaagactaagccagtctagtgtttccctgttcttctgcctccttttattctgaccacactggcagctgattagattgtgtttacctggattgagggtgggtctcccagtccactgggaaagggtggactttcccagtccactgactcaaatgtaatctcctttggcaacaccctcacagacacacccaaaaataatactttgtatccttcaatccaatcaagttgacactcagtattaaccatcacagaggccagggcagaatgattgcttgaacccaggagtttgagaccaaccttggcaacacagggcgatcccatccctacaaaaaaaaaaagtttaaaaatcagccaggataattagccattttctgtggtcccagatacttggaaggttaaggtggaaaggtcacttaagcctgggaagttgaagctgcattgagctgtgatctgtcgttgcactctagcctgggcaacacagcaagaccctgtctccaaaaaaaaaaaaaaaaaaagaatttgatctatgtcccaggttcctgacatggagcttctaaaactgttggaattttctgagtaatataagtgtctttgttatgttaatgagctaactcatggcagggcctgtagatagcttcaggatggggtctagtccctgaaaagaccaaaaaggtaattagagttggggctttgagccacatgatattagccaacccttcagacctctagggagaagagggacactggagattgagttcaagtacatggccaatgatttaatcaatgatacctatgtaatgaatcctccctaaaatctctggacattggagctcagaggaacttcctggttgatgagcacttgatgtgctgggagggtggtgcatcctgattccttgaaggtaggacgcagaagctctgttttttactagtcctctctctatgtgtctcctcatttggctagtccttctgatttgtatcctttataataaaattgtaataataatgatagcattttcttgagttctatgagtggttatacccagttattgaatctgagagaattgtgggaatttttgaacttatggcagtcattcaaaaaacatgagtggcttggggacccctgaagtgtgcctggcatctgacgtagaagcagtcttgttggggaccatgctctttaacttgtagagtctacacaaactctgggtggttagtactggaattgaattgcaatacatctggctggggtttaaacagaaggcccgtgttctcagggaccttgctcttttgtgctctgtctctgtctctctctctgtccctatctctatctctgtctgtctctcctttaactttgtactctacttgtttctcctcaccagacccactcaagtcttgcttatctaaagcaaaacaaaatagtgaaggccgtaactccttcattagtatgctcctcaccttctgctttgtttctcttgaaagagtgccttcaattacttctcctcccactcatcagccctcaacaattttgcttcttcctactacttaagcaaaacttctttcataaaagttattcttattcacatagtcaatgaataattctaagcttaaaaaaaaaatccgtgagtttctctgcagcatttcatactatttgacaattttctttccttcttgaactacaaccccctcccaccccagtttctgtaatactgcaccgggattcctttgtctattcctctctcagtctcctgtataatcttcttttgtctaccccttctaaactgcacgtattgtccattccccaccctcctcctcgattcctagtccatgaatgtcttaccatccacccagatacctgggcgtgtcaccttgagtatgtcttctcactcaccactctaaccccacatctgatcactcattgtatttgattccttctgcctcccacatgccttgtgtctctgtgcatttatatcctctgcctctgtgattgccacagtccacacaaaaacagcttacttcctcaacagtctctctgcttcaagttttgtgaccctcctacctgttcttcatctcacagccagggtgatatttccaaaacagacgcaatcatgtagagcccgagtcctggcccatgcgaggtgctagtgaccttttactgcatgcttgaatgaatattatatccctgcttaaaacccccaatagtctcccacggctctttgcatccaagctctttgacacaatttcaggttctcctgacttggccgttgcacgcttctttcactggccttgaataggtcatgcttatccttcctctatctgaaacaccctccttcccttcagctgggtaactggaacttatccctttgatgtcagctttcataggctttttcctgccctatctgctatatggttgcaggtcacttcctgctccacctattgtatatttattacattttattgcaattgtttgtagtacagatttacacacccaccatcagtatctcagcagccacgtcagtgcacacgtctggtaacacttggtgaggtcagacttgcaaagtgttgacactgtatttggtataaaatcgtatcttattgtggcttaattttcacttctataatttttaatgaggttgggcatttaaaaaaatgtttcctagccatttgtatttactcttaaaaaatatatgttagaaaactgagagaatgtatttattcttttatgaaatgtatatactttttcctgctgggctatttttttcttatttatttgtaggagtttttgtttttgttttcgtttttttgacagtcttactctgtcaccgaggcttacagtgatgtgagctcagctcactgcaacttctgttttctgggctcaagtgattctcctgcctcagtttcctgagtagctgggattacaggcgcccgccaccatgcctggctaatttttgtatttttagtagagacggagttttgccatgttggccaggctggctcttgaactcctgacctcatgtgatccgctggccttccaaagtgctgtagattccagcgtgcgcggtcatactccggccgggagttctttatatattctgaaaactaatcctttgtgagacataagtgttgtaaatattgtatcccagtttgtggcatgtatttttaatttttaatggtgtctctcaatgaaaaaagcttaacacttaaatgaggtcaaattgatcacctttttatttatggttgattcctttggtgtcatgtgtaaggaatgttgttccttcctgtcccaaagttgcaaagatttcttgtgtattttgtcctaaaagttttaaagttttgcttttcccatctgtgcacatttcacatttgctacatctcactgactgcttcctctgctgcagagcaagctccatgagagcaggaggcatgggtcctgcttcttgttggtccccagagccctatgtcatgactaggacctggcaggggactagtgagtagctcctgactaactgactcaatgaatgaatgattggatgattgaacaaagtggtatgggagttcacagcgagtaagagatgccttagaagagatgaagaaggagatggtatagggtagtggttctcaattctgggtccatggtggactcacctggggacccttaaaatgtaccgtggaggatcccagcccaagagattctgtatgactggtctaagatgtggtctgggcaccaggtgatcccagtgtgcagccaggcctgaggccactggatttggtggtaaatgaggtagctatcaagggtacagacgttggttgccaacaggcttgggcttgaatttaagctttgtcactgacttgctgtgtcctcctgcactcgttgagcctgttttctcacctgagagatgggtgtgataacacctacctgctgtagttgttgtgagagttagaggagataagcatgttcctggaatgaagtgtgttcttaatccatcataggttttttgcttgtttgtttgtttgtttgtttgttttttccttttcaagaatgaggttgagccagactttgacagctgggtgggaagtgaacatgtggtgattgggagagaagggcagtttatgtgaagggaatgtaataattagagagtgggcgtgggaagacatgctggcggagagtgagcaggccggttagccctggtagaggggtgcaagagcagcagtgcggaatctgccagggagcacaggtgggtgaccagggtcgccaagggtgtcggcttttcccaggttcccatggtacacaagccatcctccccagatgccccaagcctagcctgtgaagctgagccacagagttctggattgtctctctcactctgtctttttctctcattccagaaacaaagcagtgactggtactttaggaggagaatcaggtcaagttgggagaaacttgcttctgctcaggggagcagaagcaagaatggaggccccacccatgctggaagatgatgagggttttggttcagggaggaggaatattggggatctaaaggggcctgggagtggggcaggaccctgccttaggacaggtagaaacattttctataaaaaatggggtggaggttgatggtaggaccaggcatctttagttggctccctggagtgtcaagcccttgagatggtctttaaaagccatgcagtggggtttgaatctggtgttcaagctcataggttattaacataatgacacttggaaactatttgggagagctcaagtgagtggcctggaagttctgtgttggtgcaggaggtgacttaggatgtgctgctccagactcatatctttgactgcacacctgatgcttcatctggctatcctgtaagcaccttcaacttaacatgtcctacacagaactcttgatattcctgttcctcccccagttcctcagttcttaccaaatgttcttccagttacccaattgctcaagtaaaaaatctaagtccttctcttggatttctgcctgttccctcaacatcccacctatccatgagtgttctgtgggccctgcctctgaaataaatcctgcctttgtctcccagttcactccagccacccatcctggggctgcaccctcctccttccaagccctctccctttccttcctggtgctgcctgtcatgtcaagcatatgcatcagtgcgaccaggacatttgaaatgcaaccagtacaattgggcgcggttatgcctaccagtttttcttccttaaacattttatatttatgtttgaaagcatgccacctttcttcacttgccaacttgacagatttattagttgacaacatccgctgatagcatcagtaataagttaattgtttttgcacatgtagctttaattattctcattatcatttataggagttattctttgtaaagggtaactgagttttccaaaacaaacagaaatttggggtgggcccatggagcgtgactcatgaaatcagattcttagaaggacctcggcaagtctctgggttgctgttaatgagcctggctggctgccaggggtgtgtctgccctttatgaggccaccactgttcaaatgcttgcctgcagcattacttgcctaggtagtgcttgtttctactgaactgtcagggatccaattctttgtggtctaagtaacaatactcagattcacaaggaattgattaataagccagaatgccaatgtattacatttttgatgaagaccatatttacagtgattgtatctgctcaagctcaaattaggattagagttctgacaaatacatatgtgagaagtatgaggttaaatacttgaaatttggacttttctaaaaaatctgaatgtgattgccattcacatacctttctggggttgatgattcttgtacttttatatttaaacgacatagaaaactaacttaagaatcagattgcttggctgggcacagtggctcatgcctgtaatgccagcactttgggaggccaaggtgagtggattgcttgagctcaggagtttgagatcagcctgggcaacatggtgaaatcccatctctaccaaaaatacaaaaaaaaaaaaaaaaacaaccaaaaagaataaattagctaggtgtgatggtgcgtgcttgtagttccagctacttgggaggatgaggtggaagaattgcttgagcccaggaggtggaggtttcagtgagctggggttgcaacagtgtactccagcctgggcgatagagtgagactccgtctcaaaaaaaaaaaaatcagattgctttattgctggttttctttctaaaactgagattgggtcccatcatcccctggcccccattggttaatggttcctcctttgtctattgaataaaatacagatgtctgcttttggcaacatggttgaatgtagacactgcagggtcttcctgactcaaaatgagtaaggcttagataaaacacattttgaaatgcatttctggatgaacagcaaggaaaggagatctcttaaaatcctctttctgttcccctctccctaccccctccaagtgggcttaagtaggaagggtggtgagcggcaggtaaacacacgtcaaaggcagtcttcctctctgagggaaaacacttgtataagcattgcaatcaatgggcctctttaattatgtgccagtggcaagagcgggtgctgaacccaggggcctgcctcaatccggggcctttgaggcagaataaagtggtctcaggttgttggcatttccttgcccttccacccgaagcagacacaaatcctctctggaggcaagttccccaattcagccagtacaactcccacagactaagatcaatcatgtacaagctcacagacaaaggtcaccaaacacacagagcaataaacaaattcatgagtgacgtgaatgagaataaacagaaacaataaccaccagctgggatgctctaagtcttcagctgttagaattcctgaatatagaataaaactgccacaatggcaaacatgcatctagtacttactgtgtgctgggttctaagaattttgcacattgtgccagataccgactcagcttcacactcaccctcctactgtgccctcttaatttgcactagattaaaaggtagaaaggaagaagcagctattctgttcttggctgtgcctctggcagcacatgcaaaatgggcagtaacagtggcagtcacaggtaagtagccttctcacagtgtggagttaaaggcatgggactgagacgagcaaggttcctaaagggacagtggccagtagatgaccaggggctactggagtggctgcatggctctgtggaagctcagaggagccttgggtcctgcaggtgcagtagcagctttctgtagttcctgatctctgggtcccacaatcttccccgtttttgctcctccacttctaattttgtaactgacttccctgtgtgtacttctctctctgattgaaatagccagactggtttctgtttcctgataagacattgtctggtacgaacacagtaactcatttaatccgatatctctatgaaggaggtacaataattattcctattttacagatgaggaaacacagcagagaaataaagtcaattgtctaaggttgcacatttagtcaagggaagggttgatataacatataattatttagaaaacatctaaggaaataaaaggcataatttaaaaataaaactaggcaggtttaaaaaaatgaagtaatctataagtaaaaaagtataattgttgaaatacatatcttagtggatgggttaaatagctgaagaaatgattaatgaactggaaggtagttctgaggaaatcagaattcagcatagatagaaaaaatgggaatttacaaaagtacacaggaattataaaagaggttaaattatagggagggtagaatgagaattaacattggtctaactggaattttggaagaagagaatagagagaatgaacaaggcaatatttaaagaggtggctgagaatttttcagaaccaacacaaactatgactttaccagtagagaaaacaatgtacactgaggaggataaataaatatactatgaacaaattgtaataataatactcaacaaagacaaagagaagatcttaaaatcagcaaaaaaagaaagtcagacttagaaagaaatgacaatggcagactactcaacaacaacaatggaaaccaaattcagtgaaacagtattttcaaaatgcatatttaatctatctttgaagaataagggtgaaaagggtgaaaattgctgccttatacaaaatatcaacattaacaaaaagtaatgaaggtaatataaaaatgttttcaaataaacaaaactgagagagtttaccaccaacaagcattcattaaatggacttttaaatgcagtttttaggaagaaggaaaacaattcctaaggaaggtctgagatgcaaaaaggaattatgaacaaagaaattgttaaaattataggtgaattaaaaaaactgcctgcataaatgataataatgacaatgatgctattaataatgagttgataaggataaagaaaaggacagaattaaaatactagaaaacaagcatgctggaaaggattcaggaattacttgaaggttaaagttctagggtccttctatccttctagaggggagtcaatatattaatttttgaccgtcacttacacagtgaaaaactttaaggataaccataaaaaaatagaaatagagagtataacttctgaaacagtcaagggaaaaatatggaataagaaaactgaccaaaaaacatctcagtcaatcaaaaaaaaaaaaaaagaaagaaaaggttcggaaggagaaaatcaaagcatagaaaaagcgggacaaatagaagtggaaaagaaaaaggtagaagaaacaggtccagaaatatcactgatgcactaaatcaccattaaaagatgaaaacaaatgaacaacatcaaaaaattctagtgactgtagtagtgctgatcagaataggctctaagataagatgcattattgtgagtcaacttgtgatgatgaaaggtttaattcaccagaaagacacaattataaacttgtaatcaaatagttttattttatttactttatttatttattttttttgagacaggatcttgttctgttgctcaggctggagtgcagtggcttgatctcagctcactgcagcctccacctcttgaggctcaagctttcttcctgccttagcctcatgagtagctgggtccacaggcacacaccaccaagccctgctaatttttgtattttttgtagagatggggtttcaccatgttaccaggctggtctcaaactcctgggctcaagcgatctgcccccctcggcttcccaaagtgttgggattataggcgtgagccacggtgcctggcctcaaataactatttaagtgaaacaaaactagtatggcactaatgaaaaatgtataaatccataatcgcagagggatttcaacttacttctttcgattatgtaaaggtcaaacagacaaaagacaatgacaaaacttaatgcaatgaacacttttgatttaatgaacatatattggatatgtacccaagaattagagaatacatactagttttgagtttatgcagaacatttacaaaaatttagtggaagcctaaattataaaaagttgctgtcacgtagaataacacacaaacccctgagtccggaattcaaagccctccacactctcctctacctttgcatctttatcctccaccacactgcagtgcatactctgggctactactcactgttcttgattcaaattccatgttctgtcagctcaaatcattctctctgcctggaataactacttcatacatattctgctattgaattcttgtcttagcaccccatctactccaagacgatgtccagttggggttactccctgtcccattttctttgattacactttttttttctacttccattatattattgatcacatctgtgccacagtttttgactttgtgtctgcttttactcttttctagaccctgagagctcctgaagggttgggtcatttcttttttatttgctcattcctcatggcacagtgagtgcttaataaatggctattgactgaaattaaactgtatctaaatggacatattccacttctgggccattcattctttctttctattggaaccaggagatggggaaccataacaaaggtaaggttgtgccatgtgaaagaacatggaaccttcccctgagggccaaaaaagagcagggaaaggtgcaaagacaaaatcttccatttttaaacaatgtaagaatgtggtccacctcatgctcaggtgggactttatcatgacgttatttttggggacttatagctgcatcatttaccccatatacatttacctttagtgtagggaactgaggacaggaattttgttgatgcagactcttgctaatgaggctaacacttggagaatttttatcatgcattcaagaagcttgttttacatttcttcattaatactttagttggtggtttagctttagttgtaggcttatcagatatttggagatatcttcataaacgatggctttggttttagaagagttattctgaagctactatttctggcaataatcaaacagcatggccatttgttttgtaaggcctttcctagaatatgacggtaaaatctacgtgtggaaaaatgcttattcttctgtcctctataaatgtgaatctagtttgtcttcaaaatgaaatcaagtgattaaaatgtagttttctaagaagataaatggagcaaagcactctgtgtttcacagtgttggaaatcactcatccctcataaaactgtcccaactgatcctgactcacatgaatgaattaaaataagagttaataacatcaatttacatttttaaagacactttcccatgttttagactattggttggaaaagctggtaggtgtacaatttgtggagagttggctgtttttgtctgtcgttgtttgacgtatttcaaagccatatctaattttgttgcagaatggtctgaattctacaaaaatgttgagttgtgtagtgtggagaagtacggagccatttactgaaaggctggggggaaatgacgagaccctgagataaggcagtagtggtgcgaacagagtggaagggaggtagttgagatatgttcagagtagaatcagaatggacatagtgaacaactggatgcaggtgggggctgaggaagcaaagttgaggataattctgagacttctaggttgatccactgaagttacattattcaacaccacaaggaaactaggggaatgagaaggcatactggtttgctttggagtggaagggcagtgatgtaagaggagttaatgagttaaagtttggatatgcctgaacttcaatttgatatgtgcatctgatatacccttggggtgaccctccaggcaatggttgaacatgtgtatttcttagtaactgataggcatcacagactcacatcagtaaggaagcaacagcaaacttgattggacgatatacctggaactcagtaccctatgactggagcaagtctctgtcagtgaaatgaggataagaagaatcttgaccttgtggaatatgttgttaggaatatatgtgatgaacaacataggatacttcctacagggctccacatgtagtaagggctttataaatgcttgataaatattattgttgtaatttatttccaaagtaagatgccactggaggaatctttggaacccaaattaataacaaataggactggatgcaatggctcacacctgtaatcccagcactttggaaggccaaggcaggaggatctcttgagcccagaaattcaagaccagcctgggtgacacagggagaccttgtatctatgaagaattaaaaaaaattaaccagatgtggtggtgcacgcctatagtccctgctgcttgagaggctgaggtgggaggattgcttgagcccatgaggttgaggctgcagtgagccataattgtgccaccacactccagactgggtgacagagtgagaccctatctcaaataaataaataaataaataaataaataagtacaaaccagcaaacactaatcctttctagagattattgaactctggagggcagatctgaatggagccagcagagggacctatggagatcagcctggccctggacagcaccaggcaatggggttgctagagaggtaatggggttgaacagggtttaagccatgaggtctcaagaatccgtgaagactcagactaatttttttttttttgcatgaggattaggtgttcctaggaatttcaatgagagcagggttaatgaaggaatgcagggtaggagagctgagggaaggcatctgagagagcctggcttatgaatggctgcgtcagtatggctcacctgctttccttgtatctacttagcagatgatcccaccccaggcctccagggccaaggtcatttccacatagtcatgggtccttgagggcctggagcagtgtaaggaagacagagtcttaagaaattgcattaacagtcatggtgcttggcaagtgtcgtcatcctatgccaagcctgatctgaaggggtgcatgctcataggtagctgctgcccaagattacagcagcttcttcaatcccagatccatgctctcctatattcatttttccaggggttcctgtccttcgacagtgatgagatgcagaatgacttattgagttattctcctgatagttgccaacttttccaaatgacaatggggcatggagcttgagagtggaaatgaggccctagggatagcgtgcttaggaaaacactcccagcctgatgtaattctgggggtacaatggcattttcatcatcaagactgatgtaaagggtgactagcagtgagttgggggtgactcgcactggggctaggtttctgattctgcctaatccagacagagcagaagcactagtgggctggtagagggcctccagggcctcacttaatgtcctggaaaaacagctccagattgttggttcacgttctgaggacaagcttgggtactacaggatagagagagtggtgggagatgccgtggcctgccctgctgatgcctgccctgccattcctgcgtgtgatgtctctggggcatcttgccttccctgcccagacctgtagttcagctgagggcatgtggaggccaaatggcttcttagagtgttactttccttgaacagctctgctgggagaactggaggagctagctagtcacggtaactgcagcagtcaaaggatcgtcccggtggaggtggggtggaaaggtagagaaagagaacatatagcgttttccttggagatgtgtgggcatgtcatagaggaaatacccaattcctgagccttgagccctccaggaaaccttggaatattaggttagtcatccccaaggaagtctaagaattctggtctcacccatctcctttaattcccacaatgatcctacatgatattaaggaacacgggccagtaaccctccaagcaatggatgtggtggtgaagtttgacctcatgatggagcggaggttggtttgaaacctaagaatttaatttattgtttcaaactgttctccactcagcgttattaaagcatacataattgacacataaaaattgtatatgtctacggtgtacaatgtgatgtttcgatctatgtatacattgtgaaatgattacaacaagctaaataacatacccattcatcgtgtttcaaaggaattaaactcaagcacaaaagagaggtgctgttgaagagtagggctgctctatctaagtagtatgtctggggttgtcctggatcagggtccttttgtgctagtaataaaccagcccttctggggctcatccactttccccacattttcttctggagcctccctaagaattaggacatggccactttctctgcataggcttcctacttcaacaaggacagggcttgtgctgccccatgccacttgagtgtccctacagcacagagctgagtgcacactggctgagtgaggaaatcccccagattaatcttggttctaagcatcatggctgtatttcacacgtatatgaattacaaattacagcatagtcgaataaggatttttgtgctacaactggaatcccagattatgcaaattggatagtataatattgaaattcctaggactttttattagttttaaaaaattatacaagcttagagtaagaaattaaacagtgcaaaagaattcactgtgaaaagtaaaatgctctgtctctgctgagagacagatattgcagcccagatactactggggtcaatagtttcctttaagcatgccattttgatggtttatgggacttacagctcaagaagcttgacactagggttgatctcagaaaatcattgttgcaggtattagatatgaccgtctcataaagatacacacacagacacagcgattggagatattcactggggcttatgggctgcttgtcctttctgctctgtgcctaagttgggctcagagtagcctggcatcggctgtggggagaatgctggcatggggttagcaggagcccacttaacatgtcctaagccacctggaagagtccttcaaggagaccagactccagaggccctaaggaaggaaggacttttgcccgtttttaggtattctagtcccagagtttagggaggaatggtttggctttgggtcgtgtgcccctttaccgagtgggatgggatgtgcccatgagctgttgagctggctcttggagaagacagcaaaagcgggaataagaggtcaggaagctgtgtggttgtaggaaatcccagcagagggcctgggggtcaaaagtggtcatggtagtgacggtggaggctgaggtggtagaaaatcagaggacaaaccccatgggctgctggtgatctgaccgagctcctatgctctcctggttcattttaggctctgtagcagcagatgattggctggtgtgagagcagtgcacctgccatatcaggcaatccaagacaagtccaagctacgctgggaggaaacctgaaggcagcagcaggtagactggctgaagacagacaggcaggcaacttgtcaatcagatttgtgtttttaaggacttttaactggggagccctccatgacagatcagatgagagaggaatctgtgtccgcccatgtgtcaagctaccagagggtcccatcggtgcttggatcttctttgaagctgggtctgaggtttgcaggtagagggtgagctggtcagagggacctattgcagagctaaccaacaccttcccaggaatgcaagcacaagcaccccaccgcgggcaggcgggcaggcacttctccttttgccaccaggacctcacagaggctgatctggctctgtgaggtaggaaaatgactcatacatagaacacaaacaaaaacaacatactaaaccccaacatcctaaaaccctgtccccagaccacaggtgccggcaggtgctgctatttcaaggctgggcctcagtgcaagcttgtggtttcttgcccacctgtgatgtcctcccactaatgaaggggctctccatcctctgtctgcctctagcaagtggaggctctgggccctgggcaagacacagggggaaatgccatctgttatccaaatatatttcaatgggacaggaaagggctctttatgtcatctgacccccttccccatttactggccttgtacccaaagctggacgtgctgtggtgatggggagtcaagagggggaagattcaggggagagccctgccaagggggcccaaacaacaggctgaccagagcaatgcctggccttgactcatggcccatgtgttatatcctgggtgtgttgaatcatctctgtttaatcttataaaaaaaaaccctttcctgtgacagaaagagccctgggtttgttattttcagtttatgcaaagtggataagaggggtgaggagttcatgttgattgtccaggaggaaaaaccgaggcagacaccagagctggggctcattcccacagttgagggcgcatcaccctagtctttaggcagagagtgcttcccatcatggcctgggccccagctcccctcacatgctcggtgctgctggggaggcttgggaaggggcgtggaggcataccgtctgatttggggagcttgtgtcctgttgagagagaggacatgcacacacccgcctgcacagcaagaacttccaaacctggctgcttaacgtactccagggatatttcaagtgagaagtgcaggaatatggaagcagggactcaagcaggaaccatggatgttggggcgtccatgaaggggtagccctgactaaaggaagatttaaggaaaagcaccactctttgtatccaaaataaggccagtgcctgttgtttcttatgttattactggagaaaaggtcagggctgggctctcgggctccccacgtgtgaggttcttgggactgaagcctttgcctccaacagtctcttggggtcagaggctgttttgttcttgtttcctcagttaagctgcagtggtaacaggccgacacacaggaaatcataagtcaggagggccactgccacgcaggaaagacccatctgaactgctgcaaaaggcgagttggaaatcatttacttaatcgtgacttaaatggccagacaggaaggctcgtttatccaaggaaagatgaaggcttatgggttctgtgtgtgtgtgtgtgtgttgctaaaatagaagtttcagcaatcaaaacatacacaataaatattttatttgtttgattcatttagatgtttctggggctagttttgaacattaggaaatggaatcattggatcatttgaatttaccaaaaatgtggatatttctaaagtagcagaaataaaggacttcagtattggaaggggcctcagttgctccctctctatagatggggaagggcatcaagacagatggcgtgacttgcccagaaccactcagccaggcacagagggaagctgggtctgactcaccaccacccacagctggtctctgcattttgtaatgctttgctactgacaaagtcttttgtgtgccttatctcttttgatccatgcatgttacagctgtggataactagtccttgattcctcctcaaaacaccacaagcatcctattgtgtttagatgagcctggtctttcccttcacccatgtccaacatgtgaatgtactgcaccatgcacattaaaggcctccctggaccattactagtgaagtgaggcagacaatagcagctactgtggatcacacatcttctgtgtgacaaggacactgtcagccatttcatatttattattttattttctccttacgacatcactaagtactggtgattattatccttctctctttgcagggatataaaccaggcttagaggaattaagtaacttgcccaggttcctgtaaacaggaaggacagcaagtcctcactaaatgtcactgataggttcttggacactgactttaagtgaaacaacatgcagcaggtcctcgaataatgtcattttgttcaatgttattcgttttcttatatgtcattttgtttaaaattgtggttcccaagaacctattgacgacattaataggctcttagacgccagtgctatttctaagtcagaagtacaaaaatgtgaagtagagacttgataagggactgtgggtgttggggcatcatccatgtatttaatccaatatattcaaaatgttacttacacagtcaatataaaaattgttaatgagatattttacattttttattatgtgccatgtctttgaaatttggtatgtgttttacactttacactgcaattctgacaagccaatttcaagtgttcaacagccacatgtggcaagtggtcaccatatagggcagtgccactctataacaaaagaaaggggaaaatatttctggaaggatggttgttgggagttgatgccatagtcagctcttaaggagctgagctttcaatattcctggcatgggatattgaaatatcagcaagaaattaaatgacatagtagtcattatgcctaaattattgttattttttgattgaaaaaagttgaatatttcaaatatcaaggtagtagtgagatataataaagagagagtcagttctaagtatagaattgctgattcagttaagctctgttctccaacatttgggccacattgaagagaccatgtagctgctttcagcctcggtttcctcctttgcaaaatggggattacactacctgcctcacagagatgtaaacttatgacatgttatcatgattgccagggcccacctgttttcttttaaacattgaaatcactgtgcctgaaacagggatttccctgccctttgtgcaagctccagaaacaggagtcagcctgagtcccgcagctaagaacgtggattctggtcattttctcatagcgaacacacttcacaggtccttcaagggagtacattttcctataactcaccttaatctcagttgaagcctcgtttcttattttgcactgtggccaaaaactaaatctcatttctttcacgtaaacttcagcaattcaataatagtacagtcattttatgtttcaactgaaccaagtcagggttccactcctgcctcccctttctgctctgaggacatccatgaagtggagggggtctatgtagcctggagctattggtgaggggcaatgggtccgtggtggtcttggggaactgcggggctgtgtctggctggtctggtgtctggtgattggccttgttccacgcggttcacgctgcaggacagttcgtgtccttcttgtcctaatgatcagcttttaggctcacgggcctgtctctgctgagatatggaataggacagcctctggatcttctttaaactctcctggggccacaggggactctgtttgtgtctgtgcccacataggatgattctgcccagacctttgctgccatttcttgctgttctgctgtttttagtctctggagggcttgcagtttccttggggtccctgtggaagcaaagcaaagtcctctccacgctcagatgtctaaacgtatctgggttttatcgtccacccatcccagagctcagtctagaggagggggcagccttcgggttctctccttcctcccagagcctcttcctttgcaccagggcagcctcttcctatctgttggaaagggctgtctggttcttgaatatagagttgcaggtttgaggggtgtaggctgaggtaaggcaaactatcacatggaataaaaattaccctgtgtcaaggaacaaccagagctggacagtttttaaatgtgaaaaccaattttattcaggactatggcgagaggtgaagtaagacctcagtatagaactgggctcaattccgaatgcagcatgggcaaatgggaatgtatagcctaggagcagggtgggaacctgtggatgaagaattactaaaagggcatatcgaggggtgagggggcgtcctggctacacccactaactactgttgctgaagaaaggcctggtgacatcactggggaatggtgggggatgaagaatccaatcagatggatattgaggataaggggatcttgataaactggcttaggagggtttttgctaaaactggttttcataggtaagtccacagacaggtcttggagaaagttcagggacctacggtttgttcgggcagatgctttgtcatctgtcacactggcactgtcacctggctttcctttagtccctcccccccttttttttttctggagtagttttgggagaccagaggagcagggagttagggagagtagtcagaaaaggccagagaaaataaggaggtgtctgtagggaaaatccttaaatcctctaattaaattaatttaatttatttatctgggacaaggtctcactctgttgcccaggctgaagtgcagtggtgtgatctcggctcactgcagcctcgacctcagggctcaagcagtcttgccacctcagcctcctgagtagctggggctcacaggtgtgcactaccatgcccggctaatttttgggttttttttttttttttttttttttttttttttgtagagatgaggtttcgccatgttgcccaggcttggtctcgaactcctaagtgatccatccacgtcgacctcccaaagtgctgagattacaggcatgagcacctgtgcccggcctaaattctccaatttttaaatgcttccctgttccctgttccagatttgggatattgactgctgttaaatcagcgatttctccctgtggagaggtagccaataggaagcaacaagagtgaggagtccttatatcgaaatagagggtaagagaagagacagatgttatcttggcagtgatttaagaacagcgagtctgtaagcaaagcaaagcaaggctcccaggtgctgagaaacaatggctttctggggaagcgtctgtgttcagaaccttaagttggaaacatctctgaagatgtttgccatgaaggttttcttctgaagttgagtctttcatcactaggtaggcgtgttttggaggctctatcaaacagatcctgtgtttattaggaagctgtggttcataaagccccatgctaattttgcaggtagcagggtggccctggcctgacccggggacagagtggctgtcctccctccaggcaggaaactctctcctgccacctagtggctgcatacccacatttcaagggagcttctgggtggtgagtttaccagactatggtctgaggtagagttaagcaaaacaaaactaaactgcataaagaaacagaaagaaaatcaggtgttataaaaacaatttggcatttgtttgtgtttcagctccgtgtcgatttattgcttccacaaatagtgccgatatgcaccaggcactgttgtaaaactgaaaatatgtttttggatgtgcccagtctgtgagtattaaacgatggttgatttgaaatttgctatgattcatatttctgggggtaagatgcaggatttctttggggggcctaggatgtggcattctagaattctcaaagaatcaaccctggtgggaccaggaagagctgagctgaggcctctctgctcatgtgtacttactggagatcatggagacaggtgagcctgagtgcacgtctcaccaaagccacagcagagggggaggaggcggaaagagagctctctccatttctgagaagttaatggtaacaatggcatacatacctactttacagttgaaattggaaaccacagcattaagtgtttccaatgaaatttggcaatttgggagttttctgagctgcattggatgtggttttgcatgctgttaggatgagcaagagatgatggagaacatcttccttttgagcttcctcttggacgtgggtcactcccactcatggaattagaaagcttagacctagacttgaatctcaccttctcaaggtgctcccgggcaaatcacttaagatccatcttcttctcctcctgctccttctcctccttctgagtttttttttttctttccaaaattcaaatgacacggtactggtagaagaaaaggtccaagtctgcttttacagctcccctcatccccaaatgtactccgaccccaagatgaccatgttatcatttgattggcatccttctagtttcaactcatttctttgcatgtatatgcacgtacatatacactattttattttgccaggggtcacggttagctgaattaatttcttttaaaataatctttatttagttatagtttacatttaacaacatactcatttaagtgtatagcttgataagtcttcactgtaaaccaaaaataaaattcataagccccccacaaccatatgaaatggagccctcgttcttggccaagagcattccaaagttaacctgaaaaaactagttcaggtcatgatggaagggaaggttggacatgccccagtatacccttctcccttttggaattcaggaaaagctgaccagcattaacatcaacacagaccttatgtctgataggaaactttgacaatctattccctctgaagcttgctacccggaggcttcatctacaagataaaaccttggtctccacaaccgcttatcataacccagacattcctttctgttgagaataatctaccttgtaacctggaagctccctgcttcaagttccctcacctttccagattgaaccaatgtaaaccttacatgcattgattgatgtattatgtctccctaagatgaataaaagcaagctgtatgttgactgccttcagcacaggttgtcaggacctcctgaggctgggtcacggatgcatccttaaccttggcaaaataaactgtctagattgactgagacctatctcagatactgttgggttcaaatatataacttatgaaactaatacacaaatcaagtcatagaatatttccatcactcctcatctacccccaaatttccttatgcgtctttgcagtcaacctcccaccccatccccaggcaactgcagatctactttttgtctctgcaccttcaactgaccctttctgtgatttcatatgaatggaatcatgcgctgagcagtcttttgtgtctggcttcttttgctcagcataatgtttttgaggtttgtccatgtttttgtgtttgtcaatggttaatttctctccattgcagagtagttttctattgtacatgtgtaccacaatttgtatatccattccattgctgatggacatttgatttgtttccagattttggcaattatgaatagagctaccatgaacacccaggtacaagtctttgtgtggacttatgttttcatttctcttggaatggaactgtcatatcaataagtatatgtttaactttgtaagaaactgacaacaaattatctgcgatggttatgccattttgtttttctaccagcaatacacgagcatttcagttgctccacaactttgccaaaacttgttttctttaatttggacatttaggtggctggacagatggcatctcattgtggttctagttttctttgccctgatgaccaatggtgttgaacatcttttcatgtgctttttgaccatttacatatcctcttttgtgaagtgtctgttcaaatatttttgcccatttaaaacatttgggggtttgtcttattattgtgttgggagagttccatatttatttatttattgagatggagtctcactctgttgcccaggctagagtgcagtggcgtgatcttggctcactgcaacctccacttcctgggttcaagcaattctcctgccttagcctcctgagtagctgggattacaggcatgtgccaccacactggctaagtttttgtatttttagtagagatggggtttcatcatgttggccagactggtcgcaaattcctgacctcaagcaatccacctgcctcggccctacaaagtgctgggattacaagcatgagccactgtgcctggcccatatttattttttattctttattttgtatacaagttcttggtcagatacaataatacctggtcagatgagataatgagttggaaaatgctttgcaaatgggggagaataatttaaatgttatttatttattaagagcagaggcccttcctgttgcggtcacagaagccgtttgcttcttctgccttttataaaccagcagagtcgagctacacaggctgtctgtgttggctgctattagttaatcagagagttttttttttcttgccttgtcattctaatttgtgacacataattagccacaatatgtgttttcagttgtgacactggcctgggaaaccaagggatgtttagagtggatttccttgattttgcaataattgtgtgtttttctgcatcttctgttaaacacaaattcatggaagcaaaacatggaagcaaagtaccctggacatccacccttctttatgaaattgatttctcttaaatgtaatgtttgcttgttcccttactttaaaagcaatttaagagtttattgagaaagtgagccctggaaacatagatgcatagagagaaaattctaccaccctcaggtccctattgtcttctctcataaagtgtagtttcagggccttttagaagtttcttttctgctctgatttgcatgtttgtgagtgttgctattttaagtatttggatttggtctgcaaatcctatgagagatggcaacagagtagggattctcaaagcctgcaggttgtattaagtccagcagggccttgtatttacaacagagggtccttgaagacattccatatattatgctaggggagtggccaagcaaactttaatgtgtccctatggtgggatatttggggttaatacctgcccttctcttaatttctttttcttttctttttttctttttctttctttttttttttgaaatgtagtcttgctttgtcacccaggctggattggagtgcagtggtatgatctcagctcctgcaacctcccctcctgggttcaagcaattctcctgcctcagcctcccaagtagctgggctataggcacacaccccatgcctggctagttgttttttttttttttttttttttttttttgagacggagtctcgctctgtcgcccaggcggggactgcggactgcagtggcgcaatctcggctcactgcaagctccgcttcccggggttcacgccattctcctgcctcagcctcccgagtagctgggactacatgcgcccgccaccgcgcccggctaattttttttgtatttttagtagagacggggtttcaccttgttagccaggatggtctcgatctcctgacctcatgatccacccgcctcggcctcccaaagtgctgggattacagacgtgagccaccgcgcccggcctagttttttgtattttagtagaaacagggtttcaccgtgttgcccaggctggtctgaaactcctgagctcaggcaatccacctgccttggcctcccaaagtgctgggattataggcatgagctgctgcatgcagctctcttaatttctttatttgatttttatttttcacttcaacagtctgataaaaaatgataatctaatgatcttagtccattttgtgcttctagaacagaatacctgagactgggtaatttataataaacagaaatttgtttggcttacagttctggaggctggaaagtccaagatcaaggagctgcatctggtgagggccttcttgctgtgtcatcccatagcagaaggtggaaaggcaggaaagcatgcacaagagggctgtggggaggaggcagagatcatccttttatcaggaatctactctcatgataacagtattaattcatttatgagggcagaacccttatgacctaatcaccttttaaaggtcccatctctcaactctgttgcattggggatcaagtttccaacacatcacattttgggggacacatttaagccataacacaagtgaacttaatatgacagctaattatttctaagtaagcacacctagcaaatttttgtttgttttacatttttatgattgcagccagtgttggactctctactctaattccacattcctcccaggtttgttctaattccatttctgtcttgtattgttttccgcctactcttttgtcttggagcagatggcttattccagtttatatgtaataaaagatctttaccagctgccttgattctacctacttaaaacctcaggaagccatctgcttctctctgggccctgcacctgccccagtgttcaggtgttcctcattttccttggctcacatcttagtctcctaactggtctcacagccctgcccttctctgcaaggacccatcttccacattgtcatgaatggcaacattacaaaaggaaaaactcaaagcaatgctgccatgcctaaggaccctaacctcaagggactatgtgacatctgtgtccagaatgctctgtgacagctcctcagccccatctccagtccaacctggcactgaggcccagttagatggaaccactgtgtgtgctcagaacaggctggcttctcccttgcccttgggtattttctctgcctaacaagctctcctcgatccctcccctttgctggctttccctagatgtgaatgtcacagtaacaaagccatggtaaatgggttccccgtcatgtctccagcacccagcttagcacctggtatgtactaaatgaagaccctctggatgaaggaactgtaagccatttgaggtccaggtggctgtcctgtaaatgatcttaagcactttcccctcccacaggtagggtctagagatagttttctgtgggtctttgcccagttgtcaagagacccagaggccacagaacctcagcacaatagtggtaactgtgccattcagctttctgcgtcctcagactccagccttcttgctggatctcttggatcttggagtttctctcttctttctctttcctcccacatgcaggaagctcaggcctgcacacccgacagttggcagtgggaattgtgtattacctggttccttttacctcacatgaagctgactttcccagctaagtctttactcggtgggggcaggttatcagaggtcctggttatcgaagtaatattaaggcctttgtagagaattggaaagcatggaaaaatggaagaaaatcattaccaactccgcctttcaaaggcaaccactcttcacacatttctagcctgtcgtctgacttctgtctgctagccattttaacaggaatccccagattacaaccatgtctttacattttaacatttcttaggtaaaaatagtcttcacttaggtgatcctcctaaagggaattataaaataatattttaaaaggaagattggaagatgacaaaataatcatttttattcatattggaattgggccttgaggcaatctactgtgtggaggtgagatcacacctaagggattaagaaaatgaggaggctgatgcttgggaaagaggccagctggtggtaggttttccaagtgaaaccaaagggatgagtcagcagacaagcagcccggcaagtgtcctccacacctggacgccttgggtggaggtgagagagtggaacactttgagagctccctggctaggaagaaaagagaaagcttttcccaacagccagtggagcaggaagggttggcctgcacagtgctatgatgaaatagcaacctgtagaaacttctagatttcccacagtgactttctgcactgtcactagagtgcagtgcgggactcttctggccacacggtccactttgggtctccctaaccaagcgtgtggtctccccacccctgggatcttagattgtgtcaccatcctacctgtattcaatctatcggtcaatagttattgagcacctaccacatgctacccactgtatgtagtgcagggtgctcagcagaggatttgcaggttaaatcctactacatatctcttctcccctcttgggttccctacagaggaagatgtacgtagctaactctatataacaaagggctaactttgtacatgactggacaagcatccaatagcatcccagtacagggctcctctggtatctgggttgggtggggcccacagtagggctcaaggctggagaagagtgtcacgctactgtcctcccatccaatactagatggttgggtgtgtgaaacagactctgcgtttacctgcacagccagccatgtggatgactcttgcaccacgggctgagtggtggatgtttgggtctccttctagaaggctctgaccaggcacctttattactcgggggcaggagaaagaaagagggcaagaggatggctgggccttctctcacgagggagaggttggccagatctgtcctaagaagcacgtccttcctctgagtgctgcaataagggaaagggagcctactccactggggctcaggaagtgagcatggacctgggcacagccacgggctatcagcacaccaccagcctgctccctggcccaaggcaccccagcacatgtcaacacagcagattagcaacttctccacctctgcagggttggaaagcaggcatggaggcatagaggaggcatggagagcactgaggggcagaaagaggatagccttccttggagaagagacatttaagctgggccctgaaggatgcgttaaggatgagaccgcagaagggcggtgctgaggtctcagcgtaggcctgtctggttggaagctaggtcttagccatttggtggaggtttagggactgggattcagcctctgggggaggacactaagagtaagcatgtaggttaggattctagtccagcaaatcaggaccatagaacaggagtcacagtgggagagctgtaggttcttaggaaacacacaacagacatacttacacagacaaggaaacacagttggactaccatcacttcattcatcaaacatcattgagcatctaatgtgtatcaggttatgtcacagccccactggggtgacaagatagacaaggctcctgttcacatgcagcttatgttcttgtggtgagacaggcaacagaccagtcacaaaaaataagttagggaaatactgggatggtaactcgctctgtgaagaaactgttacgtgattgggggagggtggcaggtatggaacctggagaggtggggcagggacagtctctgaggggtgctgatgagaagcagctaggcatgagaagatctggggaggagccaggcagagaccgtagcatgtgcaaagtctctgagctatcggtggaatctaagaaggaacctggggaagcccttgagtgtggcagggtgagtgcaagactgagagtggagggcatgaggtcagaggcgtagatggggccttgtcagggtgaggaattttaactaagatgggggccattgaattgtttaggctggggaatgacaagttccaccccgtggtgtaacagggccattttattctgggcagggttgaggcagggactctgttaggtccacaggagaagagatggtggcttggagctgggtggtagcagagggcaaggagggaagtgaacagatttggaatattcttgggggtggggccaacaggactggttaatggctcccgagaaggaagactagaaaggaaacaggtttgggcaggagaaaggcaaaagtttggctttggccatttgaggaagagatgctaagtgacagtgtcaactcggcagttaggtaagtctcaattccatgggagaggtaaggactaaagaggcaaatgtagaaggcattagttaataggcggtttgaagccataggactggatgagatgtcctgagtatgccagtgcctgggcctcagctgagggcagttaagaccactcccaaatcctactggctggtggggagtggagagggcagggcagtgttcagcttacaggctgtcagtctttcataaccatgtgtgggtgtagctggctcgggctgagactggcactgcccccatgtcttctgcattcctccctgcttatctccactcaacatggttcctggaaggccccattttcttcataccccaccaactggccacaccagttgggctgcaaaggccagagcataagtctaaatggtctttgtttacacatggcctccttggttaccatgtcttggtgtctgccctctgtcttggctggctgatggagtaaaaacccatatttacattacatggcatcctcttcagttcctttaggacccttcatctcaagaattgcaagagattttaatagtcattcaatcttcattttgaagatgaaaaattgaggaccagagaagagaagcgacttggtcctcaccacggggctggagtaagtaggaattgtgaattcctggacgcaggggccattagtgctgtttaggacgcgtacgtcaccccgtggtgaagaacagtaacagggacattttaaaattaaaatgatttaacctttagaaaatgtcctattttgtaataatgatggattcacaggaaggtacaaagaaatgtccagagagttcctgagcccccttcagccagcttcttccaatgttaacatcttgcattattatagtacaacatcaaaactgggaaatcgatattggtactgtccagatagcttactcagattttgccagttatacttccactcatttgtgtgtgtgtgtgtgtgtgtgtgtgtgtgtgtgtgtgtgtagctctatgcaattttatgtgtgtagcttcatgtaaccaccacaatcacaatacttaactatgccctcatcacaagactctctcttgctatgctttacagctgtatcctcttcatctccaaaccctaagcccacctcaccgcctccaccatctctaatccctggcaaccactattctgttctccatctctgtaattaattgtgttaattaatgttatacaaatggaatcatgaagtatgtgtcctttgagattggcttgttaatttttcactcagcacaatttccttgagtttaatccaacttgtgtgtagcagtaattctttccttattattgctgagtagtattccatggtatggatgtatcacagtgtgtttaatcctttgcccattgaaggacatttggatagtttccaggttttggctattatgaataaagtgaccataaaacatttgtgtacagatttttgtgtgatcataaatcttcatttctctgggatatatgccctgtaatgaaattgctgggttgtgtggtagattgatttttagttttaaaaggaactgccaaataattttccacagtggctatgccattttacatttctaccagcaatgtatgagtgtttctccacatcttcactaacagttggtgtcatcactattttttcataaaccattcttatatgtgtgtagcgatacattattgtggttttaatatgcatttttctaatggctagtgatgctgagtatcttttcaagtgttttatttgctaatctataaggcccctttcgtaaaatgttcactcattttctaattagatattttttttaatgttgagttttgagagttctttagatattttagatacaagtccattgtcaaatatgtgatttacaaatattttctctcaatctgtaatttagttttcatcctcttaacagggtcttttggagagcaaataatttgattttcataaggttcaaattattaattttttcttgtatagttcacacttctagtgttaagtctaaaaactgtgccttgtcataggtaccaaaggttttctccagttttttttctagaagtttagagtttcatgttttacattggagtccatgatccattgttaattaatttttgtatataggtagatgtttaggtttagggttttttaaaaaaaaattacatatgtttaattgctccagttccctttcattgaaaagggtatccttcctccattgaattgcctttgtcagaaattaattggacatatttgtgtgagtctatttctgggctctttatcatgttacttttaaaaaatgcatcagttcctccaccaatacctcattgtcttgattattgcagttatatagtaagccttagcattaggaaaagtgtttttcctgctttattctttttcaaaaaatttttggatattctagggcctttacatataaattttaaaataactttgtctatgtctaaccgaaagccttatgaagattttgataagaattgcattatgcctatacattaatttaaaaagaactgatgtctttattcagttgattcttctaatctatgaacatagcatctctctcaaagcatttagtccttctttaatttctgtcattaattttttaaaattttcatcctaaagattctgtatatgttttgttgaatttatgcttaagcatttcactttcttggtaacaattataaatgattttgtgttttttattccactagttcattttcagtgtgtagaaaagcaatgaatttttgtgtgttgatctttgttcctacatcttgcaacattattgaactcatttattagttctaggaggttttttcatttttcttgtagataccttgagattttctatatagacagtcatgttgtctgcaaacaggcacagttttatttcttccttttcaatctatatgccttttttttttttgccttattgcagtggctagaacttctagcactatgtcaaatagcattggtgaaagcagacatccttgttccttgtcttagaggaacatttggtctttaatcttgatttaaaaaattccttgcactaagttaccgtgttttgcgggagggagaggtggggtgaggtgggggattcccccttatgtttacaagctgggattttttttttcctgtgtctaattattttcctcattggcttgaaaaatctgataaaacattttaggactgtgtataaaatagaattagccaagtgcaatgtctttattcagaagaaatttcatggacgttgtgcctactctcttggcttcctggcttcatggctttccagatcccacagtaagctctggatagtagaagttatagtaagactgacttctaaataaatgaagtgactttaaccttactgatatggcttaaagaaaaggagtggcctttaagatccatgaacttctcaaacaaaagtgataacgttatctccatgcatatataatactaaatataatgcaactgagagaagtaggctgtggtaagaaaggagacccaagtgccatctgaaggcagcacttaccactctgcttcatcccaccgaggaaacaaagcatgagtattgccagattttcttctgtttcaagaaaagccagaaatccaggtttttgcgtgaaatgtcctgattttaatgttgggaactaatttatattttgaaataacattgtgtgggacaagtgaacttgtatgtggaactgctttctcccagtggcgaccagtttggaccgttgatactcagcaagttcagccaagtgcgccttgtcattgtcagtcatcaaggtgatgtgtgattggtcaagcaattagttttgctcagcatctcgtgtgttttcaaaggacctgagggttcatttgcccatgcagatcttgtagtcctgtttattctattaatttatcttgcaaatctataatgttttattttaagcagcgagagccgtggcagcctttggtctggaccctttctaatgatcatttagtatcaggctatgtgggagttgattgttttgcattgcctgaaagccaacagtatcactcctcctctaggtgtggcagagatgtgagagagggagactgacagtctgtgggtgtgtatgcagtgttgggggaagcgaggcacaggggacaatactgtggtgtagaaaactagtctaaggtagcatcaggaagttcatgaagccaaaatgattttcataacagcacaagacattatttgtttttgcctccctctcatttttttttttttttgagacagagtcttgctctgtcatccatgctcgtgtgcagtggtgcaatctcggctcactgcaacctccacctccagggttcaagcaattctcatgcctcagcctcctgagtagctgattacaggtctgcaccaccccgccggctagtttttgtatttttagtagagatggggttttgtaatgttggccaggctgccctgtcattttttttttactagtgtccagtggagttttttaggggctacataacatgatactgtcattaatctaatggctaatgaaagggatatgtatatgtttttgtgtttaaaacaaacttctttggggtcctcaataatttttaagagtataaaggggtcctgagatcaaagagtttgagttctgctggactgggacagtggttgtcaacccagattgtacattagggtcatctgggaagctttaaaatagtactgatgcccaaccttaccgcaaaccaattaagccagaatctctgtggatgagaagtcttcattgtcatcatcaccatgaccatcatcgtcaccgtcactacaccattatcatcatcatcatatcatcttcattatcattgttagtatctccatcaccatcatcagcatcaccattattatcatcatcatcatccccaccatcatcctcatcggaacttcacctgcatggaggacaatccactatgcattaggtgctatgctatttgctatactccttattctcacaactgcccagagaggctgatattatctcactttataacaggaggaatctggatcggaaaagttaaggtaagctaattcacagagcgagaagagatagagccaggattcgaaaccagttctctgctacatcaatgttcccagtccttgcactattgagaacctctttagttatgctttcacccctccaacaccacagtaaattttttctttttttaaaaaaattatactttaagttatagggtatatgtgcataatgtgcaggtttgttacatatgtatacatgtgccatgttggtgtgctgcactcattaactcgtcatttacattaggtatatcttctaatgctatccctccccgctctccccaccccatgacaggccctggtgtgtgatgttccccaccctgtgtccaagtgttctcattgttcagttcccacctatgagtgagaacatgtggtgtttggttttctgtccttgtgatagtttgctcagaatgatggtttccagcttcatccacgtccctacaaaggatatgaactcatccttttttatggctgcatagtattccatggtgtatgtgtgccacattttcttaatccagtctatcattgctggacatttgggttggttccaagtctttgctattgtgaatagtgccacagtgaacattcatgtgcatgtgtctttatagcagcatgatttataatcctttgggtatatacccagtaatgggatggctaggtcaaatggtatttctagttctagatccttgaggaattgccacactgtctaccacaatggttgaattagtttatagccccaccaacagtgtaaaagcattcctatttctccacatcctctccagcacctgttgtttcgtgactttttagtgattgccattctaactggcaccacagtaaatttttatagattttataagcaaattgtatttactgtgcaagaattggtttattttttaaaccatgtgttgcaaacatacaatggttaattgtgatatttgctcagtacaagatcatcagatcactacacagacttgtaggtaattccacctaaaagcaaagagaactgaccccacattaactgagaagtctttacttatttattccctataaacgagccaatatgaagagaaggccttaatgtggttaactatgtaatttttttctgactttttgaaatactgagaagagctcatgactctcccatctcctaattctaccttggtggattttagactgaccacaactcatgggtaaatgagggaagacgaataagaaaccttgcttttttttcctccttgtttttggctggctgcagtggctcacacctgtaatctcatcactttgggaggccaaggtgggaagatcacttgagctcaggatttcaaaactggcctgggcaacatagtgagaccccatctctaaaaaaaaaaaaaaaaaaaaaaaaggcgacaggcggtgcgtgcctgtaatcctacctactcaagaagccgaggtggaaagatcacttgagcatgggaggtcaaagctgcagtgaaccttgattgcaccacttcattccagcctgggtgacaaagcaggacgctgcctcaagaaaacaaaaacaaaaccttaattttttggctattcttttctggtaagaatggtatagagatggggatgaggatggctattgtatgagagagcaaacagggtccaagcagtgctctgggctgtctaaggaccagtagtcagcttaacttctcaaatttccagggaaggagttcggagtggtagaatatcctgggtatgcccaaagcatcaccttgcaaatagcctgtcatgaataatttgtttcatttgttatgactggaaactggctttgtgtatgccagagaatgggggcaggaaagagagattggtgtcttgagctctctgtgcctctggggcagtgatgcttttcctctcatgtggaaggagagcatgactgaaaaggtgcacaaataaggtgtctgtgagagaaattaaccttccagatacagagacacaaccttccccaagaggtcctcattgctctgccttttttccttttttttgcttgttctaccattaataacagaaactgattatgacctcaaaagagaggagaaagcgactctccccaccctagagctagttaaccaccatatcttcctagatctcagttcaagagtcacttccatccccaataaaagcccttgagtgctgagcacctctccgtcatagcatttgtcctaggggtttttgtacattttcttgtgtgaaacttgggttgacatctgtatttccgactagattacagtttcctcaagggtagggatgtcttgcttgccattttcagttccagcatctagacagtacctcaagcaaacaaggccgaggggggtgcggatcacaaggtcaggagttcgagaccagcctgatgaacatggtgaaaccccgtctctactaaaaatataaaaattagccaggcgtggtggcaggtgcctgtaattccagctactcaggagtctgaggtaggagaatcgcttgaacccgggaggtggaggttgcagtgacctgagatccactgcactccagcttgggtgacagagcaagacttcgtctcaaaaaaaaaaaaaaaaaaaagaaagaaaaaagaaaataaaatgaatgaatgagtgagatgaatgagttagcagtgttggatttaagtgtcagattcttcccagcttgacttttttctttggcttagtgattttgaggtcccaagatttattttcctttcacaaaggtgatcactaccataagatcttcagaaaaggaaatgtggcaggccaggtctcactaatgcagatctctataacaactgtttcagtactgactaaatggttaagttaaatattaaaaaccagtgttcttatacaaaggctggaatgtaacaaaagcccatcaagagttttgcccaggccttttctgggccttaaaatatgacaaaataaagaaggaattcttaacaggacccatttaggattaaacaagttttattgtgggtctgaagaaactccccaggcctccacaaacaagtttattggtgctctaaaggaactccccaaacctccatgatttagcaggggacaagataagggtaattaccccagcacctggacccatttagattaagtaaatttactgaggctccaggggaagatcttccggactcagaccttagttacagattaaaagaagttaatcacttacgtcttcaggtgaatgcacacttacacgtagacatatagcttagaaggtatataagctctggaaaacgtcataattttgagttggcctggtgatgatttccaggccttctccctgtaactggttgcagaaataaaaactctcttcctccccagctcatctgcatcttgttattgggccatgagaaatagcagcccaaccctcagtttggtcctggaacagaaactctggatgaacactatcaatagagctctttgccatgatggaaatgttctatatgtttgctgtacagtagtcattagtcacatgtggctgctgagcacttgaaatgtggctagtgagatgaaggaactgagtttttaatattactcaattttacttagtttaaacttcaatagctacacatggctagtggctactgtattgaatagtgcagttctaaactatgtacttcaagtagaaggaaaatgatcccagaggggagtcataaatagaagaagaaacgaagagcaaagaaaattctaaatatatgcaaaaatgtaaatgaacactcatgctataaaataatgctattttagaaagttttaaaagtatacggtattaacatatatgacattaaaagcatgtaagttgggagaggattgaggtaagtgaaggtgttctgtgggccttaaattagatgggaggaaaataaagctactcattaacattagttttttaaataaattaaggatccatggattacagagtaattttaggtaagtgctaaaaaatagaaaataaatgcataagtttcaaactagtaggaagaaaaatgaaatgatagaaaatattcaaactaaaagaaagcaagggggagaagaaacagaatgagaataatgaatagaaaacactataactgtcgtagattttcagtccaaatgctctatttcattgatttaagggaaaacatttattcctatttttacatctctgaaatggcgaggcatatgccaagctgtgtgtattacaagctctgtcagccagcttgtgtcaacttggctggaactcttcatttggtcatcagttgagttttgtgtgtcattgtcattacatgttttgagtttaattgctgtttagaatgtcttcaaaaagatgccctctgacttgtcatagaaacagagcagcagaatgaaaatttagtattagtgaagcaattccaatcttttttgcaaacaccaagagctataaaaaagaagctactcatgacttgaagaagctgtgtactttttctttgcttctgggaatgtaaaaccagagaaattgccatatctctgagaattgaggaaagaaattttgaggtgcagagaaactgatgtgattgatttatgcacatcacagagatattgttaaggtgtgtgtctcaggaactaattggtggtgtttttttttttaattcatacataaaatatggctgtgttttacagtccatggtgtattagatgtttgatgtaaatgatttacattataaagctgaataaggaaagcaaacagaacccatgctgtttttgagatacagctaaaatcagctgggcatggtggctcgcgcctgtaataccaacactttgggaggccgaggtgggtggatgacctgaggtcaggagttcgagaccagcctggccaacatggcgaaacctcatctcttctaaaaatacaacaaattagctgggcttggtggtgggctcctgtaatcccagctacttgggaggctgaggcaggagaattgcttgaacccaggaggtggaggttgcagtgagctaagatcgcgccattgcactactccagcctgggcgagagagtgagactctctctcaaaaaaaaaagaaaaaagaaatatatctaaaatgtaagaatggagaaggctgaaagaaaaaggatggaaagagatataccacacaaaaactaattaaaagaaagcagctgtatctgacaaagtggactttaaggcaataagcattggtagacataaagagtgtgttcttcttatagattaaagcttaagttcaccatggagatataacgagtctaatatggatttggtcttggtattccgccagcatctgggtgcaccatcttctgctctcaccgctctctccctctgtcgcctcgtcctggtgtctcctgccccgccctccctcagtctccttggcggctcagtctctcgtcgcgttccggctcccctcccttctctcggttcggcctctctccctctcccgcccctctcgtccctccccctcttggccctccttcttttgcccggcgcctgtcgtagagtctgtgtttcactgtggtacctcgcgtcttcccttgcgttctggcgtcgttctgttcttccctcctcctgcccctgtgcttcgattgcctgtgcaccccgggtgcgaccggccttgggtgcaaatttgagctttctcacttattagtgtaagacatacagctaatttctaaatcttccaaacctcagatttttcatccatgaagtgaggattattatagagctcactaataacatggcttcaaaaatatataatgccaaaattgagatcaaaataataaatctatattacatgggagatcttaatgtacctcttatattattgatagactaagatgatcaaaaaaatagaaagagagcagtaaggagagcaagcatttaatcaataggaccaatacattttaatcaataggatcctcaggaatatatacagaataccaaacctaacaactgcagaaaacatgccaaacatttaggtacagacattgttggaaaatgcaatcttgaaacgagtggactgacattcagaagatattaataagagcactaatgatggggattgcaaccatgtctttactgacttccagaacgcttcttacagtaaacatgaaatcacataatttcttccactttcctactgtttcttgttctgggctctgtcctgcttactgtctaatatcttggccccttaaaagttgctaatcttccaaacctcattcctgtgactgggccgctggtccttgttcatgggccttgaagatactgactgtacacttatctggagcatccagtgcctaccacctgacccagattcctcattgcgctcctccctcctccacctaatgggatttgctcatacccgtgtgggacccctcccattttccccaactgaatacttatcaagacaacgcattgccatactccctcgtaccctgctctgggcatcagactgaatgtttgtttccattgaggatctgcagctgcatcagtttccccagcaccgtccaaccccttgagcatggctagtcctaaagcagagaattagcctttctatccctgctgctatacatgctgggacaaataataagaaatgacagcattttatgataatgcaggctgcaggaggcaggaggcaggaatcaaattcgtgcttatcaaatagtgctccaattctttgaatattggactatagaatatgtcatggatctatgctcaggtgggttccctattactcactccactgaggccaggttgtgggattagctgtccaagagggagtttcagtctcacagcatagggtcattctgagaattactggcccacacttgtgtggagacctccagagaacagaatctgggttggtgccatgtacttccaggaggagagaagtggcaggatgcccagccccacaatcagaggggaaggggcagagccacatgtatgaagatcctctccccagtacgtgccaatcacagggcttcctagcttttgggccaaggaaacaatgtgggaagcaaaaaaggacaattttctcctccctttgcatgaagactgagcagttttaccagattcccagggaaacacccttccactctgggttgaatgtgagtgagagacattcagctggaacactagaaaaactatttcctgagccactcacctttagccctagaaagtgttggatttgtccttcatctttgccacagtagagactgctgatagcatcagaacttgggctctggaattagacagatatgggtacaaatctgagctctctcacttattagtgtgggatgtagagcaacttttaaaatccttccaaacctcagacttctcatgcatgatgtgaggattgtaatagggcccacctaataggggtttttgagaattaaaaaagttattcaatgaacagcatttagcaagatgcctgaccattgagaaaataacaaattgtttattattattgttattattaaacatctttcctgcaccttctgactgggggcatcgtatcatcagaaatacttaggatgggatggattcctgcatgggctgagtcaagggtgcaataatggaggagtgaagaaggaagaaatggaggcagaaatccccaggagcccagcatggtacaaggctgagctagtgctgcagagcctccttggaacagccacagagcttgcatctggccctggaggaacctcttctagctggcaggaccagccacaacagtggccaggggatttcccagggcgtgggctcctaggagttcatttggaccaagcctgcctggagaggggttataacagggatccttccctactggcaggtgatttacccctcggtgagaagctcaggcatttgtttgatggaaggtggaaggccctgtgctgggccagtgactatcagggatgggcgggtggctggaaaatagcaaataagacaatatgataacacagttaaccaccacactatgtgaagctacaatatgggtatctgtaatagacaattccaatgtagagaataattctaaggtgtcattctcccccccaatgccataagcacacggcctctgcctgggtttctcactgtggaatgtcctcctggtctcctcatgcccagagagtgggaagtactcctcctttaacaccggctttcctgtcatctccctgcagccctcctcagccccctctgcacagggaggtttcctccctgctgctgcagtgctttgtacttgttagtggtacctgcacacaggtattggtgtccttgtctcaccaccctacatcactgtaagctccccaggagcaggcttcctgtttgactcacctgtgatcctccacctcccaccctgtagtgcctcaagcattgaggacaatcactggctgccccttaacccagaaatgctgccgagacaggaggccatggcccaagttcctggaatggggtattactacgtcagcacaaaggcctttgcacaaatgaaggctttaaaaatgcagtcctagtcaggtggaggagggcttataggattcccaggaatctggatcattctcttgagagctttcccttgtctctgttaaaactcacatcctacggcccaaataacaacaaaaaatggatgtaaattcttgaaataacttgtggatgggggaacaaggcccaccccccagatctgccagaagcttcaggtgagggtcccaaatgccaaaaagtctggtatcagagaggatggccagtgacctggggacacatgccctttgctgtgtcactcaaggagcagcagcctcggccccgcacagtgaccaggaccctggcttcccacgctgggcaggagctggtgtctgatgaagggaatgcctggcagcacgtgctgtctgtctcctcgtgtcagcttacctggctttgctgcgaagaggccacttgcatttctttatttttaattttttaaattttttaaattttttaaattttttattttatttttatttttatttatttatttatttttaatttttttttaattttttaaattatgctttaagttttagggtacatgtgcacattgtgcaggttagttacatacgcatacatgcgccatgctggtgcgctgcacccactaactcgtcatctagcattaggtatatctcccagtgctatccctcccccctccccccaccccacaacagtccccagaatgtgatgttccccttcctgtgtccatgtgatctcattgaatttctttaaaggtggaatctctcagtggggtctaatctgttcagaaatatcaaaagagtatccttgggaatgactggaattccagagtcatctggtaatcctcataaaacaactcctggatgtctctcagcacatctgccaccttgaacgcaggaggctggttcaaatggaggagcatcgctctactgcactttttttttttttttggcctaaagtgcaaaaggggatacgtttcatgtaaataaatcaactgcaaatcgctagttatgctgagccctgtcccgtgctgtggacacaaaggaaccaaaggcttttctccccgcccaacacacacataacacacacacaaaatcataaaaacatacatacccccaacacataacaacacacaacacacacacaaaatatatacacacaacacacaccaaacatgcccacaaacctgtgtccagagatagatcctactggtgggtttgtggtctcgctgacttcaagaatgaagccgtggaccttctcagtgagtgttacagctcttaaagatggcatggatccaaagagtgagcagtagcaacgtttactgtgaagagcaaaaggacaaagcttccacaacccagaaggggaccccagcagggttgctggttggggtggccagcttttacttccttttggcccctcccatgttctgtttccatcctatcagagtgcccttttttcaatcctccctgtgattggctacttttagaatcctgctgattggtgcattttacagagtgctgattggtgcgttttacaatccccttgtaagacagaaaagttcctgattggtgtgttttacaatcctcttgtaagacagaaaagttccccaagtccccactggacccaggaagtccacctggcctcacctttcaactccataatggcatgaaaatacatatgttgtacaaaacatacatacacaaagtatacatgcatctccccaaatatacacataccacagaaacatacacacaggaactcagctacctgtcaaaagtctgcatggtgattgcctctgcagtgagtagttagaaaagtgaatttgtttttcaataaattggagtccttaaaaatcgtgtaagatagaaaatttttaaaagtatataaaataaaatatgtatgtcctttggtctagcatttacacatgtaggaatttatcctagtggagtaatcaatgatatatgcaaagatttggacaagcatattaagcacagaattatgtatgcatatgtgtgtgtatatatatatatatatctcatacatataataatgtaaaagtgaaaataactcagatgttcaaaattgaggattagttagactatgatctgtccatatgtgacatacaagttagctgccccttattctctcgagcttcaacctcctacaaacaaacagtgtcccttgtatatcagtattggtacagataatcgaacttattgaggttttacatggggcaataaaggcaagagtttatgaatactccatactacactaggtagcaccccctattaaagacaaactcttctctctcatttcccttcctttccggaaccacttggttgaatctctacaagtctctattgcaactgcctcaacatggcaccctccctgcatctccatcttccctgtcctgagagcaatggcctgctgcccccacactcacatcctcattcattccagaagtgagcaccacagaagtgcctacagttaccccaaccaccttcttagaagataagttagtgtttgttttgactttttaaaatttttacttcctcttttccttcacaatctcatcccatcccaagaggtttatcaagaagttctctaaagatatgtgtctccttattgggaatttaacagaaatcagggatttgtattctagccatcaagggaataacatttttccaggtctttagacaaataatggaataccttgcagtaattagatacactattgtagaaaagtattgatgaaatggaacgatgtttgagatatcatattgagtagaaaaggcaagatacattaagtaggaaatgtatcttacaaaataatttgtcagacacactcctatatttgtatgttatataaatgcgtatgtgaagaaaggctagaggatgagaccacagtcttcagtgaagtttaagagatgaggctgcagcatgctcagaaaggcctgggttatagttcttccagtaattaaggatgtgatcttgggtaaattgcacatcctctctaaactgcgccaccttttgtctgtaaaacaggaaggatggtatttacccccagggtcatcaaaggatttggttggagaaaaataaataaatgggctgagcccagacctggcacagtgagagcacagtggttgactattgtgctggcctgttgttcctgtgttattgacatgctgctggtggtggtccagaagctattaccttaattggttatgtggatttcccctcatactgagcagctgtgtgtggtgttgtaaaacatagccatacacagtaactgacaagggcaaaagtaatggaaaaatgcaaggaagtgcagataaatagctaatgggctgtagaaggaagctagtccttggagggcttgatcaaggaaggtccttttgcatgtcacctttgaagaagagggacatagaagagtatagtgcatcccggagtgtacctggaagggaacatgaaaagaggacatttttctctgggacatggggactccacttgcatgaactatggaattggggcaaagaaccatcatgagaacaagggcttccttgaacctcccaggctcattggctgatctaaaccctgtgtcccctctttccttcactctcctctgttttctatacctgtattattggactggactggaagccacctgatctatcacaagtgccttgaaatgtgttgaataggtgtggcacagtccttagcagagtggcactacccccacaggaatttgtttatacctttggcatggaaaatagcagngaaatgaagtgantnccactganntaacctgnaagngnaatgncctanntttnnattattggcnnncaaaggaatactgtgttgtatttgcataaccactcacaaactgttgattacaaatgagtaccagacctagctccttcaagtaaaggatcctgagaactgaaggcaaacagagctccaggagtccaagacagagccacacaccacgaggatccctggcccaggtaggtggtcctcctgcgctggctttcaaggccaacaggatggatggggaagtagagtagcatctggccatctagacccttgctttttatccccactggaagcacatctgaatttctaaatatgatctctgagacctgcccagaacaccttgctctcagccccagtagcagcctgctctctcccaggagggcttccactaacaagtagggcattgctggagggccaggcagacactagcttaggaaatccacaaaccctggaaatgctagtcccttctctgaaggctcagaagactgactttagagtctagaaaatattggtccttgggaacagattttgagtgcaaagagatggacttcagatggccagatgcactgcttctttagggaattctgtgaaagctccctgcatttatcttaatacaggcagcagatttcatgagtacccccgagggatggccccaggtcctccagcctgtgagcatccttctgttcttcagcagcaccacagtatctttatatgtctttggatacctatgtttctgccagacatctcttgctctgatgttctggctgccaaattctctgtcaagcgcctccaattttttgtgtcctttgatttaccccaacatgacaaaggcagttgtgcttcatgtattcagggatactgccaaaccacaaacaggttaaaatcaaatagcagatatccctgttcctaaagacccatcagctctacccacctgctcctgctcactgtccttattgttgagtcctgaagcccttccttgtcatttttattttttgcatgaacaatttagttccctttgtctcactcctaaacctttctcaaaggattggatttgtacacaaactgcctatctctgcaatcttagaagtgatatgattctgaacaaatcacttaacttttgattttttatcggtaagatgggaataccaatttttgctccacttctgtcctatgttggcctgggctgatgtcgaaagctctcggtcaactgagatagggtgtgcagaatttatatatataaatatatctcctccaacccctcccaatgaagcaagtcacgtgagtcaatcctaccctaagatattagggattgagcctcctgggacatttggtggcttaggttttcatgaaaagaggttgcagagcaactgctttttgttaggcaaagattaggctactgcagagactcagcaaacttctatagaaggtgtcagatggtaagtattttaggctttgcttgccagatgatctctcaactagttaaccatgctattgtagcctcgaagcagccagagacaatatgtaaacaagagcatggctgtgtttcaataaaactttatttaaaaaaacagtcagggaccggatttggccaaaggccatagtgtgccagccccaagactagagcaatgcacttttaacttttttattttatttttgtaaaatgccaagatccacaaaaatgctattgcaccccgtgtgttagcactgtgactcaaggtttgggaaattctgctttgaaggtgtgatagacaggagagcatggtctggccccttggtgcctatctggttgcagcgagcatttctaactacagagcaaggccagtggtctgttcagcactagggacatccagcaaggtgtcctggggtgagaagatgccataactggtcccctttctatctccttaggtcttggacttcattccattttctgttgagtaataaactcaacgttgaaaatgtcctttgtgggggagaactcaggagtgaaaatgggctctgaggactgggaaaaagatgaaccccagtgctgcttagaaggtaaggttcttgtagaaatctacctcagggccaaagtgttaattcctagagcagaactttgctaggtgctgtgcacagacccagttgtttcctgctgacttgcacagtaagtgagctttcaaatttccctggacaaataactagacaagagaaattctggaagggaaaaggaagctttgcttcagtgtccaggcacatcaggtagtagataaaaggatcatcctcacctacagatttggggctttagcatcctgtttgccaactggatggttgcatatccttcaaaatgcacctcttccctcccaaccttcccaagtggaagagaagcctctgatgagaagcgactctctaaggctgggctgaacaaatgacccaggcacagggcatctgagtattccatgaggaacacatttgggtgttgcccatgggggacaataggaggaggcttttgacccaaatgattgtttactgaggtgtgacgggagaggcctgtgacatgccagaggccaaacccgtgatccagttcacctctattctatgtttctgaagagggaagctatgatttaatgtcattactatcatgctgctctagtatttctcagcacatacacagaagagggaattaaatggtctttgatacccctaaatccttggaaaatccgaattgcatatgctaacctcactgcgtctgactgcagacccggctggaagccccctggaaccaggcccaagcctccccaccatgaattttgttcacacaagtaaggcctcggggtgaggtgatgggggtggctgaggtgcgagggtggggatgggggatggagccattgggtcctcttacagggtgggagaattgtagaatggggacacctaagggtgctggatggggctgaagtctttcctttgtggaagcaaatcccattaggagataactctgggaaagatgagcccggggaggggcaggtgatgctcacctgctaagaggcacagggcaaggaagagtttgtgcctgggaaccttccaggtgcctcttctgaccatagccaagagactggagacacagacctcctcccagcactgaggacaaacagccatggggccagtgggggtgcagggacacccacaccactaagggctcagggcggcgccttcagagcctgaaccttcctctcatgctgccatttgaacaccacaacaccctaataggaaactgttaacattgccactgttcaggtgtggaaaccgagacagacagtggagattccctgccctaggtgacacaggtaataagtgacagatgtggaaatttaaaggtactataacgtctgtctgcctgactcaggcttaaggctcccatcacctcctcttctcaggacagagtcaggaggcctcagcctgagccccagctctagtgcaggttcatgtgggaatactgagcctcactagtacaatggcagagaggaccaaatgggaccaggtgtgtaagggtgcctggcacagttgggggaggctgctgtcacttctccaccgctgctgctgcagttacctttgatgttttagttttgttgtagttacaccattgctggctttggatctgcactgtgtccactccaggtggaaccacgcacacaagcctctctgtcgggcctgtcctgacttctccttgtcagggctgggatctccttcaaatctggcggaagtggttctccaagtctggtcctcaaacgtcagcagcatcagcgcctagaagtgttaggaatacagattcccaggccccaccacagacctcctgcctcagaaactcagggggctgaggctctaggggctgctttaacaagccttccaggttatcgtgacgcaccttgaaagtctgagagctactgccctacagaaagttgctagtgccctaaagctggcgctggcactgatgttactgctgctgttggagtacaacttccctatagaaaacaactgccagcaccttaagaccactcgtaccttcagagtggccttgagaaagatttggggtcaaggatcatgagcgagaacaccacttaagaggatagtgaactagtctgcatgtgagacgctgagatcctatgtcaggctgtgataggagggaaacagaaaccaaaggaaagaacagctttaagaagcgcttaagaggtacaaagtaaaatgatggtgctagaaaagtagcttcttaaaaagagcatttttcagtctcaccctggactaactgaatgagaatctcaggagtgtgaggcccaggtatccatggtcttaaaatgccacccgccaggtgattcccagtgtgcaccaggggtgagagtcacagccttaggccatgccactcaaagggtgtcttcagaccagcagcacccacagctctgggagtgcatcagaaagacagaggcttggcaccacccacacctactgaaccatagtttgcaggtgatttcttgcacattaaagtgtgggaaatggaaaagcttagagttcagctagctcggtgactctcagtcaacctgcacctgctccatgaactcagactgcctgggatgggcccagaaaagctcctgaggagattctgatgtaaggcagggctgagaaccatggatctcatctgaccccatatcactggggagttacttaggatcttgcctggggccagtcatctcttccatagacactgagagtgtccacgatgcttggggcactacagggtgggaggtggaggatcacgggtgagtcagataggaagcctgctcctggggacattacagtgctatagggcagcgagacaaggatgccaatacctgtgtgcaggtaccactgacgagtgcagagcgctgcagcaccagagaggaagctaccctgtgcagagggggctgaagagggctgcagagaggaggtggcaggaaagccagtgttacaggaggagtcctccccactctttgggcatgaggagaccaggaggacattctacagtgagaaacccaggcagaggccatgtgcttatggcatgggaaaagaatgacaccttagacttattctctacattagaattgcctatcacagatacccatattatagcttcacatggtgtggtggttactgtgttttcatattgtcacatttgccattttccagccacccacccattcttgacagtcactggcccagcctgggggcccctgttctttatcaaacaagtgcctgagctctttgcagaggtgagggtcactggtccaatcagaggccaggagggaacgttcccttttaagaccctactctaggcagggctggcccaaatgagttgctaggagcccacgcccgtaagagacccctctgcgcgactgttgtggctggtggctgctgcgaggaagttgttcctccgagggcgcaggtgcgggagtttgtggcttttcaaaggagccactaaagctccagctcagccttgcaccgtgctgggctcctgggggcttcctgcctccaaccctcccaactcttccatcaccgctcccttagcctggccagtgcagggatctgttccactctaggcactgctgagggaatgatgcctccagtcagagggtgcaaaaaagagagttaagaaaaacaatgattataaaaagtcctttttatacgccagacattttctttgctcaggctaagtgctacttatttgagtaagcattttagttctcataactcctctctcaagtaggtgctgctattactttcatttcacagatgaggacattgaggtttggagagacttagtaacttgtcctctgtcctacagcagagctgggatttgaatctatctgtccaaatctggaacccatttgcttgcacagaaagcttaattgcttgtcccagcaagatagaaagcctgggagtggaagaaatattcagtggctgtgatgtctgagcccacaggcagggtggagagctagggctggggcccttggacgtggggaagaaagggctgagtcttccattttcaatgtgaagtgttgatatctggtgatattgatctaggtcgaaaggtgaagagcttaaacccgaagaaattcagcattcatgaccaggatcacaaagtactggtcctggactctgggaatctcatagcagttccagataaaaactacatacgcccaggtgactctcagttttggctgtgttttctgcctccacctagcaggggtaaggcctcctgctatgtgggctcaactccatgctataccatgccccatctccagcaggtggtggaagcggggaggagaggccccagggactagggcatcagatgaagtgtctctagcaatgaccagatctgaaagtagtctttctggaagggctggagaaaaagaaggaggcagacacttagactggaagaagaggaggcttaaaccggtgtgatggagggagaagtggaccacagagtcaagggagagggactgtgcatcaggcctgaaaccccagcagacaggagagacctttccctgctctcagaacccacacatgttctgactgtctttttccagagatcttctttgcattagcctcatccttgagctcagcctctgcggagaaaggaagtctgattctcctgggggtctctaaaggggagttttgtctctactgtgacaaggataaaggacaaagtcatccatcccttcagctgaaggtgagagttctagctcagtttcctgggcctttggctaccccaaagtaaaaggccaagatcctcaatgcctctcactttcctgcaaattcttatcttggccaatataacagggacatccacctttctggaagcaccaggcagaagagccccataacttcttctctggttccttgccccttctagggaaggaggagagactcctcacagcggggagacaacaaggagctgagcacctgttctccctctcctgggctcactggtcctggccctgggcgggtggcggtcccctcctgctgtggccctccatgtggcaagcaacacaattggggccaggaccctggcgtgctgctgtagggtaggagggtgtgagggagcactcgggaggcagtgtgtctgccctgcaaatttagtcctggatggagcatcctttcacttgaggggagaaatcttaggaagctgaattagatacagatctaagccatattctctaattttaaaaactatagagctgagattttggtatccatctgactcttacatctctctctctctctctctctcagtttatttttaatctgggggacaagaaggcctggaaaagagggcatgattgcttatcatcccttaaataccagtaccaaggctgacacgtcatctttcccaaggaccatctgccttctctcttttcctcctctcctgtgtaaaggcctggaggatgagcacatgtgctgtgttttcctccctctcaaagcctgtgctatctaattaatcccttttacctcacagaaggagaaactgatgaagctggctgcccaaaaggaatcagcacgccggcccttcatcttttatagggctcaggtgggctcccggaacatgctggagtcggcggctcaccccggatggttcatctgcacctcctgcaattgtaatgagcctgttggggtgacagataaatttgagaacaggaaacacattgaattttcatttcaaccagtggtttgcaaagctgaaatgagccccagtgaggtcagcaattagggaaactgccccattgaacgccttcctcgctaatttgaactaattgtataaaaacaccaaacctgctcactaaactttctgtcattgggtttcatttctcattcatgctttaaggatttgtgtttttaggatatagcaagaagcttgtttaattacaaagttctgggttggaaagagaccggcttatgcttgtgtactgctaccctgaaccatcagacatgcatgtgtgtgtcatatgctatgatgtggccagtctgagtgcaatacttgcagtgggaaggagcagctgggtgcatgctgtgctctagaattagtctttcctactggggtttggtagattctgagggcattgatcctggggcagaagtggctgagtctgtgtctagggtacagtgtgcaagaaagaaatgtaacagcaagtcacaatccagccaagtgatagtggaaaaggggtagttaggtcccagataaggagcagggtgacttgacctgtgggaaaggcacagagacaaggaatctgggtcagatgacagccaggagaccaggtgaggagccaggtactgtctgggaggcttgtcaacaagggcatggtcctatcactaagcagggctcagatcctcataatgggggagtggaaggctggccgaacagaaatcagggcctggaaacagagtgagggggtggagacaggagactgaggcttggaaattagtttattagttttagctcttcagttacaagcaataataatagcttctagcttatttaagcaacaagtatactacaaaaggagctttctagaaggatattgggtatattcatttcttactgctgctgtaacaaattaccaccaacttagtggtttaaacaatgcaatgtattatcttgcagttatggaggtcagtctggaatgtgtctcactgggccaaaatcaaagtatcagcaggatagcattgctttgggaggctctaggggagagtcaatttccttgccttttccagcttccagaggccacctgcattccttggctagtggcccactcccatcttcgctgcttgggtttttctcacactgctttgctctgaccctcctgccttcctctttcacatataagaacgcttgcaatttacatcgggctcacgtcaatatccaggatactctcccgtctcaaagaggcttaactttaatcacagatgcaaagtcccttttgctatgtcatgtaacatatatacagggtctggggattagaatgtggacattttcggggtgccatcattctgcctatcatgtgaagtaactttcaaaatggaaagacatgctgaagaaaaagtcagggatttctggcaggccagaaatgacagaaggcagaaaacgttggtcccatcactcagatgggtaagagccaatcatgctttttgtcagttagcaaaagattgagattccaagcaaagcatgcaactgccctagtttgggtcatgtgtcgactccttggtcagtgaagggcagcacaccttgatcaatactccctccaagactgtaatccacgaggccagtgatgttcctcaaagcagagctagagagctaatcccaggagagaggcgtgtgggtggtgggcaggaagacaaagctcagccgtaaaggagtagtagggacagcaccccaggcatggaggctcaagtgagatgatacccatgggaaaagctctgataaggtcagctccttctgtttctcgatcctgatggtgatgtgtgatcaacaccagcccagtgacaaaaaaagtacatagtatatttagtagatgtttcccacacagagaaatggtaaatattcaaggcgaggaatactccaaacattttaccttgatcattacacattccgtgcatgtaatgagtacttgcatgtatgccataaatatgtgaaatattatgtatcactatataaaaggaaaaaaaatgtggccaggtgacatccatattttggagaggaaggcatgtcttcttcataatatcacaaaactattttcacaacaaagacacagctgttcaaattagtctctgagccggggctgtctcatggcaatgaggactctggttcccttacagactagcagaaaggagatggggcttactgaccatggccttgaggaggccgaacatgcaggccaaatggagacacagacagcctgggcttggtcctgctccatccccttccaacctggtgagatatagtgagtcactatgacgtgggtcactcatgcttcctgtgaggttccactcaagacagcaagtgcatcaacaccttactgaagcacaaggccctgtttgttgacggatcccccatcgcgttgatgtggtgctcgtcattgagtagggctttttgggtgagacgtgacagaccccagctatcatgcattgcagccctctggtggaaactgtgcttcaggctctagatttcaggctctagactgactccgggatgagtatttggaagctgaagtcaatctgtggtctcttctcccgtagagcaggagtcagcacttttcatagagtgccagattctatatatcctgccacatgctctgttgttacagaacgaagaaggccatagacagcatggctgtgattggcaaatacacaaaacaggcaataaggctgtatttggcctttacgggcagctttgccaacccctgcactaacacagagcttaaaggctggtcggtggtgtgctggagctagcttatatcagcttgcaatagccaattgctaacatctcttccaaactctgtgtctgtgccttgatgttgatagtttgaaattggctaccccatttaatgctgcaatcttttctcaccccagcactactgactcccctttgccctgtcttatttttctcactctaacatgctgtatagttttcttcttacatttattgtttgtgtcttccactagcatgtatgtcccacaagttctttgctctgtgatgtatcccaagaacccactgcagtgcttggcacttgtaggaactccataagatttttataaatgaagaaaggaagaaaaaagagagggagggagaaaggaaaggaagccttctatttaaatgatggccttctccatatttctatagtaatatgacttcccttgcaaaggagatgcattttggaaaatgtgtataaataaactcaggtggttttgaatttcattttcctaactgtaattgtaatcattggtctttatgtttagtgaaaaagttttggcccttatgcctcacacctgagaatcccaaagtattggtttgttagagctcccatagagaaccataaactgggtggcttaaaacaacagaaatgtatcgtctcctggttcaggaggccgaagtctgaactccaggtgttggttcattctgagagctctgagagagaatctgttccaggcctcccttcagtttgtggtagctccagggttccttggctggtggcagcaaaactccagtctctgcccccatcttcacatgactgtcttctctctgtgtttctgtgtccagattgtcctataaggacagagtcatacctgaattagggctcactcgaatgacttcatcttaagttgacctgtatctgtaaagaccttatttccaagtaaggtcacattcacagctactgggggataggacctcaacatatctttttgaggggacataattcaactcataatacccaacatgataactgttcatctcatgaaatttaatgtctctcaaaaaggtgattctcagggcatttaatctgtgacagaaactcccataggagaacattccaaccagaagctcctttcacagctggtcactcctcctaccccatccgaggtcctggggcagggtgaggcaggtggggacaagaagaaggctgtctcgggtgtagaaagagaagacccttattcacccggcactctgttcatgaatgagctatccagcataggatataataaatcgctttaggagtggtagactccaaacatttttttggtcccagttatcctaatcaattaaacaaactctagaacacatcttgaagtgcaggcattgggacattatgaaacttacacagaattcaaaaatttacaagggctaaataaaacagggtctgacatctaatattttcttcccacattcccatgcactgtctggctcaaccatccccaaccctcactctcatcctggtggacacatgcctagtgatgtgatcagctggttcacagggggctggtgatggtggatatacagcttttgccaatttccatggcataactactccaaatatggccaatttcaaactaccaacatgaaggcacagacacagagtttggaagagatgttagcaattggctattgcaagctgatataagctagctccagcacagcaccaccgctacctttaagctccttgtgttagtgcaagggttggcaaactgcagcctaaaggccaaatacagcttactgcctgttttgtgtatttgccaacacagccatgctgtctatggccttctttgttctgtaacaacagagcatgtggcaggatatatagaatctggcagtctttaataagtgctgactcctgctctacaggagaacacagattgtcttcagcttccaaacattcatctctgagtcagtctagagcctgaaatttagactgaagcacagtttccaccagagggctgcaatgcatgatagttggggttttcacctctcacccaaaagcctactcaattttttactgcaaaaacatgttatcatcattattttttacttagcccacctttccttggcaattttccataggaaaatgcattctaaatttcaactaatcaggggacttggagcctctggacacccccttgttccttgcccacagtcccttgcagaaggtgccttatcagagcggctccatgcaggggctcaggacaggatcagatgtcagttgcaccaagggggcagggacagatcctctctgctgaccatgcagaagggactgttcagtgcaccgtcatggtcctggtgatttctggcccataagggaattttcacatgcatcgggtgattgtcacatcagcacaacactgtgaggaaggcagagtgagaatttgtgtgcccattttataggtgagaaaacagatgcagagacattaagtaacttcaccacagtcatgcgggttttaagtggcagactttcaggtgttgtgactcctagtccagagttctttgcactgcccctgaggtgctaaaactctactgtgctttaagactcacttggggagcttcctaaaaagagagattgcacaacctgagattcttgtttaactgttttgggatgtagctcagggatctagctgccttaaaaaaaaaaactcccaagtaattctgatgcaagcggttctttcttgtccacctttgaagaaacactgcctcctccctatacatttcattagaaaatggtaacatgtttttcagcctgagagccatttctgggtgaccggacgtcggcagcccgctgtactagctttcagtctaggcttaaacacacatgataggagatgtcctactccagatgatatgagtctgaaccatggaaaaattccattgtgtggcacatctggtgggtgtgcactgtccccagcagtgaggcacccagtgaagacagcagctgggagaggcttagttacatgcagtgggacagtgtgggctagactgctgagccctctgcagtttactctgtgtcaggcaatgagggtgaaaggctgatcagacccacgtgcagaccataccctccagggagacagatatcagtcaggacaaccccaagtgtagctggagaagcagtgcccaggtatgaccggatgtgtatccaaccaggaaatctgcatataaatataagaggagaaaatgaacagatgttgctcttatatgtagatatttatgaagagcatataattttgttttgtgtgttttaggaagtttataagtatgcctaaaaaaatgaatagtatatactgtaggtatttttcacataagatattttgttttccatactaatccacatgaccatggtagcaccagtataatataacaacctcctctacaaaagcagaagaaagtgaagctttggaaggaagcacccagtgagcttgcccctttcaggtgggtgcagtgagcaggagtcagtgaggttgagatcctttgagaggaggcagtcattaaccaggaaatctgcactgcatcctggccacacctaacccttggacaatggtgcttggagcgccttccagctcttaaggcttgcgatttctttctctcactcttcacccacgatgattaaatcttctcctacagaattggacaacaaagccttgagttcctgcctcccctggtgtgatcacgaggcatagacatggccaggaacatgtaggtgtctttgaaagctgaacaagttagtaaatttcaaacctcatttcacccaccagtaaaatgggaataataataaacctattttacatagggttgacaagaggagtaaagaggtattcaatgaaagttcgttattatcatttgtagtagcagtgttgataatatcaactgaaagttcattatcattattagtagcagtattgataaccctcttttctgtgccttctcactggtgggcccaggccatcagcaatgcccagggtgtcatggatctctgctgcatcgggcaccagctgtgtcaatggtgagaacagtacaagggtgggcagggcaaggcaggaagcacccaggagcagcagcttcatggggtgaagatgtcaggagcttagggacagtcagagcgggtgtgcctcctcttgtggagcctttctgcgtgggtaggacactgctggcagctgtggccatggattcacctgaatatgggtggaattaggcattcagctgggttagctgtgcctagaaggaggaactctaaactgagaacttgtccctattgccacctctgataggcagatgatccatccatcagtggctgagctgaggtgtgcatggggatgggtaagagcccacacacagggctgatgactgagtctatttagaacaatagatgtaaaatctgataatgtaaaatgtgatagattattttgtcaattagaaatggtaccatataattatatatatacataaacatgtatacatatacacacatatacatgtgtgtataaacacacacagtattgtcccctactcatgtccataaacctgatgcctttagctgggattcccacgtttcactctcctctctgtcatctgctgtctatatcctccccatcctgtaattctggcttatatgccacttcctccctaaagccctccctcaatcccttgctggaagtgacattttcctctttgagctgcccctgcttgtgctttggtgaggtcagctgtattgcagtaccttgtattgtggttgtcacatcatcgtatagaattaatttctgacacattccgtatttttcaaagggcctagtgtggggctttaacagtaactacgccaccacgcccagttaattttttgtatttttggtggagacaaggtttcaccatgttggccgggctggtttcgaactcctgacttcaggtgatctgtctgcctcagcctcctggagtgctaggattgcaggcatgagccactgcacccagccacctatcaaaattttaagtgccatttttattttttattttttgtagaaatggacaagctgatcgcaaaattcacatggaattgcaggaggttccaaatagccaaaacaatcttgaaaaagaagaacaaagttggaggatttacactttccagtttcaagacttagctcttagctacaaagctacagtaatcagaacactatggtcctggcataagtgatgctggacaggtgagccccaaagtgggacttaacctgtgaaggttcttggccttgcccaggaaggaattcaagggcaagccaatgggacaagaaaacagctttattgaaggggcagtattacagctccagccctgttacagctccagccctgttacaactctgactactcctgcacagaagggctaccctgtaggcagagagtagcaactcagggcagttttgcagtcatttatatccacttttaacacatgcagattaagggacaatttatgcagaaatttctacggaattggtaataacttttgggtcatggagtcatcatggaaggggggcggggaactccctggtgttgccatgatgacggtaaactgatatggcgaactggtgggtatgtcacatgaaaagctccttccaccccagccctgtttcaattagtcctcggtttggtccagtgtccaagtcctgcctccagagtcaagtcccaccccctacctcttaaggagagatgtaaatacatggaatagaattgagagtccagaaataatctcatacatctatgatcaattgattttcagcaaaggtgccaagaccattcaatgagggaaagaatcatatttttttcaacaaatggtgctggataaccacatgtgaaagaatgcaactgggcccttatctcacaccatatacagaaattaactcaaaatggctcaaacacttacatgtaagagctaaaactataatattcttagaagaaaacagggatatatctttatgaccttggatttgctggctgattcttagatgacactgaaagcacaagcaacaaaagaaaaaaaaataggtaaattggacctcatcaaaatttaaaacttttaggctgggtgcacacctgtaatcccagcactttgggaggctgaggcaggaggatctcttgagcccaagaagctgaggctacagtgagccgaaattgtgccactgcactccagcctgggtgacagagcaagaccctgtctcgaataaataaataaacaaatatataattatagatctctggatcttgccttcggagactgactcaactaactggtctgggtgggagcccagccatttgtattttttgaaaactctccaaatgattttactgtgcagccaaggttgagaatcactgtatcatagggttggactcctaactggaaacagtttgcaccatcaggtgtcgcagcattctgataatagttaagctttcctcctagattttctgatattagatgagtcatgtttacaagtttttaccaagagacaaactatctttctgcccttactttctctcttatactattctaatcccagaaccctttggaacttccactgagagatgaatctagaaagtgactctcttggctacaacagagagtaatgttggcctgtttgtgccagatccagttggtgctggtggtgggacagcacctccctgaaatcccctcctctcccgtcagattcagtcccccatttgcatcacgtacaatcatcactatgggtttctattaccttgctagggcatttggaggtaccatatataccaactattagttttgagccatggttcccaaagtgtggactgtagggcacctcagcacactcacgaggtgtcatgggatatttaaatattctgaagaaaacacagtgacatctgtcaggcccgtgaaaaccgttggcattaaattgtctcaacccaattgcttaagaagcagaactggccaggcacggtggctcacatctgtaatcccagcactttgggaggccgaggcgggcagatcacgaggtcaggagttcgagaccagcctgaccaacatagtgaaaccccgtctctactaaaaatataaaaattagccatgcatggtggcatgcacctgtaaccccagctactcaggaggctgaggcaggagaattgcttgaacctgggaagcggaggttgtagtgagccaaaatcttgccactgcactccagcttgggtgatagtgagactacatctcaaaaaaaaaaaaatgagagagagagagagaagcagaaccatcaggtgtttcttttggcttaaagtactctgtgaagaaattcctgggacacgaaggataccatgaactgagagattttgggaacctctgctttagaagctggaggtagcattccttgggcacagtactgccttgggatcagcaaatccttttgatggtgcatttaggtgtggcaagacagctcttagagtgggaccgggatgtgcttggagacagagggaactagattgagctgcccgataaagacatgccagcctggcagagtgtagtgactcatgtctgtaatcctagtgctttgggaggctgaagtgggaggattgcttgaggccaggggtttgagatcagcctgggaaacaacaagacctctacaaaaaaaaaagaaaaaaaaaattaaccacatgtggtggcatgcacctgtagtcccagctacctggcaggctgaggtaggaggatcacttgagcccaggaaggtaaggatacattgagccatgactgtgccactgcactctagcctgggtgacagaaagagactctgtctcagaaataaattaaataaataaataaatatatagtggccatgacatccctagaaagacaaggtcctgggaataggtagaagccaagggaaatgagaaatgagagggggccctggagctggaactgggggagcaggatggcctctgagaagttcctgatagtggtgtcactgatgtgtctgatgtttagttgtaattatttgctgggcccctgtcatccctcatatctgatagctctttgctagtcaaagtgtggtctggggatcagcggcatcagcatcacttgagaacttgttagagatgcagaatctagagccccacctgggacccagaaacagagcctgcattttaacaagctccccaggtgattctcacacacactcgcatttgagaagcactgggctagttgacagattctcaggcatggctgacattgaaatatccagggagcaggcttggcattaggatgtttaaaagtcctccaggtgtttctaaagccaggtttgaggaattactgggctgatacaaatgttttgtgatgatgctttgtgtgtgtgtgtgtgtgtgtgtgtgtgtgtgtgtgtgtgtgtgtgtgtgtgttgggagttctgggtcagttggcaccaacacaggaaacaattggaatatgtgagccatgacagaaaggtcaggagataaaagaaattagtgacatgagaggtactcctcaggtgttaggaaatagggtagagcaaaccaggttttccaccatatgttggataggggttcaagtaaatttctacttaaaaattacaaacaggggctgggcgcggtggctcatgcctgtaatcccgcactttgggaggctgaggagggcggatcacaaggtcaagagattgagaccatcctggccaacacggtgaaaccgtgtctccactaaaaatacaaaaattagctgggcatggtggtgcgtgcctttattcccagctactcgggaggctgaggcaggagaatcgcttgaacctgggaggtggaggttgcagtgggccgagatcgcaccactgccaatccagagcgagactgtgtcaaaaaaaaaaaaaaaaagaaaattccaaacaggatgaccctaagcctgcaggacttggagacatctaggtgactgatactcagtcacaaaacataattggtcacaggcctgatgaaatgcacagcagaccttcagatggtatgcactcaagtgatatccacaagtccacctaaagaaatgctatattcagacatttggcatcaatctctatcaaacaaagatagtccaaagcaatgggttccaaaaacactttcctaagacaaattctctatttgcttttaatatcagtcatcccagcccttggaatagaggagcaaatgataccagtggtaccctaccacaatgcaccaaggtattatactctcatgctccattttctccctctgtctacatcactaataactcattgatttctggtgcaagccctgctgggagaaaaagtctactcttgtaccttggagcaagttgctcagagtaggtatcgaggataaaatttggaaagttagaaaagctattagaaggagatcctagtagttgaaaacacagcctggccaagtcaatgatgctatttcatctccccagccttgcatgtccatagctaaggaagacaatttaggcttgggctagaggatgggaaagggcaaaattactgatgccacagcccagagaggtattctagtaatctgagggtgaggaccacatacctggttcagggacgtacagtgttgacagctgtgagtggatgcctggagttctggcgtgtcttctagcacaatgatacctgagactcttgcatcattgggaataataaaatgggagtggatagatatgaaattatgatggcaataagcaatcagctaatagcttcattgatgggacagattaaagatggctgcaaatcctttggtccaggtttgggatataggcagcatttgtattggaatgctgatagtctgaggccatgaaaagtccacctgcagtagtggtaggaggaacaagcctcactttcttcaatgtgtgtgactgctgtcttgattccctgggtggccagttccattcgtgtggttctttggtccacttgactctggggtggctctgtgatggcttgaccaatagaatgtagtggaaatgatgctgtaatcatttccagcctcttccagccttaaggaactggcaacttttatttctgtcccttggaatacttgttcttgcaacccatccatcatacagtgagaaattctaagctgccccattaagaggcccacatggtgataaattggggtcttacatacagccctagctgtgctcctagctgacaaacagtagcaacttgtcaccaggcgagtgaaccacttaggactgtatactccagccccagttgagcaatgtggaacagagtaaaccatctcagcttagccctgcccaaactgcagaattatgagcaaaataatcccctaggctttgggctgatttgttccagattactggaacagaatttggtaccaggggtgaggtgctacagcaatgaaagcttaagacacgtgactttggttttgggtctgagtggcaggggaacttggcaggcctcaaggaaacttttagggagggttgaagcatagtgaggaaaacagtaggggaagctagaggaaaaaatgatgcttggtatgtagtggtgggaagtttagcaaaactcgcctgatgtaatgtgggaaattgtaagaactcagaacgatttaagggcatgttttataggtcctttaagaaacttctaggccaggcgcagtggctcacgtctgtaatcccagcactttgggaggctgaggtgggcggatcacaaggtcaggagatcgagacaatcctggctaacattgtgaaaccccgtctctactaaaactacaaaaaaaaattagccgggcatggtggcgggtgcctgtagtcccagctactagggaggctgaggcagaagaatggcgtgaacctgggatgtggatcttgaagtgagcccagattgtgccactgcactccagcctgggcaacagagtgagactccgtctcaaaaaaaaaaaaaaaaaaaaaaaaaagaaacttctagggctggtcccgtggaagcctcacacatggtacacaaaggctgtcttgaaaagaaacgtaagtgtgttttttggtttaataaaattgattataaatggataatgcaaaacattttaaagaattttactagcttacattagcagatttggatccagtgattgttacattctggtactgagcccctgaattacttctttgagtaaggcattataccaaagctattgatagttgggcttatcagggtgtatgtttgaagaactactaatgtcaaaaccaatatttcacggtcgacaagaggacatcagaactggtaatccttattaccatgactggctggacagaatactcaatgtaatgggatttcctgcaaataaagacggggaagatgtaaaaaagatgcctgaacattcaacattaatgaaagatttcagaagaaatatgtatactaactgcagccttatcaagtatatggaaaaacacaaagttaaaccagatagtaaagcattccacttgcttcagaagtttcttactatggacccaataaagtgaattacctgagaacggggtccctgtttcttcgaagacccacttcctacatcagacgttttcaacagttgtcaaatcccctacccaaaatgagaatttttaacagaagaagaacctgatgacaaaggagccaaaaagaaccaccaccggcagcagggccataaccacacgaatggaactggccacccaggaatcaagacaacggtcacacacagggacccccgttgaagaaagtgaggcttgttcctcctaccactacctcaggtggacttttcacggcctcagactatccgcgttccaatccacatgctgcctatatcccaaccctggaccaagcacatcccagccgaagagcagtgtaggatactcagctacctcccagcaggctccacaggacccacgtcagacacacgggtactgagctgcatcggaatcttgtccgtgcactgttgtgaatgctgcagggctgactgtgcagctctccgtgggaacctggtatgggccatgagaatgtactgtacaaccacacctgcccagtagccaagttccttccaccgcttttcacagatcggggtagtggcttccagtttgtacctattttggagttagacctgaaaagaaagcgctagcacagtttgtgttgtggatttgctactttcatagttaacttgacctggctcagactgaccagtacttttttttccgtgacagtctatagcagttgaagctgagaatgtgctaggggcaagcgtttgtcttcatatgtcatgaattcctccagtgtaacaacattatctgaccaatagtacacacacagacacaaggtttaactggtacttgaaaacatacagtaggtgttaactcagtgaaataaccaggactcaaagtaagattattttggtacacctttcttgttagtgtcttatcagtgagttgattcattttctacattaatcagtgttttctgaccaagaatattgcttggatttttctgaaagtacaaaaagccacatagtttttttcagaaaggtttcaaaactcctaaagattaatttccaagtataagtttgtttttattttcaatctatgacttgactggtattaaagctgctatttgatagtaattagatatattctcattgatataaacctgtttggttcagcaaacaaactaaaatgattgtcacagacaatgctttatttttcctgttggtgttgcttgtgggaaaaagaaagagagatcagattgttactgtgtctgtgtagaaagaagtagacataggagactccattttgttctgtactaagaaaaattcttctgccttgagatgctgttaatctatataaccttacccccaaccctgtgctctctgaaacatgtgctgtgtccactcagggttaaatggattaagggcggtgcaagatgtgctttgttaaacagatgcttgaaggcagcatgctcgtaagagtcatcaccactccctaatctcaagtacccagggacacaaacactgctgaaggccgcagggacctctgcctaggaaagccaggtattgtccaaggtttctccccatgtgatagtctgaaatatggcctcgtgggaggggaaagacctgaccgtcccccagcccgacacccgtaaagggtctgtgctgaggaggattagtatacgaggaaggaacgcctctttgcagttgagacaagaggaaggcatctgtcttctgcccgtccctgggcaatggaatgtctcggtataaaacccgattttatgttccatctactgagataggggaaaaccaccttagggctggaggtgggacatgcggcagcaatactgctctttaagacattgagatgtttatgtgtatgcatatctaaagcacagcacttaattctttaccttgtctatgttgcagagacctttgttcacgtgtttatctgctgaccttctctccactattatcctatgaccctgccacatccccctctccgagaaacacccaagaatgatcaataaatactaagggaactcagaggccggcgggatcctccatatactgaacgcttgtcccctgggcccccttatttctttctctatacttggtctctgtgtctttttcttttccaagtctctcgttccacctaatgagaaacacccacaggtgtaaaggggcaacccaccccttcattgctgatttgtgagcgtgctttaaggtgaaaaaagcatgaatgttaacttccttaaaaaggtacagcatccaattcaaatatttttgtcctgattttaatgctagttgatgtagtgctattaaaattttgttcaacatggacacagagaggggaacaacacataccagggcctgttgcggggtggggatgaggggagggaacttagaggacaggtgaacaggtgcagcagatcaccatggcccacatatacctatttaacaaacctgcacgttctgcacacgtatcccatttctttttttttttaagaaatagaaaaaaaaataaaattttgttcactgattcttccattttaaaacttgtttgcatgtggtttaggatgcccttacttcagcaaaggagaaggaataggagggccttagaatttttgagggaaaaaaaccctataacatacattgtactgtatcaaactattttacatgaatgacacaagtattctgaataaaaaaataattgaacattgttaagaacaaggtgtcatgtaatttatttttcataaataaaaaaattatagtggcttagactgaaaggaacagagaatttaaaaaattaaaaagaagccttagtatattattctatatattttatatgtgccatatttgccataattggatgaggcttttgggacccttgggaggttgtgagtatattttgcataatggaggaatagaaatagtttgtacccaaaagacagattgtgatagatgcaaatttgttgacacttatcccattgagagatgtcctctatatgttctcctcttgaattggtgcaggttctgtgactgatcaatagaacatggcagaaatgaagcttttgccagtttctgggccaacgtcttaagagactgtgaactttcaatattcctccactcttctgtaggttgtgatacttgctcttggaatccagctgccattctgtaaagaagcccatgcagcccgagaaggggccataggaagaggaattggggcccttggtcaacagctccctgtcaattgtaagcaccaatttgctggccacttgagggagccatcttctgtgtgaccctccagtctcagttacacttcctgacactgcgggaacggagacgagatgtcctcattgagccctgccctgcccaaaccacagatcttgaacaaaatacacgagtgctttttttttttttttttttgagacggagtctcactgtgtcacccaggctggagtgcagtggcatgatcttgagtcactgcaacctccaccttccgggttcaagtgattctcttgcctcagcctccggagtatctggaattaaaggcatgagtcaccgcgctcgaccacgagtgctgttttcagctactgttttgggatggttagaaatgcaacagtagatagcagagatattttgatttttgtaattttttgctgtaaccgtcttctactacattaaattatctaaaacatgtgaaggaggtagaaaaagatgaggtggctgcacatccatttctacaacaaggtgaccacagaaagtagccatgagtgagagggaaggggcaaagactaggttaagtcagggagtgaagttgggctcagggaagacttctgctctttttcattcttcttaacaatcagggagtccaggcagaagtggcctgtcccatctcttcttccaggtgctcatttagactcagttaacatctctccccacctcctccctgtacccctcttctttaacacacgaaggaccttctggagacttctctcaactaagccccaccaagggcttacttctgtctatggccccttggctacttgatgatttcatgttctttattttttttgggcaaatattccttaatgtttttaatttttaatttgttaggatcattatgtttcataatgccaaaaacagatggtcaacttagggaaaaaacgtataaagcacttaggaacatatgtaacaatgagtactatgatgcatattgactgagcacataatacatgttaggtactctctctctctctgtgtattgcacttaactcttacaacaaccccagcacacagataaaggaacaggggctttgaggctgagcaaattgcccaaggtcccatggctgataagtgggagagaggctgtagttttctgtcccaaaggccatggtcctaactattatactatgcatcatcttaagcactatgaatgtttaatgtctgtccttcctgtcttttatgtgtgtgtatttataaatatagaggcatgcatggaaaaattcatttataacctatttttgtcactaacagtatatctccaatgcctttctgtcacaagatagccttctacagatcatttttaacagctgcatgacgttctattgaatgtgtaatgatatgcagaaaacctcatgctcttttcagccattacaggagtttttagtaaggggagacccacctttgttaggagaacttcttgttagtcttccctggggattgggactcctcaaattgtaccaaaataacaaaatatggtcattaaaatgtgtttgaaagagtttgtcctgtttattatcctggcctttgttttggtgaagtctgatgtaggtaaggaataaagattgggcaggagtgggggaggagggctgagtaaaatagttttcaataaggagggatgagactggagctagtcaagttttggttggaagtaaggagtgggtgatggaggaaggaggagcaagggagggagaggagaagagaaaggaggggaagggagaagaagccatccaggatctagtggtttcctgactagactgaggcatggaaaaaagggacaagtgactgatggggtcataagttgttttctgtggggctacactgtaaaccctctccacttctcctacaagtctccagcatcttctatattgctaagatgtatttgagtccaagaggtccctctttggcatgggaagttcgaaggtgaggaaagaggacagcttccatgtgggttatatatggacgtgctgcaattcattgaagagatttcatattgttggacattaggtacaccctgtaagctcagcagtgaggtgaatatttctttagaatataggcctctaaagaggattctaggttaaagagtaggcacaggacaaggcttttagtatatttgaaaactttagaaatggaaatgtttttggggggcgagttgtcttaatatttcatttttctagcttgtgtgacatccttttgaaagcagcaattctggcctttgtgagagatggtgaatgcctgcaggtatgtggaccagtgcgtcccttccttcctacatgcacggccccagctgggcccagcagagtgctgttacagaataatttccaagggctgtgtctctaacctttggtcttgtcccccattgctgtagatttggccaattgacttcataagtgcctcttatgaacatagatgttggcaatggaagttgaggaccagtcagtggttgttttattgaacacacagcgtaaatcccaacacaatgctgacctaagagaattccagccactctgattctcagtctctttatatctgaaagggttctgttccactttttcccagatcaaaatgtccctgcagctactcagcagagctgtcgcaacttatacgtagaagaggtaacagtccacaaacagaaaggcacaggacgagagtggtctgggtgatgcttcctgtgggggaaaaggtgatgagggtgcatctgcacacctatgttcataggtaagtctgggaggaggtgacctcccctttggttgaggtgctgaggcgtcttgttagaatggcactattccatttatctgatgcagtctgtgggaattttgtggtatggccaccacaggtaccatgctgggaacaatgccagatactgcctgctaagccacagcatgagtcacatgagcatttgtgggctttgggaactaaagttattgaacgatagttatctgaaaaggaatttagggaaaggggactttagtccagcgaacagtttgcaaaccagggggaggcagccttcagcgtaaaatgaagacgtgtgtgccccaaataacaaagggagagtttgtcttttagagagtaagtttccacccaggttccacttaggcaaatgaaagatgcaaacttgcttagttctgatttgtttacatttgctgaattcggattggtccgtgcaggcttttctgggaactccaaatacatgtatgacctctagtcatacatggcaaatggccgcttggctctaatttgaatttaggcccagttagtcactcaggattaacctttttcagggttcacagctctgaacaatggacttagacctgcaggacatagtctgttcctaactctgggactacctgtgccttttgactgtgcccagtgagcagctgtggctctgggcccagacccacagggcgataaggcacagaggtacgcatggagcaggctgtccttgctgagtgatcatgaagatacacttacatagagcagcacttttccttccagtctttgtgatttaactcattagatccttataacaagagtcagtcctctatttaacccatgaagcacaggtggagtccaagcttagtttgtgaaggatgagccaaaaggattcttctcttgtagacctcaagctcagctctctccatgggccctggagtaggtgagaaggcctctgtcttccagagcccactgccaatcatctacattttctgttagcccaattctaggacattgctttaccaactgaagggtgagaactatcataagttataaaaatcaattgaaaaacaaaaaggtacagaacagaaaataaaagatgagaatctattaaacatagtgatgttactggaaaagggggtctcaaaccagaccccaagagagagtccttggatttcacacaggaaagaactcaaggtgagttgcagggtgcggtgaattgagagagtttattgaaagctattccattacaaagtagagcatcctcagacagcaagtggaggaacatgccatcattaaatttttcttatataggaatcttgtctatataaagactaaactaagctgtggctatgtgtgggtgggccgacagcatgaaaacatttattctcctattgatttaaagagaactatccttgacattttagtgtgtttaagtacatcaaagcataactataattatcttgaaagcatatatttttatagggattgggacatctgggctttctgttgttgtagaagtttgtccttgcagggattaccaagccacttccttagctgtaaacatcttagggccatgggtcctgactggcaaggaatgtgtcttgctagttttaagatgggcttgatttgaaaatggtgtccatctggctctcctaggctcctgctttcctaacagtaagggtaaatgctatgttatgaaatgtcatttctgcctttagcttgcaaactcttgatggtgaaattctcctgtccgttttcagtggggtatttattctgcatccacgtcttcacaaggagctgaaaacaaattggatggaagcaactgggttttatgggacacgttaatgttttaatgtcatttggtgtggaattcagatgtccaagcaacattttacactacaaatctgcaactttaataatcactcaaagtacctgaacctcaatgctttcagacagacttggtataaagccaccacctctttctattatggcagccctatcctgaggacacaaatttctgcagggcttctggcatatctctgattaaacaaatgtcaacaaggttaaaacaaatgtcatctctgatttgtttgttttaaagcctggatttactcattgaatatttcactcctactagcatgtcttgtagtagttttcttcagggaccctaattattgctattaaaaatatgtgtgcagctacatgttttttttttatcaatttgcaatgaaaactttaattgaataatctattagtgttattatttgaaagtgaaatcttttccttttgctttcttgttctcacacatagtgcagacagtttccacacgggctcataaaaggaatgattctgccttgtgtgaactttttgcctttattgttaattgcaccattttgtgactggcttcttgaccctgttgtaaccaagctcataatgtacattatttcttattttgcagttgtagacacttgaggaagttcccattctttgtttcttcttgcttttgttccctgtgataactttttcatgcagacattttttttttttttttttttgagaccgagtcttgctctgtcatccaggctggagtgcagtggcatgatcttggctcactgcaacctctgcctcccaggttcaagagattctcctgcttcagcctttctagtagctaggattgcaggcgtgcactaccacacccagctaaatttttcaaattagccaccccacctggctaatttttgtatttttagtagagacagggtttcaaccatgttggccaggctggtctcgaccaggtgatccacccgccttagcctcgcatagttgcaggtgctattctgagctcagggctctggcagctacaagcccaagatgcggtctccaacatgtggccattcaatgtcatggcgccctctactggtcctgggaagcgcagctttctgccagtaagctccagcagggcacagctgttaagtcgtgatgttctacaggtgaccaaagggcaatctctggactccttagccgctaggtcctctctgtagcaggacccaggagaaggcaggggctgaggatggctctcttagacatttgtgatgaaccaaacgtgtgcattcatgaaacttctgtgagcaagcaggtgagtagagttgggttataaaaagtcttagggtctcactacagagatggacttgctgtgtagatggtgcagagccgctgaagagttctacttggggtaatggtgtgattgggtttgcgttttaggaagatttcttggccagaatgaggcgggcaacccagagcagggagtggccagaggtgggtgtgcagttatgggccagtaatccaggtgataaatggtgtctctgagcttcaggtgggggtgccacatgtctccatctgctctgtacccttgagactggccttatgggctgccttagtggtctgttgtcctctatctcctggttgggctcaggcaatgggagatcagagggaggaaagagagcttggttagagtgcacccgcgccccttcaggttggcagtggccacattcccctatacagaaggccacagtttctgtcagtggccctcccacagccccagctttctcagtgggccagccacctccccatcccttgctcctcctcctccagagagggttgtggatttccactgtcagcagtgcctggagctccaccatctcctgctgcttcctctggacctgcctgcagttttataaataacctttccttacattacctctagcatgcaccttttgtgtgtatactctgccccctgtcagcacatgactcatgccaaagagtttgaatttttttctccaggcaacgggaggtcattggaggattttagacattgagaacagatgtgtattgtggaaatatctgtctgactgaagtgaccaggatggtccaaaagagcgagaatttgaggcaagcaaaccatcagcaggccagcagcagaaatccaggtcataaacagggaagctgaggctcacagggttggatcagggaatgggagagggaagccaaacaattccatgagcatgtcagttgcacatatgacttggtaactatttttatttttatttttatgttttgagacagagtctcgctctgtcacacaggccagagtgtagtggcatgatcacagctctctgcaacctctgcctcctaggttcaaacaattctcctgcctcaaccttccaggtagctgggactacaggtgcgcaccactacacccaactaagttttgtatttttagtagagatgaggtttcactgtgttggccaggcaagtctcaaactcctgacatcaggtgatccacccacctcggcctcccagaatgatgggattacagatgtgagccactgtgcccagccggtagctaatttaaaaaagctgtaaatttaatgttttgggtttttttcaggccacaaaatgattgtttcaaaaatgtcaatagcatcaaaatgttctgcttttccctgtcttaaaccactccccaacatttcccacacaagctgggctaagccagctggccctttcattggtgttaaacctggatctttctggaaccactgttaaatcacttagactagtctaagagatatatggtcaccagcctgtatagtgtcatcaaagtataatgtgagccacctacatgagccacataggtaattttaatttttttttgtacctatgttaacaaaaatggaaagaaataggtgaagttaatttttcaaatatattttatttaacctaatattcaaattattatcacttcaaaatgcaatacatataacattgttgagacattttgcattctttttttggtgccaggtattttttattcttaaaatatttaattgacaaatagattatatatattcaatgtgatgatttgatttgacaagcatctcattttctctactctcaggctctggcaactaccattctactctgtttccataaaattaacattttcatatttcatatgtaagtgagattatgtggtatttgtctttctgtgtcaggctttgattttacttagcataatgtcctccaggtttatccaggttatctcagatgtcaggattttgctgaataatattccattgtatatatatatgtacctgattttctttatccatttatctgttgatggacatttaacttgtttctgtatcttggctatggtgaataacgctgcaacgaacataggagtgcaagtatcttattgagatactgatagtatttgaatgtattccttgaagtggaattgctgggtcatatggtaattctatttttaattttgttagggaatctccatactgttctccataatggctgtactaatttacattcctatgaataatgtacaagggtttcctttcctccacacctggccaacacttatctcattttttaataatagccattctaacaggtgtgagatgatatcttgttttgatttgtgtatttctctgatgattagttatgttaagcagcttttcatacatctcttggccatttgtatgtcttcttttgaggaatacctattcaggtactttgcccattttaaaaaaaagtcaggttatttggcttttgttactgagttgtgtgaattacttatatattttggatattaaccctttgtcagatgtcaatattttctctcattccatacgtcatgtctttactctgttgattgtttatgctgtgcagaaactttttagtttgatatactctcacttgtttttgctttcattgcctgtacttttgatgttatatctgaaaaattactgctaatgccagtgtcaaggagctctttccctatgttttcttctaggagttttatggttttagatcttacatgtaagtctttttctattttgaattaattttagattttgtgtaatacaagggtctaatttctttcttttgcatgtggatatctagttttcccaacaccacttattgaagagactttccccattgtgtattcttggtactcttgtcaaagattagttgactatacatgcacgggtttatttctgggctctctattctgtcacattgaccaatgtgtctatttttttcccaatgccatactgttttgattaccacagctttgtaatatagcttgaaatcagggcatgtactaggtctttgaaatctgctgtgtgttttattctcagagcacatctcagtttggaccagtctcatttaaagtgcttgatactcacctgtggctaatggctgcaatgttgggaagcacagtgttagacttttgcagagactgcagacagacaattttctgtttttttttttccaccttagttagagagacaaatgaaaatataaactcacacagtccttgcattaccactacagtcctaaaactggcccagggcagacacttggatgttgtcatttctttcctcagctctgcgaacccagcaaagaaaagctttcagtcttcaattgtccccattcctcacctagtggcttgtattttcacagccagagtggaggggctgggggagacagataagacagcagcttggccagctcttggaagatggaatatgccagtggaaaatggtcagactgtttatataaaataactctgatccacaatctgcagaaatcagctcaggaaacccacttattatccacaatagccaacccaggaagcctattaccagaaagtcagacttgcaggaagtgaagaccactatttctagcaaacaatccagggagccagtcactcctgtaacagtcagtcaaaaatggccaacacttgattaataactgacaactgccctaaattttttgttccctcttccaatgtaggaccaaccagagaaagccaaacatgctcctaatcaatcacacaggagtccccatttctagttagccacctgcaactcacccacatctacagctgccactcagggcatacatgaagacttcccttctttctgctatgaggctttctcccctgcttacttctgagtctctgccaagcaagtgatggttgccgactcccttgtcagagcaagctctggataaatagtctttgtttgttctcatttgggtggtctttgtttatttccacacccagcagaggttagagttgaaacctttacccaactttaggcatccatccatctctacaacacaggcctcacccctcccccagccaacagcctgatgtttttcagcaggtgggttccccttcccttgtcaaccccacctgtcgtctcagcctcccagaagactcacagtcaacttgagaccatttgtttttggacttcactttccctagtcatattcatctcctgggttggagccataattaccctaaacacgggctaagctggagctgctccatgcctcagactgccatttcattgcatggcatggccttcatcaaatgattccatctgacattttaaagagaaaattgaagccagcaggtgagcacagcctcacatttaccaccaaaccttcttcctgaaccatcttggcatctgtccctcctccctccctcttgctacactgggggaggtccttcttctgttcacagacggcttctgctctggattctgagtcccaatcctctcagccttcccaggacctttacaccatgttcttctcttctgaatattgggtgctcctgtctgaactggatccttcctgtagaaatttaaagctcaatgcttctcatagttaaaaacaacacaacaacagtatctctttacctatgttcttacctgagctgtagtcctggctccccacccctttcaacccaggtgtgaagagtggtttctgctgtcttagttccttgttgctgctcactactggcctgccctgtgccctccttttcacttgctcagccttggtgaggggaaccagctgagggagaagaaaaggaaaaatctgataggtagacagttaaggctagtcttcagagaagcagcctgcctgaaaaatcatagctacaggcaaaaatagagcagcctggggaaaactcaggctgcacctgaatagataagcggcacagaagcctcttgttctttgtacgatcagtgagctcccagagaaagcttcctccacttctcagatatgcacatggtgggctccatgggagcttacacagggaggggatgggggcttgcctaaaacaaacccacagttatacaaacaagagaagctacactttatgcttacctggagacatcccacagctgcatagataagggagagttatacagacagttttataggtaagagaagttactcaaacagctgcagatatgagaagagtttcttataaaagcttttggattcagctgtcaaagtggcaacccactcagactcccctctccactgcagagagccttcttctttcacttattaaatttttgcttcaacctaaccctttgtgtccatgctccttagttttcttggtcgtgagacaatgcatgcagataacatctgagacaataagacctttgaccctgacctgttttacagccactctctttagatacacacagtggatgttttcacatggacattctcacatgactcgacctcctggcagcatttataacagatctccctctctcccactgagccctgccctgggcagggtgagggccactctcccagaatccttccaccttctttggtagctcctccattttccttgtcagcccatgggctgagccactaaagggtgcagcttgtccagctcagtcctaggcatctctccactttgccttttgttcctaagtaattacattcatgccctttcttaaagtattatttataggctgttggctcccctgtttgtattcctaccagtgctgtctgagttccaaacagctatatgatcttcataaagctcattctgggaagaacatgttattattacacccattttcagttgagaatttacatgcccacaatcatacagctggcagcatggattgctggccaggctctgtccctatcagggtcctctggagtctctgagaaagccctgagatgctcagcgggaggttctgtctccttcttgctgctgctcctcgcaggtcaggcaggatcctgatgagagtgtggatggtatgagggctgctgtgcaggtagcacagttggactggctggtggctgagtgagggagggaatttggtaagagaaaactaagagaaagatcagttgtataaacttggaaatcatcaaatatgtatatttttcattcatggaaagagaaggaaaattgggaaaaattggaatatgtacttttcatttttagcacctcttagagatctaatatcactgcattcatttgcaaacataaaatatattacctatgaattataataaggaagaataaagcagaacattttaggctttgggctggtagaagctagattttaattctttatagttgttaaacttccctgcagattctacttttttgagaacgtaagtctcatgtgtctaacctccattttaaatctctttttgggcaatataacatttatttaagtttatttttttgctttctcccatttcacttagtttgtgaaattttaaggacacaaaagccatgagactattattctcacctctcagctttaactgtcaatatatttttactaaaagaaaggaaacattacaagggtctcttctggctctcatcctcttttccatctcttgtctcctacacccttcccagaaacagccgctgtcatgagtttaatcagtcctttctgcttgttaaaacatctgaatacatattcagttgcatttatgtatataactgtgagattttgaatatttaaaaatgtatgtaggcatatattattttatagtcttgttgatgaataactgatgcacaatgaaatacatatatttaaagtgtataattagatgagctttgatctctatatatacccattaaactatccccacaatcaagataatgaatatatttgtcatccctccaatatttttgtgctattttgcaatccatcctttcgtcccttctgccccatccctaggtaaccactcatctgcttttctgtctatagattagtttgccttttctgtaattttatgtagatgtgatcatacagtatgtaacttttgtgtggctgttttcacttagcataattgttttcagattcatccatgttgttgcttatgttaatagctctttcttttttattactaagtagtatttcattgtatcaatataccacaatttgtatgttccagtcatctggtaatggacatttggcttgtttcaacttggggctagtataattaaggctgcaatgaacatttgtgtatacatctttgtgtagacattgcttttatttctcttgtttgattgttgagaagtggatcatagagtttgggtatatttaacttgaaaaactgccaactgttttccaaagcggctgtgccatttacgcagaagcgcttaaaagatttagttgtgtcacatcctgttcaacactcaagtatggtcagtcttttaaattttagctgttctagtgggtatggaacacacattccaaagtgcacgttaggttctttgcatggtcccagtctgagtgagtgtgggtgtgtaagttctccctgcggtaggatggtgtcctgtccagggctggtttctgacttgtgcgtgaacgttaataggttctggtcacccgagatcctgaactggaacaagtgggttgtaagatgaatgaaggaatgacttataattattatgaaataaaatgctgggcaaggtgctgctggctcatgtccgaaatcccagcattttgggaggctgaggcaggaggattgcttgagcccaggagttgaagactagcctgggcaacaaagcacaacccctgtctctacaaaaaataaaaaagaagatagatgggcatggtggcacacaactgtagtcctagctacactggaggctgaggtgggaggatctcttgaatccgggaggttgagactgcagtgagctatgattgcaccacttcactccagcctgagacacagagtgagaccctgtctctaaaaattatcataaagcatttacaataatcatacaaacgcataagatacgagtggtacaaaagtgcttagcgagcccaccgtgttttcttgttttttgtgtggtggtaggagaggatctttaaaatttttgttttgcaaacatttatttcttgacttaacccacttccactatgaccacataactcactgattaccaaaaatcccataaataatgattttacttgtttttattaatctttcttaaattctgtataactcatatttattttgatatttaatattagaagtgttttgtgcctttatttacaagtttgatgatgttcttgtgaccagaaacatgctgtaaaacctaactcttcttctcctgcctgggcgatagagcgagacttcatctcaaaaaaaaaaaaaacaaaaaacctaactcatctttatatcaattagcctatggtaaaattggtttcactgtacatcattttgcttaaagtcaaagtttccaggaacctagtgacattaagtcagaacttactgtaatttgataacttatatttatgttggcgtgtacatatatatgtatctgtaaaaccattatggctgtatacatatgatgggtaatgagcatgtccatcatctcttaaggaattctcatttccgtttgtaatctcttcctgtctgcaggcagccactgatcttctttctgtcactatagaagagcatgcaatttatagagttttatataaacagaatcatacagtatgtactttgttttgatctggtgtctttcactcaataataattttgaatatcattcatgttatcacatgcataagtagttcttcttttgtattctaagtagtagtctatcatatggatatatcatgatttgtttattcattcacttgttgatgaaaattacatgtttacccattaagttatcagttctggatctttttagttccttgcagggatccaaatattcaccttgtatcattttctttctgcctaaaggacttcctttaacatttcttgcagtgatgaatgctagtgattaattttttcgcttttgtattcctgaaaataatttttttatttcacctttgttttgaaagaaattttcactaggtatagaattatggattgatagtttgtttctgttgctgcacttgtttttttttctatttgtaaatctgctgtcatacttatctttatttctgcgtatatgatggatattttgttctggttgcttttaagatttactctttatcactgattttgaacaattcaattctgatgttccttcatgtagtttcatcatgtttcctgtgcttgggttctttgagcttcttggatctgtgatttcatagtttgtgtcaaagttgtattgctggagggctcaggagggtctccggatgctggtgagtctccagccccagccagtgtccacgttcttgacaccatcacgagaaagaattcagggacaagtcagagtgaagtgaaaggcaggaagtttttattgcaaagcaacagtagacacttaagggagaagtattgtctctctttattttgaagtcctggggtacgtgtgcaggatgtgcaggtttgttacataggtaaatgtgtgccacagtgatttgctgcacctgtcaacccatcacctaggtattaagcccagcatgcattagctatttttcctaatgctctccctcccccacctcacccctgacaggccccaaatgtgtgttgttcccctctctgtgtccctgtgttctcagtgttcagctcccacttataagtgagagcatgcaacatttggttttctgttcttgcattagtttgctgaggatcatggcttccagctcatccatgtcccttcaaaggatatgatcccattcttttttatggctgcatactattccatggtatatatgtaccacattttctttatccgttatatcattgatggacatttaggttgatcccatgtctttgttattgtgagtctataaggagcttaaacaaatttacaagaaaaaacaaacccccattaaaaagtgggcaaaggacatgaacagacacttctcaaaagaagacattcttgcagccaaaaaacatatgaaaaaaagctcaacatcactgatcattagcaaaatgcacatcaaatcctcaacgagatactgtctctcatgctagtcagaatgacgattattaaaaagtcaagaaataacaggtgctggcgaggttgcagagaaataggaatgctttcacactgttggtaggaatgtgaattagttcaaccattgtggaagacggtgtggaagatctcgaagatctagaaccagaaataccatttgacccagcaatcctattgctgggtacataccccccaaaatagaaatcattctattacaaagatacatgcacccgtatgttcattgcagcattatttgcaatagaagtgctctctcttaagagagaagggcatgcttgtaagaatgaatcacacacaagagaattttggtttctagttttatgagcgtttctttagttaggaagtgaaatagtcataaggtattctggaaaaggacaggattatagggacctccgagttatcaccccctttctcctttgtttggatgtgcgcaagggtcatggacatgtctcctggatcagcattttggctgttttctctcccttagtttaggtttactgttatcctttggtttctttgcctagttcctgttttaactgctgtttgggtctttccagcctcctgtgactacccagtgctattcctatctcagttggaaatttaaaaatcatgatttcttcaaacattttttctgccccttatcctctgtttagaaacaaatagaggataagagctaagtctctaaagttattttttctctctgtgtttttgtttaagatagtttatactgtgctgtattcaggctcatttttttttatcttatgcaatgtgtaatctacttttaatcccacctagtgtatttttatcttaaatattgtagttttcaactctaaaagttcattttggatcttcttatatcttctacatctctacttaatatgtttaatctttcacttgttgaacatacggagtacttagtaaactgtccttttctgttaattatagtatctttgcaagtttgggtcagttctgaagtgttgatttatctcctttttatgggtcatatatatatatgtatttttttgagatggagttttgctcttgttgcccaggctgaagtgcaatggtgcgatcttggctcactgcggtctccttctcccaggttcaagcaattctcctgcctcaacctcctgagtagctgggattacaggcgcccaccaccatgctgggctaatttttatatttttagtagagatgaggtctcaccatgttgaccaggctggtcttgaactcctgacctccgggtgagccacccaccttggcctcccagagtgctgggattacaggcatgagccaatgtgcccggccttataggtcatattttactgcttctttgatggcctagaaaatttcaattgaatgctagacattgtgaattttaccttgttgggtgctagatattatttttgtgtttctagatattaatattttgtgtttttataactagtcgagctgtgtgctgggatgtgattaggttacttgaatacagtttgatcctttcagattttctttcaagatgggttaggcgggaacagaacagcatttatccctctactaaggcaagacactgtgtactctaccaatgctccatgaaatatgaagttttcccacctgactggtgaaaactgctcctggccctgtgtgagtactgggactttcctgtctctctttaatgtgcttatgctcttctctaccttctttaacatataaaataaattaatcataaccatttaatgtctgctaattttatcatatgtatactttctaggcctgtttctgttgattgctttttcttttcattatgaataatattttcccgccaattttcaaggctggtaattttttaatggatgccagacattttgaatttaaccttgctgggtttgatcatattttaatatttatttaaatgttcttgaatttttttctgggacacagttaaattacttggacacggtttcattcttttgaggcttccctcaaagctttgttaggcatgtccagacaaagcgggcaggctttagtctcagttaatttgaacttattattgaggaaatattcgtttgagtactccatatgcgttacaaggttgttccactctggctggtggaaacataaatgattcctgtctttgggtgagctttggacatcattccttctgttcttttccacatattgagtaatatccttacatgtatgcactgatcggtactcagctagtgacgtcagggcaatcttctgcgggtctctggagctctcgctgtctctctgtaaagctctctttttccctacaactgtctcctctctgatactcttgcctacatatctgtgttagtgttcctaaattttcaacttggttttctcaactcaggtgaacgccagtctctgttgggttctgcttctttgtgctgcagctatgcccttactatgccccttagtaaactggggcaattctaagactcagctcatttcaccgcttttctcagacacgactatctagtgctgtctgttatccaatgtgtaacaaacaatgctttgtatattttgtctgattcctaagttgtttaatgcggaagggtgtatctgaatcttgtacttcatcttggctggaagtggacagaagtcaatctagcctttgacttttgccacctatgtaagagtccacaaataatagcatagtgtttaagagcatgggctctggttactaatttgagtatcattcctttttatttatgtaacctctccttaatctgtaccatggagctaataattatatctcttcacataattatgacagggagcatttgagtcaactcctaaaaacataattagcctagtgccagacccacaggaagtacccaacacatgtcagcttttattaataattaagcacttttacatgagtgctctggatatttttcaaaaagcatcttaatattttggtggatttctgaaatgccattactgggccaatgcttggctgttttaaatttttttctagtctcttgtccttggatctttcaaatctgtagctattaatacatggcaggcagccctgcacacctatggccacatttccacctgttccctgcagccaaggagaggccacattagtgcatccactgactgtgctcctgattaggagggaagggggcaggtgatccatggaaggacaggggctagaaaatcaagtgtgaaactcagagccttaagcgagtttgtcagcttggtcaatggaagataatcctctggtggttcccagcccaggctatacatcagagtcacccaggaggcatgccattggacagcaatcccattctaggaaagtctgattcagctgtaagaggcagaatcctaggatctgtaccctttaagcaccctagatgacagccaggtttgccttctaacaattcctcacacctggtagcaccttggatctctgtcccccaaaccccatctcaggatcaccaggcaaactttgagaaatagcagtcctgaagctccattctcagggattcgggtgaacaagtgctataggtgattctgaagagcagcttgagttgacatccatttgtataggacagagtttctcaggctttaacttgcatcagaatcacctggaggacctgttgaaatagattgcagggccccattcccagagtttctaattcatacatagctctggaggacctgataatttacatttcaaacaagcttccagtgatgctgatgtgctagactggtggacggcactttgagaatgactggtttggagtttcagagttcacaaggcacttgtaccttcattttctctgttaaccctgaagtcaagcctgcaaggagccacaatgagccctgacttacgggagcaagagatagaggcttaggtgaagtcacttacccaagcttttcagtccttcagccaagaaccgtctcacactgactgggcgtgacagcatcctggtgcaaggaactcagcttaaggtgctaacactgcaggtggctgtggatgaactcggccctgttacctgtcaccagataatccagaaatctgctttctcccagaaactcaagctaggaaattctccagattatcctattggtgaatgtggctaaatcctggccaccttcccaaggagtctgtactgccgctcctggtaggttccacccaaaccctcctgggccccttgaatcctcttctctgtcccagcccataccagaggctcattcatccttcatgcagttaatagggtgcgttggagcctcactctgtgcaccctggtccaggaatatctgccctgtttgcatatctggagccttcaatgcagccaacactggctcactctgagaggtgagagaatcactgctgtgccccggcccaagtggaggagggtggggaagggagggcaggacccagggagatttcatgcagcggtgaacatttaaatttaatgatcctcctcagttttgaagtccattggccaggagtctgtgtattgtttttgtaagtgtgtgtgctatgttgtaggaggaaggaatatgactttcctcagacttacactcttgctgctgctatctgtctttgaaaatggggacaaaattgattatgtttctttatccttgtttgcatcaatcacccaggccatcgtcatctcttgcactgtaattttgatatggctttttgcatcttctgctccaattccatccactcctctccacctccaggggctctttcagggtgtctctggaatgcttggttcatcctcagcatgtttctgcacctctttaacccttcccttcaccctcctgctcttactgaaacctggctctgcctgagaatactgctttatctcagtcctttccaggggtggctgtcttttttcctcccttaacccttatgtcacagggcccagggatggagtaaggtcctcctcgatgcttccagatcattcttcctcctccaattcactgctgtagctccaactcccgccgccctctagtgtgtcctcttaatggcagtcattcaccatcttcctgtccctccccttcatttcttggatggtgactgtcactttgctgcaacagaaccctgtcccaatccttgatggttcaatacacacatagacattctttttaacagggcggcctctcaggtctttaattttcttccctccaataaccttgtgatgatcccccagcttagccacttactgccagatcattaccagtaactccagcccctccttaattctagtttctaatatcctaatctgtgacctcacattccaacttcttcattcttatcccctgagtcaaaaaatcctttgatccatgcaatccattaagtcatctaccttttcaccattcttcgccccactagggttctcattcctttattacccagatgaaattccaaggcctgttggaatcactcccttgcagccactgtcaatacttctgccccttttacttcatcacccttatgtggcaaaaccacagccctggttgagtccagccttacccctgctctgtgccagcacccgcacacgcatggctgatggaggttggaaaaatccacacatgcacagggccctgtatgtcaatatacgtttccaacctccagccttgcatatgcctcagtgctgcctggcaacacattatatgttttccttagttccttcagtctcctgggttcctaggtgagtatctcacacattcttctctctctgcaaacctccaacacctccacgtcactttcaactgatgactttgtttcctatttcacttgaaacacagaggcaaacataaacaaatcccacccactgccaccactctgcccatctgccagcatggcaccccccaatctaggcctttcctgctgtcacttggggtgggctgactatactccatccaagtcctttttacttatgcactcgtatcgtaccctctcacctgctcaggacgtgcctctagcaagtcctctcatgctccggcaacatcatggttcctcttcagcagaccagttatactggcacaaagcatgcagctgttcctcccatctccaccaccctctccatctctttctcacgttgctctatccttaattatagcaaaacccataggaagtgttatagagacccccctttctgtaatttctcctgttctattttaaacttgcccccaaagtacacttaccaaagtggctgtagtctccgccactgcacctaaacttcccttgctgaggtcatcaccagcctgcacgtggccaaacccactgctgtctctgctctcctcttatttgacttttgagtcatgtgagcacataaatgatccaaacggcaacactcctaagaaatggttgtacctggacaagaggcataaattggggccgtcttaggaaagcagatatacagccatcctacctttaggcactcactgttggatgcaattggtcactcttccttgggacctttccgccattggctccactatacgcactctcctggtttcctcccctctagccgctgtctttggtctcctttctgattttgctgcgtcctctgtcccctgaatgattgcttctccactacggggtgattttgctccccaggggacatttggcaatatctggagaggtctatggttgtgtttgagggtgttgctactgccatctagtggggagaggctagagatgctgttaatgcccaggacagtccccataacacagaattattcagctcaaaatatccatggtgccaagatcaagaaaccctgctcaaatattagcatgtgctgaaggcccttctctttcctttagcaatatctgcctccttagggatcttttctagtctcagtggtttaacatttaaaatcccaaattaggcaataaattgggccccaaacttcgttagtataaaatgtagaactgtgttattagaaggctaataaaatgacctggtgagcatctgcagctagcctctgagcaattctggggaccacgtgcaagataaatccatctgttccctctctgtaatgtggcgctaccttgtggccgatttttcctcgggttaaatatctctggggatgcaacttgtcgtggttaatggctgtgtgaggccagcgcgtggtgataaaggaatcaatcaagacaatattgaatttagaaaggcagatttatttagagaaaaggagagatacgttgcaagggagcaatgggcaatacagcagagggaaggctgtctgcaaagaggcaagggctacgtatgacgtagggctgcttaggctgaatgcttgcagacaagatgcttgcgtgcaggtgggctgtgagctgagtgcttgggtgctagtgagccattggcagctgaccctatttcttggaacattcgctccctgcaagcattttaatgttaaaccgccaggtcagtttgaattttcttttttctttttttttttttttttttgcctttagtaggacctgccgttgtgagactatctgaggtaaattagacaccctcctggtttaagtcaccgctccagtgactaggcagggagctcttccttgaagagggtgtgggcagtgggtactttgcatgttgtccacaccaggcgagctgctgcttcagggcctttgcatttgctcttttctttgcccaaaatgcacttctctcactgttcacatgatttttctccctcttttccttttagtctttgcttaaatatcaccttctagggaggccttcccacaccacctcttcaagatttgagggtatgcacccccacccctagccttcttatccctctccactgctttcttctcaaagcacttgttacgttcaaataaaatagattagttactttatagttctaattttactattttttgtttacttcatcaatacccatgtaatctctggaaggaacgtttctttttgtagtgtatttctagcacctagaacagtacttggcacatggcaggtgttcaaaagtatttgttgattattttctcaaagggcatggagtcttagaagtttgagaacacagttctaagcacagctgtttagagactatggatgatgctaatggctgtattcccagtaggtggggcaattctcaaattgacctggaatccttgagatctggggacagtcaccaagcactgggctctgtggggagagatgtgctggtttttagagaggagaatagcatcctgggggacttggccccagggctttcctgtcccaatctcttcccaactgagtcccagaggcaggaggccttgtctgtagctggtcagtcctgtaactgtttccctcccatctacacagatgcaaagaaggctgagaaaagcaagctgtcaggtgagcaggggccctgactcctccccagaaggcactcagaacttccatagggcaactgggaaagaaggttctacttcctcaccggcagctgttgctggggaaaaaaccagcctcaggccctaccctgtgctgagaacctgaatccagtatcaggttctccaacaaacttggatccagctgaccctcacaaggggtcagatgcaaccttgtagcatatggaaaatggcagcaaggtccttgtgtggactatgcctagaatctaaattaagacaaggcctcagaggggctaagtgacatctgtctccaaagtttcacagctagtgtgtgactaaatcttgattccaccctctcaggttttaccataatcccaaaaaaggttgaaacaagaaaagttatctttgggcaattacctctttctgttccttgctttacctactaatgttctaggctcaccctctggtctgcaatctcactgaactgacagatccctcatggcctaaagggttttcacactgggttgactaggctctcccattgcctgtcctactgtctaaggcacctcctgggtagggtgcccagcgtcattctgatgctgcctgactttccttccagctacttttgaaacttggtatccatggcagaggcttaaagggcatgttccaggtacttttatttccaaattccccagtggcatcaaggaaatcagcatctctggatagctctactaaggcttagttctcattgtccaatctagctcctgggtcatgggaggcattcaggaaatatttgagtgtaagagtgagttgctttacctccagaatatccttccaatggctctgaagcaggctgtggagtcctgctggctgatcacagttcacaggtggctcccaaacctgtggtctacatccatcctttgtcagtgtcactgccattgtcccacaaatgtcatttgggcctagcccctgggatagtaatcagtctttacatagatatacattgtgctttacatccacagtaattctgagtggaccttaaaataaattccatgtcaggtctcaccagcccatgggttacagatggggttacctttcagccttgtaaggtgccccgtctttgagtgtagacatggactcacaacgagtccactcctgctgttcctctgctcttgctgaggcttctgctgctgctgctgctgctttgcagaggctggccagctgtggtgcctgaggcacctgtgtcttcacagcaccaacttgcatggtggccacggtgtagttggaaagggatgcttagatgggaggccaatgggagctgcttcaggaggcaaatccaagtcacagagatcgagtcaccgagagcatagtaaactcaaaatcccttcttctgcttaataactgagatgctgtcactgggttaacctcaccaagccttgttttgtcttcacttagagtgatttctgtcttagaaggctcctcatatccttctggggaaggcttctagtgagtccacagatagctggaccaggcatgtccagaaataatctgattctcacatttgagttagccagcgttcccagctatatccccattttgtgtctatataagttaccaaagcccacaaggatattaggtggctccttagtttgctttatgattatgccttgtgtgtgtgtgtgtgtgagtgtgtacgcctatgaggattccttctctcccgttcttgctatggcttctcttccccactgatgggctgtagttccctgtccttttgactttgggcttagtcatgtgacttttttgccaagggaatgtgggcagaagtaactgggagccagtcccaagctaaggccttgggaagcatggtgagcctatgccagctccctcagaactccttcccttggccatgaagagagaataacctggattgtaccttcagcccatgtcctagaatacaaacatggagaataatgaacttgactcaaaggctgaagggcagctgagcccacatgaggtcaattgaactgcagctacctacagacctgaaagtgaaataaacatgtataagtctctgacgtttggggtttgtttacatagcattattgtagcagaaacttaaataatactgggggctaaatatagtggaccagtgacagcacagaatggtaaaatggagtgattgttacttacatcacaacccttcatctctgttgatggacactaaaatcaaagtggcaattactcagagttgggagtcattgagttgcatcattgttgtttagaatcattgacagtttgagctctaagtgattacagagatggtttcctcagctacaggtaaataaacaaaggcacagagaagtaaagtgacttctagagggcttcattgatatttagcagcagaatcagagctaaacaatgagtctctcatctccagcctttctattcttgtttcctaggttgggattttgggaaatagtgcagagagattagcagtagtgacatggaacaatgtgagcctcagcttccatccctgaggctgccttcatctgccagggaaatgtctctgtgtgcagccttgccctctgcacacagtgtgtatggccacctgaataagtgtcctttcatagcgactaatggattgaaatgggtgctagagcagtgcttctaaaaactccatgtattaatcatctaggggtcttaccaaaaacgcatgcagattctgattcagtaggtctggagtggggcttgacattctgcacttgtaacacatggaccacactttgagtagcaatgtattagatcattccagtggaaacatgtatgagtgatggaatgaacagatataattaatccaggtctggtaagtgaggtactgatacatattaagttgaagtgaatttcacatcaaaaataatggttacacagtgacttttactgcccccaaattctttccttttgagtggtttcaaagtgaactgagccagccaggttaagtccctggtttagtgtgtgattagaagatttgatccagctttctcctccttctaattctttaaatatgcaatggccttctagaaacttgtctctcaggctccccatgagccacctgtcttaatatcttcccccccaggacatttcctgggtcaaggaaggaatcagggactaggaaaagtagaaaggttgcctgacagtgagaaactttttgcactcctatttgttcaattctaaaatgtgggtattgttggggcttctaattggaatctaacctgaaattcaggcatgtctagctatatatgaccaagaattaggatgagttcactagaagcctattttcaggagagcggtcagttaaattgaagtttatgggtttatggtaatgggttggggagtttacttcattagcaatagcaacgtttttgaatcagagaagtgattttgaacacactgtacatagttttctcacttagatttatctctgggtcaacccttgttggacctatattagaatcatttagtgaagaaaaggtgggtgtcattaggaaaagagccatttattcaaatgttctgtttgacattagggcactggcaagactacagaatcaatagatatttaaaaacagccaggtgcggtggctcacgcctgtaatcccagcgtgatttgggattactttgggaggctgaggcgggtggattgcctgagctcaggagttcaagaccagcctggtcaacacggtgaaaccctatctctactaaaatacaaaaaattagccgggcatggtggtgtgcgcctataatcccagctactcaggaagctgagacaggagaatcgcttgaacctgggaggcagaggttgcagtgagccaagatcacaccattgcactccagcctgggtgacagagtgagactccatctcaacaacaaaaaaaaaaaaaaagtatagtgaaaaaatgccctaaaaaattcaaaagcctaaatgaaagaggccaatacacatcaaggaaaccgaaatggcattctagagtctcctttttgtaaaagccctagatggggataattttctggatgattattatcaaactttcaaggaacagttaatttcttctatacacaaattgtttcagaaaaaaagaacaaaagttgcccaacttactgtatgaggtgagtataattttggtttcagaaccagaaaaatataatagtaatagacactatagtgccatttcacttatggatgtgactgaaaacgttctaaataaggcgttaactcttcaaatctaacaatgtattaaaagtattttatgatcccataggatttaccctacaaatacaagaaagagttggcattagaaaattggtctaattcattacattaataaatagtaaaaaaccatatgattatctctatagatgcagaaaaagcatttgataatgttcaacatctatttatgatgatttttttaaaaaattaggactactaggaaagcatttttttttaacctgtgaaaggctatatatcacaaatctatatcaagcataaaacctgacagaggaaatttaaatttattctccttaagatcagtaacaagacagaaattcttattactatttaatgttatagtggagatcctggaaaatactttgggataaagaggactgagagatataagcattggaaagaaagatataaaattgtcattatttgcagattatgttatcagaactaagaaagattaattaaaaactatgagaactaataagagttcagcaaggttgttagaaacaaggtaacttagaaacaccagcaacatttctctgtcagcaataaccaactagaatacatggtaaagaaacactactcataatagcaataaatactgcatatatctagggattaacaaccaaaaatacacaaaacctatatgaacacattaaaaaatcttatgtagattttctgatataaacatgatatagaagagaatctgaacaaatggagatgttgcaggagaattgactccaggactgccatggataccaaaatctgaggaggctcaagggccttatataaagtggcataatatttgcatgtaacctaagcacatcctcctgtatacttcaaatcatctctagattacttataatacctaatacagcgtaaatgctatataaatagttgttatattgtattgcttagggaataatgacgagaataaaagcacgcacttgtgcagtacagatgcagccattctttttttcccaagtatttttcatccacagttagttgaatccacagttgtgaaacccatgaatacagagggccaactgtattatcatgtacttatatttctcccaaattaatttgtaagtttaatatgatcccgcagttgagttctttaagaaactcaataaacttattctgaagatctccaaaaagctaagtcaattttgaaaagaaagagtaagtagagagacatattaattaaatcattaagtgggggactgatagccttagggcttcggaatattgtttatattttcaaaacattgtccaaactcttattgtatttaaatcttgtgagtagtttagaaattctattgttgaattaaacaaatttattatcatattttaagtttttcaaatattttatccaatttgctttgaaatgtctttaagaatagagaaaacctaaatttttaggaattatctgaagccataaaggcctttgtgtactttatatataaatagacatactgttttatggatatttattttctggccagtataatagataactttttattaaagctgggagtctcaggtttataacgtgatcactgtttgttttgtttggagaaaaccaagaagaaataaaaaatgtaaatcaccaattaggcgatatactaaagaatttctccatttggatctgcctttcctgataattcttctcctctttagcctaaatatcttgtttgcatggaaaattatcaaaacaatcaatatgtcaaaccaaacactctagcagtctactataatacattcattgtgttttcttttttaaactttattttgaaataatagttactgaaaaagttgaatgaacagtggagttcatatataccattctcccagattcctctaatgttaaaaacttaaccatagtataatgatcaaatctaggaaattaatattggtacaatactattaattaaactacagaatgtattagaatttcatcagcttttcctcctaatatcctttttctgtttcaagatccaatcaagaatgccatggttccatttgtgtatttagttgttgtatctccttagtctcctcaaatctgtgaccatcgcctggtctttatgaccttgacaattttgaaagtattggttagttgttttatagaatgtttctcagaataggtttgtctgacattttccttaattacattagaattctgtttttggtaagaatactgcagaagtcatgtgtccttatcagtgtatcagattggagtccagtatgtcaacaagccctattactagtgacgttaaccttgatcacttggctaaggtggtgtctgctgagtttcttcactatacagttgttatgtttccttttgtaatttataaatagcatgagctatttggagactatgttaatatcctgtatctcctcaaacttttgcccactggctttggaatttatttttggatattgcctgtaatgattattactgtggttgcttaatggtaacgttgtatttccctaattccttcttcatttattaattgaaatttttctgtaaggaagagctgttatttctccccccatttatttatgtaactatttatttatatcagtatggactcgtgggtattgatttccttctatgggttctattactctgttttaattttaaagtatgaataaaagattacaagtttaaaaagtgcctgcaagtacaaaataagaaacacatttctttcatgaaattgagcttaagatgctagttatggagtgccaccattaatagctaagggcacgtggcaaaattgctcatttcccagtctgtgtggtagttgttggtaccaggcttcggaccagtgaagtaaaggaacaagaaaaaggtgccttttggcaatagtgctattggtagacacaaagccatcatgaaagatgtttatacaaacaacagaattccaaagactaataagtaaaaaagcatttcctgtgaatttatgaataaacagatactagtattactcagttaataacattgattggaattattgaaaagaaatgcttggaagcacatcatttattttgtaaagaagtaccaaataaaactcctgcacatgaagtattgaaagtgataaaatattgaaactctgaaactaataaaatattacaactctgttgggatctgtgtactggtggtgtggctgcaatgacagaaaagtgtaacattatatttgtcaataaaagaaaggaaagaggtatagatttaaaggataattgtaccctggaagcacaatttaaatgtatcaaaccatccagagtagtggcaaggaaaatttcatcaggcaaaaaatgataaacacggcgggggcgcggtggctcacgcctgtcatcccagcactttgggaggccgaggcgggcggatcacgaggtcaggagatcgagaccatcctggctaacacggtgaaaccccgtctctactaaaaatacaaaaaattagccgggcgtggtggcaggtgcctgtagtcccagctactcgggaggctgaggcaggagaagggcgtgaacccagcaggtggagcttgcagtgagctgagatcgcgccactgcactccagcctgggcgacagagcgagactccgtctcaaaaaaagaaaaaaaaaaaatgataaacaccctgccatttgctaccacttacttgtgtgaacaaagtttcttattgatggtggcatctgaagaatttgaagagatagatcatggtttaaaaggcttgattagacattttaagtgtcaaatctgttttaaaataaatatctcacagaagcaagctcaagtttctcactaaaaatttagaaaaatatttggaatatttatataaattcaatatttagtgctttccataatactttgtattttaattttaaaaaattatacatttttccacaaaacttatataaccattcttgaatcccctcgagttttccccaatgttgaaacaatgcaaaaagttggggaacattggcctttgagtctagaacccagccctctgggtcttgagagcagaggtgaagacctctttttgtgaatttgtgagtaaccttggatggttacattgagtaggagaaaaaacagaggcaatgatgttaaccactgtggactccagacccttcctcagttttccagtggtagagagaacctcagtgatgactgaaatttaccttctcttttataggttggtcactgtgggggactgagtgagcagacttaatttgatttaggtaaatgaatgtgacatttcttacagctgaatgtaaaatgtagtaacactacattatcatggtggcaggaaataaagtgcaggtggattgtagggcaacaggaagtcaagtgctctggtgacaatggtgattttacagatgatggagccagctggcttctttggacaggtttggagaccatgcaggagagaaagacaaattaaaaactgtgaatatctccttgagaacaaagtggacaatcagcaaaacttcatggcggaaggcatccctcatttcttgcagttccagggaagaaataaatgaaaacgaagcttagtgcttcctgctaagggctacagttgtacaggaccgattaatcacttaacctgccaggtttgttatgccgaagtcagggcactgatggggaaggagttgactctgagacaccatatggggacgtttgatcaggcatatatgagttgagaactttgaaccttcgtatgtccttgaggctccattgacaactgaggtagacaatcactctcctttcccactgcatgtgaagcatttgagtgtctgcacctgagccaagttgcctcacaggctaataagaggtctcctcatgacccccatggagcactgacagggaatttacaaggctactgtgaaaggaaatggcctaaactccaaaaagttaaagaaactcgtcaaccggatattgttcatggaaatatattctaaatgtgttcaaccaagattgggctgaatttgtcaataagggtgggcccatctgggatttgggatgcaatgaattgatttgagtacctggaggtaatgttagtttattgtctgctaggttgactaatggatgcttagatatggtggtggtttacagtcagtaaggctgaaatactataatttcttcgacataatgtaatgatccttaaaattggagctttaaaaaacattgatgcttgagtgactccctggagattcttatttaagtggtttgtgttgccatgtggacagagggatttaaagaatgtccttaggtgattttcacatgttgctaaggttgagtgatttctgtaaaggaaaatcagggatgaagatgctggagtacatctattatgtgcaatccacatagctgtccattaatcacacacctcaggatgaccaagggactaagaagaaatgtattggcgaggggcacaccggcatccaggagagctcactggtagcttccctctctaggctggaggtgatggtgtgggtgctgcagcaggttttcagctttgataggaattaacaggattgcagagtggaggaggccagatggtggcacctctcatcataaacaaggtgagtgaaatgatcacagttaaccacaggggcaggataccaaatagagtatttgaacttcaggaccccgtggcaatgacaaattcatctcagggtctgtagaaatgaaatacatggaaaagcttctaaggtgctgcttaacacatatgggaggaagatttttaggtctggtgtacagaaaagaactcaaattactgtggtggaaatgtatagctttttacccaatttccaggtctaaggaagatcgaagccctggattcctaagatgaaggccaggtccatttgaggaggaactttgcatagtggcatgttatggtctgaattttgtcccccctcttaattcatacgttgacgccctaaaccctactgtgattacttggaaatagggtgtttcaaggggtaattaaggtaaaatgaggctataaagtgggtccctaatccaatgtgactttgcaatgtgaggaagagacaccagggatgcacacagggtcatgtgagaacagagagaaggcggccacctgtgagccaaggagagagcccttaggagacaccaaaactattgacaccttgatcttggacttccagcctccagaatggtgagaaatgaagttctgttctttcagccacccagcctgtgatattttgttatggcagcctgagcagactaatacatggtgactggtatatagtaagaatctttctccaagactttgccagacatacttatggccatttatcagggctatgcagtgggagagcgaaatagtatctgggggtttcagatactgcctctgtattgatggaaatctccaggggcaaaaaaatgccacaatggtccatcaatcacagcagaggattataaagcagaggagacagatgaactctgggactgattttgtctaaagaggcagcctgagattatttctttgggctcaaaatgtacagtgcaacaagataaatttagtgactggcaggatgtccacattgggttccttcttataaagtgaaagttgttatggagagagggtcaaggggaagcccctagaatttctcctgaccctctgccaagatgataaaccagaaacccaaagcaaaactccgtccctgggggagtgactagagttagtgtcaccgtcacagacttgaaagatattagggtattaatttcatatccctacttaatttgcctattctgctggtacagatactacatgggttgtggagaatgccagtaaatcattacaattttttttccttttttttggttattttattttattttagattcaaggagcactcatgcagttttgtcacctgggcatattgcataatggtgaggtttgggcttctggtgtatccatcacccaaacagtgaacattgtacccaacaggtgatttttcaacttttgcccttctcccaccccactccactgtggaattttcatgtctgttattttcatctttatgtccatatgtacccattgtttagctcccatttataaatgagaacatgcagtgtttaattttatgtagatgggcagaaagggatcaccttactggctgggctgattgatcctaattgctcagggggaaaactggattgctgctactcagtagaggtaaataggactatgtctggagcccaggagttcccccggaacatgtcttgttactccagggaatctcttgcttctttcatgtctggtagtttcagtcaatggaaaatggaagcacccaataaagaagagcactgaggacctggattgcacagaaatggaggcttgactcaactgtaaggtgaagaacagcatccagcagaggtgctggcaaatgtaagcggaacatgggatggatggtagaagaaggtagctatgattaccaaacttggctttggtgagtaactacagaatcaaggagtctcgatgttctatttaactgtttgctccctatccctgcctttttctctaaccaccttacatgagtaacactgggggtggcttttaaaagtttcagataggagtatgactacattgacctaatgtgatgattcagaatttcacctgtgagagggaacacaaatgtcttacccaagaaagaagaatatggtcctgaggggcaagaggcatggactatgctggataacttccaattacctttccaaatccaccctccatgcttctctcctggctgtctgcccaggaggctgacctgcatctgtgggcttccttgccttctggcttctagttgcccttggcttctgggtttggccaagggggtgtagtgaaaggaacttagagaatgggaatgtcatgtcgggttaaaatcagcgtacttgtgctaacttgaatgggagtgggggtgagggaaagaggtttcacagtgactcaatggccaattagatgctcatgaattcatggcttattgcaaggctttcatacactagcaatcatgcaaatatattttgcagggggttggagagaggtggttctcattgctcttttcccggtagggctcctggtggcgatgccagatggaaaaaaggactcagagttctcatgagcagagcttctacaggcatctcgccatggccagtttctttgtggtttttatggccctgcacaggagtgttcatagccatgatctcagcagcccttggctttgctttcttgtccagtcttgggagtgcctgaccacagcaggtatatgtaacattatcccctcagatgcatatgtttatcactttgaggggtcagcaatttcactgtatagtatcatgctgtacaggtttgtacaggagcaataggctgtacaatatagcctaggtgtgtggtaggctgtgcctacactctgtgatgtttgcactgtgaaacgtcattaagccatgcatgactgtattccctggttcctttcccatggggtcactgcaggctatttttcttgatgaaggtcacagctcctattaggtggccttgttcacaaagttctttctctctctgcgttctagtaacctcctcttgtcctttcaggcctaggggcggccagaggtataccccacttttagtagcctgagtttctgtactatgccttgggatttccctgtactctacccatatctttataaataactccttcatgacatttacctccaattgccaaatttgaacatgtcatctgtttttttgttagcaccccaattgacacagcatggctcccaagttggcccaaatagactagaaagtctttgatagttgtaggggagatattccttttttctacaagatgtgaatgactgagcatacagttctgattgacacaggcagccctctaatggccttggagaaacctggccttaagttatgaattaaacttaagaccagagagaatttttaaaaatactggtccttgctcaccttatacaactatcaggtcagcaactctgataattaataatcctagacttccaattatgtaacctagtaaatatttttattgttttagccacttgaataggatttttcaggtttcgaagctgaaaataacttaaattgatagactcttataagtacacatatggggccaagcgtaaacacattatcatttttaatagcctctacaaaattgctttccaaaaagtctgcaatgattcacacggccatccatgtggtgagtgaatctattgtctcacactattgcctactatctttttaatctgtgccttcctaatgggtggaaactgaatctcagtattgctttgatttgcatcttgctaattaccagtgtggtttactataattacttatatttattggacatttatattttctactcagtgaaatactttttacgtcaattgctcatttttctatggaattatttgcacttttcctgctgcttagtaagaattatttataaactttggatattaattatttgttagatgtgttacaaatattttatcttgggtagtctgtctttttaaattcatttcatgatgtgttttgtccaaaattctaaaatttgggtgatattcaatttatcatctttttttttttatatggattttgcactttgtgtgatttggggcaaagaaggctaagggttctctgtcatttggctctttgtctaggaatttcaaactctaggcatttaacctggacccctttctcaggagttgcactatgtgctgtctaattaaggctttttattgctttagttctttgttgttgttgcacataaatgacaatttaaccaataactgttttaaatttagagaaatatgcctttacaatagtcctatatggtttggttctttagtcttaactcttttaatgtttctatttattactgccattttgatgtgtagctttggggttatttttgttactctgtccttcatttaaatagcgtgttggcctatgtgccaaagtctggggtttcatagaaaccagcttcaggaagatgtaatggatcagctcataggaagcaagtctttgataatgggcttgggctatgtggaggagcagaggctttcggccatgtccatgcacatcattccatctacgttgggtaaaggctttaccacagagcctatgccaagagcttccttggcattttcccaagtccactagagtacaaatggccccacactggtctctgtggttcatggtacacaccatgttgccccaccaatttaagcgagatgaatgccaacttctttccagtggcaatcttcaggccaggttgccagcctgcttgtagatagcccttgataggtaataggccacatggctttggtcctctttgggggccccaaggaggacctatgactccagcagagagctctgcatttggagtccggagttatagattctaagtttaattttactactaaggtgattttttttatggttggcaatggtgggggctgaataacctttactgctccatggctccctctgctttgttatgattgtgtgcctggtttcatgaaaaaggtgttgtagagattctagagattgtagtggtggtcagtaatcaagttctcttaccctacctgcatttcattgatattccctcaacttaataaggtaatgagcatgttaagtgaacaaactagtagcagggcttattaccaaatgaatgtagattgacagtgtcatagagcttggaaattagaatctggactaagtgttttcttaaaatcattttcatatctagggaatttggccttgtcagtacttatggtaattaaattcaagccacacttaatgataagcatcattgtcattgttctccatgataataaatcgttgataataaataaaacaatcaatggtaataaataaaatatagcaacgctatgttctttactttttataaccagaatcaatattgatggttttctcaagtacagccagggtatcatgtaattataacatccatcccttccactttaagataaacgttcggggccatttcttcagtagatgtgatctctgctctttactgatcaaccccagtgattcagttctccccttttatcatcatcactcctactccctccaatttctctgatacttattcacactaacagttaaactagggacttcaggatggatgctgagtgctgggaattctaggaagggctggattctctgagtgcttggaatctattgaagggtcaggaccaagtggaatgagggcggaggctgaagaggacacatgtcaccctcttttatagtttttgcaaccttcatctgggcgtgggaagttctagctgtacccacaggcttttgaaccaaagaaaattcagctgttagagctgtgtcctgtgagtcctctgagcatcctcttcttgacccctcccctccaccttcatgctccaagcattgaccagactgtactctcttttcagaggtctgagcatcaatttggcagagaacgcctcacctccgactcatatctggggataagtcctacaaaagcgctcctttgagacctaggttcttttgttcccttttgtttccttcctgtagttgttactatctgagataccacagcaatcccttaatcttctttggctttccaacacacgtgtatctagttccttttattcaattccctttgtttgcaattcctagcatggattctgctttcagagggatcccagttggaaattcaggcttaagggatttggggggtcaaatgatgggaattttagatgctgttttgtggtgaacatcccaagaaaggagttatgttgactgatgtgtaatggaggggatttttaacagggcaatggagactcaagtgaggtggcactggctcaggttgactttgaacaaaagtgcacctggcattaccacactctttcctagggtcacagaaacactggaagccaaaagtgatagaattggggccatggcaggaaaggactgtgttcttccaaggccagaaaggagattagggtgaaaagtaagagacgttgagtcaggagactctttgcagggctgggaagaggggctcatggatgagcttatctggaaggttctgtctcattctttgtgcttttcttccttatagatgggtaaacctgaagctgttagtgcttcaagtctgtctcctaaaactcacttcactctagtagttaacttatacctcagtaaatttttaggcttggctacagcagataggatggggtgtataaacaagatataaaaataactattaccactgatcaggaacctagggcagagggtgggggataagctggcatctggggctcagatttgggagaaatcgctgcccacctctttacttccttaggcagttctggagtccactgcattttgagggtacctgaaactaggattgcctcagttaaaagaccagtctgcatagtccctgtggctccccatgtggatggagctgaaagagtgttaggtaggggagctctactgcctggctttccattcaggtgtggccttaggtggggtagttgagaaatgccacagggaccttgcctgagacgtgtggctaattttgctcttacaggatgcctttagcctgactgcagagggcaaggctcccagtcccaggagatggagtccctgacatgagagtgcctggcatttccagttctagctctagaatgacatgacaggagagctgaactctgggaaattcccttagtttcccctttatgagaaacctaggatctgtcatcaacctcatttccttgtggttgattttgtgcggattggctcaacacttatttctcagcgagcccggacaggtgatacttgtgctaattctgtgatttcttcctccgagcctcacaggatcttctggtaggaggagctggttttctttcatgtcatacgtttctcatgccccacccaggaagctggagcctccttctctgctcatccagataaatgatccaggctccattagaacccatcactgaccttggaagctgctggagccacgattcagtcccctggactgtagataaagaccctttcttgccaggtatagtcaatagctggaaaacctcttctccctccctctggagcctttcctctcatctgtgctttgggcttaatgaagggaagggccacatcaggctggctctgtgctttgtcctatgtgtggctgcttcttactggggagttgctgggatcctggcagagtggccctggcatgggaccctcccctgctcctaggcaaaaacaatgccgatgaaggggtggaggcttcagagaagaggagtcagggcatcaggtgcctgtgggttatttaaggtcaaattttatgcctggccttcgaactcctaggggagacactaccatactatctggatctccaggtggaggaaaattctacctgttctccctttgctgatgcttccttcaagtttcgtcccagatgtggctcagaacttctgcccagagcttcgtgtcaggccaggtttcccagctccctgtctagaatgagggcctgtggagctagtgtcctggaaggtcttggaaacatctcttgtggttcatctgttctatgtctgctttcacaggtgctgagacaaccacactatgagaggcactccaggagacgctgatggtggaggaagggccgtctatcaatcaagtgaatcaaatgctgttgggatggggctctggaggcttaggccctctgcactcacgctatctcctgtggaagccccagccttctctgctcctctctgtacactgcccttcccacctggtgctgcccacctaccactgggccctgggcttctggagggtgggagctattgcttagtcactgatccagctccagtccccagcaccggggccaagcacagagtaggcacaaaagagggtagctgggccttggcacacaggttctgtgagactgctcattgccctctgtcttgatagtttgccctcttaaaccagtgacttcccttggtagcccttgccttcctcaccagagctcacaacttcactagaaagaaaggctaggctgatgggtgatgtgagtgctgtcagtttggggatgcaaaccccacaccttccttacaaaatggcctgggttagatacttttctcctgggtctagtaaagcagccttgattataatatttcttcatttttttctctatcccaaaatcagtgtgtaaacctattactgggactattaatgatttgaatcagcaagtgtggacccttcagggtcagaaccttgtggcagttccacgaagtgacagtgtgaccccaggtgagtggtcaccctgtgccttccccactgtttgcactgctgtggctgggaagctggcatcagccttttgtaaaagtgtgactttacaatggggcccaccaggagtggggagaatttcacacctaattgggaagagaagtcagggagaactttgggttccactaagatgaagaagccagagatggtggaggagcctccaagggaataggaaagctgctgtcagtcatctgaagccctgtcttatggaagactagtagcttgttctgcatgacttcagggtgtcctaaaatgactaaatgggtgaataccacagaaaggcaggtttcagcatcacattgggaaaaacttgcaaaagggaccaagctctccaagaatcagaggggctgcttgatgtaggagctccccatctccatgtgctcaagcagaggcgtgagaatctcaagagcatactctgttgtctgcttagctctctgtgtttgctcatttactagggcagtgattggcacatggtatgaatgaatgaatgaatgaatgaatatgggggttggccatttggtgggtctagttgggattacactcttcagctctcttccagatccacttgaggatactgccctgctaaatcaaataatctttctgacttcaaaaggaaactgataccatctctcctcttatctttacagtcactgttgctgttatcacatgcaagtatccagaggctcttgagcaaggcagaggggatcccatttatttgggaatccagaatccagaaatgtgtttgtattgtgagaaggttggagaacagcccacattgcagctaaaagtgagtagctaagaaaaatatttaaaaagcctttccttttagaagtgtttggttgaatacctaattttagaattaaaaaagaaatagtctcatcttcctaagcatatttattcccagcctcttttaagttatgtgcatgcaatacacttttctttttattctggctgtcagtagttaaggtccttgttttgctttttttttttccaagccaaactgcatccagctttattaaagatactttccataaacattcatggtatttcaggcaggatatgggcagacaattgttaagagtatgcagcaaacttcaaactcccttgttcaaaggactaccaaaaatcagaaagccactataaaactcaatgaagtcttcatctgatgctctgaacagggagagtttagagtgagagttgacatttcacatttagcatgtggtttaaacttttcacaagccaaccctgactttcaggaagtgaaatgaaaatggtagaatttatctgaagatccacgatctagaaacagaaccactgctcttttgacaggtgccatctcagtggcatcactggaaagtccagagtgcctgacatactggtaaccaatgattgagggccaggtcccaacagatgtctggcttaaaggagttaaatctatgctgaaagatggaaagggagaagaggacataaaaatgaatttattttccataccacaaggcttttctgccaaggtggccatgtgtgtcaaagtcagagaatccctcctcctgggagccaagaggaactctctcaaaactagaagggaaaggtgttttccccacatcgatccagctttggagacattctattagtgacatatgccccttcccctaaaaacaacaatgaagtgttctgggtgctaacaacatagcttaaaaagaaaagtaaaacaaaattctgcatttttataaaacttgataaaaaatagtttttcaaactgtacagtcaccagaagtacacagttatcaaaaatgcacacactacacttggcatctgcagcaccttcagctttctgtgccttccctgttttggcatctctattttctgcagagttattcccctccttgccagcatcagcttttccctttttccctttgggtaccttctctcccttctttgcaggggcatttttaggcttggcctctggatttggaggagcaggtttagcagacaactttgcgggccttctctgtggttcgtccttcaccttggcttatctccttcagcatccccttcagcctttctcctgggcatggtggtggccaccccagcgggatataggcactggatgcaggatgcagcattgtgcgggttttggtcagtctgggggctgttcttgcctcttcttcacactgctctgtctttcttaacctttgatatattcttggccatcatttcttcaagtatattctcacccttattttccttttggaattcctattcatccatcgttggaagttatgaatctcacttcaatatctcacgatatctcatctaattttttatactttctatcccttcattgctttttaaaattttggtgttgcatctggaagaatttcttgctttgctctgccagctcatggttacattttcagtgttgtcccttctggaaatcatccttttatagcatttcctgaaatttcaatctttactcttttaattcccaagctctctggtttgttctttttttattttttaatgactgtttgtcctcgttccacaaacttcagtttaattcagtttgattcaactcaatccaattcaattaagcgcatgtatgggtacttcctggcctctagcactgcgtagatgcttgagatatagctgtgcacagaatggcaaagaaccctgaccatgtggggcttggattctagtgaaaggagagaaatggcaaacaataaatgtaatagtaggcaaatttgtgctatgttagaggtctttacctctcctagaaaaataaaaatggttacagcaggatagatagaccagcagtaccaggaacacaggcggcgtcaggctgcagtggtgaatagtgcaataggcatcattgcctaggtgagatgttagcagggagtagaaagagctagggaagttagttagcaggtgtctagtgagggcacgtcccaggaccagtgaggaccggtgtgcaggagtgaattgaggaatgagtccagagagataaaggcagacatgaaagtcttgtcctttgcaaggactcagccttgcaatctgagtgaaatgggaaatattagaatgttttgaacagaggaatggcgtgaaggggcttaggtctaaaaaggatctctctggagatcttagactgtggcgggcaaaggtgaaagtccttcaggagactttgaggtggtctaggtgtgatttgatgggccaggagatagcagcagaggtggggagcagtgagtcagattctggtagtattttaagtggaggaaacaggattgtgagtgtgatcaataaagtcaggactgagaatgacatttgctactttgtcctgtcagctaagtcacccttatgttgtgcgtttgttctcagatggggactaagaattgactgttgcgtttggcaatgtgtgggtctttggggaccttggcaggagcagtgttggtgctgtagtgggggcaaaagcctggatggagtaagtttaaagggaggaattacaagaaagggatcagagacagcagatatggacagcgattgcaggaagttttctgcaaagtggaactggtggcggtggtgggtaagcaaagtagttattttgtttaagatggtagaaatgacagcaaatatgctgatgggaatgactaagaagagcaagcaaaattgatggagcacaagagagcagggagaacggctagagggatgtccttaagttgcaagtgcagataggacctttcacccagtcctcctcaagcagggaggtgcagatatgggtgccatgtgctgggagcccatgttatggtgtggtttgtacaagttgtcttctaattacttcaattttctcagtgggtaggaagttgaaggtgatgatggaggaggtatgggagtttcaaaggaggaagcattcttccatttattaaacagcaaatctctgttgagtagaatgctgggggctttcctctgtgttgaggaatacagtgatgaacaagtctaacaatcattctgggattgatgaataaatacgctaagtttagatagcagttggtactaatgaagaaaataactcaggaatatgatcgcaatgagtaggagggaggattccaaaccgattttggctgggatggaatgttcagtaaagttctccccaaggaggagacccaggtgatggggagcagctggccttgggaagatgtggggctggtgtgaggtgcagggagagtaagtgccaggaccttgggtgggaacagcttggtgtcttggaaggcaaagaagaagacaggttggtgggggcagaatgagcatgcaggagagtggtaagaaggcagggcagcaggtaggcaggagctgggtggcgtagaccctgtgggctttgccgaggagtttcactgtaataacaatagaaaatcatgcaaaagggtatcataatcttatttatttacttcagtttaaagttcacttacctgccttatggagaatgattattagagaatagagtaggttcaaggagaacatttagaaggtcaccctaattgtccaggtgagagagtgatggcctggattggggttgatgccatgtgtggagtgcaagaagtgactcgattcaggaaatattttggtattttggaaatagagtccacaggccttgctcctgggttagatgttaggggatcaaaaaaagaaatgtcaataatgactcctaggtttctggccacccaaagaatcagattaactggaagccattaattgagtaaaaggaatcctgtgggagaagaacttctcactcagggtggaatgtggctgaattacagatcatttctgtgtctctcttgagatcttgaacacttgcaatttacttagaaatacttattttacctaaatatacaatgcatgtacatacaaatatatagacatacagaatatagttccatatacaatatagaaggcattttttgattgctctatttaccttcttcctttgatacaaatcctttgatttgttagaccctcttgggtctttttcattggtatttatctttctcatatatgtggcaattagtcagaaattcataccctaacctggctgtcctttgtcacgccggtggttcttgcagggtagtgactctcactgttgtggtattggtaagggaggtaatttccaatttcttcctcttcctaagggtcacctcagcctcttgtgtgagaagagttctaacttgttgttcaagtgtggctgcttgttcattaaactctcccttgtaaacttcctacaccatctctggatttgagggtgggggcttggaaggtaaaatttcatgtatgtttactctgctgctccttcaaaatgtgtgtttctctaggcctgctctaatagatggataaggttttctggaactttggaacatttattgaattattatgaataaccttgaatatctcaaacagcttctgtttctcctaatgggtacttgttctgacatttcaggagcagaagatcatggatctgtatggccaacccgagcccgtgaaacccttccttttctaccgtgccaagactggtaggacctccacccttgagtctgtggccttcccggactggttcattgcctcctccaagagagaccagcccatcattctgacttcagaacttgggaagtcatacaacactgcctttgaattaaatataaatgactgaactcagcctagaggtggcagcttggtctttgtcttaaagtttctggttcccaatgtgttttcgtctacattttcttagtgtcattttcacgctggtgctgagacaggggcaaggctgctgttatcatctcattttataatgaagaagaagcaattacttcatagcaactgaagaacaggatgtggcctcagaagcaggagagctgggtggtataaggctgtcctctcaagctggtgctgtgtaggccacaaggcatctgcatgagtgactttaagactcaaagaccaaacactgagctttcttctaggggtgggtatgaagatgcttcagagctcatgcgcgttacccacgatggcatgactagcacagagctgatctctgtttctgttttgctttattccctcttgggatgatatcatccagtctttatatgttgccaatatacctcattgtgtgtaatagaaccttcttagcattaagaccttgtaaacaaaaataattcttgtgttaagttaaatcatttttgtcctaattgtaatgtgtaatcttaaagttaaataaactttgtgtatttatataataataaagctaaaactgatataaaataaagaaagagtaaactgaaattagcaagagtagttgaataaagccattgcagtgggtaaacctgggactggggcttagctggggacaaaagggccttccttggtggatagtgatggggtgggggtgagaaattcagtatgtaacagggctctgctgtttggctcctttctttatggtcgaatagccttggtttttccctgcttcctctagtcttttccttttagaccatctcaccattcacatacttttttcaaaaacttcagtaaagatgtcttttttttcttcttggaagagaaagccttgctttcccaacagccacctttagaagatatattctgacgaaattaaataactgactgatatagtttgcatgtttgtcctcgtccaaatctcatgttgaaatgtaatccccagtgttgaaggtggagcctggtgggaggtgttttggtcatgggggtggatcacttgtggcttgatgctgtcctcaccatagtgagtgggttctcacaagatctggttgtttaaaagtgtgtggcacctccaccctcactctctctgttgctcctgcttttgccatgtgatgtacctgctcccccttcaccctctgccatgattggaagcttcctgaggcctccctagacgccaaacagataccaataccaagcttcctgtaaagcctgcagaacagaactgtgagctaattaaacctcttttcttaataaattacccagtcttggctatttctttacaaccatgaaagaacgacctaacacactcactgtgggtataattgtagaaatatatacctcagatctgattctgtatataatagatttctttatttttactctaacactgaaaatgcagaacattctgtttgcttaagtacattcttcaaaatagcatagcaacttatttttttttctacttttgggcaatcagactgcatccactactaacaattacaataagcaatcagcaagcatggatttaatgtgatacctctttattctttaactttttctttttggggggttatttttaattaaacatttaaaaataatttttaaagctcaatttttacatatctttttaaattgacagataacagtgtatgtttttattgggtaccacatgatgttttgaagtacatatacatttgtggaatggttaaatctagctaattaacaaatgtactgcctcacatggttatcattttttgtggtgagagcacgtaacatccactctctacattttttgagagaatatatcatcatttactatagtctccttgctgtaaaataggtctcttgaaagttattcctcctacataactgtaattatgtagcccttggctaacatccccccatccctcctcctggctaactacactagcctctggtaactaccattctactttctacctctatgagatctactttttttaaaatttcacatatgagtgagatcatgtggtatttgtctttctgtgcctggcttgtttcatttagcataatgttctccaggttcatccatgtcgtcacaactggtgggatttcaatccctttttatggctaaatagtattccattatgtgtatgtaccacattttctttatctactcatctgttgatggacacttaggttgactcaatatcttggctattgtgaatggtgctacaataaacatgggagtgcagatatctctttgacataaagatttgaattcctttgcatagtgtgattgctggatcatatggtagttctatttttaattttctgagcttctataatgtttttcagagtggctgcactaatttaaatgccccccaagggtgtttaagagcttccttttctccacaacattgacagcacttatcttttgtctttttgataatggccattctaactaggggaaagtgatacgccattgtgattttgacttgcatttctctgattaggaatattgagcattttttcatatatctattggtctttctttttgtgaaatgtctattcaggtattttgcctgtttttcaaacaggttatttatttattattattattatttgcaactgagttgtttaagttcgctatgtatttttgatatttaccccttgtcagatgtatagtttgaaaatattttctcccattctgtaagttgtctcttcactctgttgattgtttccttttctatacagaagctctcttgtttgatatagtcacacatttgtttatttctgattttgttttttgcctttgattttgaggtcttatccaaaaaatccttgctcagacaatgtttctcctatgttttcttctagtagtttcatagtttcaagtcttacgtttaagtatttaatccatcttaatttttgtatatggtgagagatgagtcaattttatttttctgcgtgtggatatccaatttttctaacatcatttatttattattttttataataataatgacaattatagcatttactacaatgacttttaatactctaaggtgcatgtgtgtgtctctgttttaatattttacaaattgtcacaaaggcactcaaccccatagaagacgtagtattttttagtgtaaagcaatttttgtagtcttgacaaaaatcatttaaaattctgtcacaaagcaaattaatttcctatttcatgaattaaaaatgaaaagagactacaaaaagctttatttgttttaaatcatgtttcccttcttttttggggacaaaacaatgtctactttaattaggtaaatcttcctcagactttgatgttgtatcatagcatatatcataatcttacccactatgtttagagattgttttttaaattaagtgtgtaataatgcccacacctttattaactctgtttagctgcattagttcatgatgatgctaaaatctctcatatttcattttttcttgatgtcatttcatcaaaccattaagactcatggttaaaatataataaatatataatagaggcatatgtttatttaacacaaagcttgttgttagtatcatgttcacagtggtgggagccatgactaattcatcagtgttcccagtgccttggcagtaggtcttcaccattaaatctcatgttgtagaattactttatcacttgatttaaaaagaatcatttgcttaataatttgcttagagtaatgtttgctattagtgtataaaaatgctactgttttttcagcaaagacttgggactaacttaaatgtccatcagtgttagactggataaagaaaatgtggcacatatacaccatggaatactatgcagccataaaaagaatgagttcctgtcctttgcagggacatgggtgaagctggaaaccattattctcagcaaactaacacaggaacagaaaagcaaacaccacatgttctcactcttaagtgggagttgaacaatgagaacacatagacacagggaggggaacatcaggcactggggcctgtcaggggatggggggtaaagggagggagagcattaggacaaatacataatgtggggcttaaaacctagatgatggattgataggtgtggcaaaccaccatggcacatgtgtgtaacaaatctgcatgtgtatcccagaacttaaagttaaaaaaaatgctactgttttttgaacgttgattttgtaacctgcaactttattgaattagtttattagatctaacagttttttttcgatgtttaagatttttagtgtataagagcatgtcaaaagcaaacatggacaattaactttctcctttccaatttggacgccctttatttctttcttttgtctggctctggctaggacttccagtactatgttgaatagaagtggtgaaagtgggcattctttttttcttccaaatcttagaataaaagcttcaaacttttccccattcagtatgatgttagccatgggtttgttgtatatggcctttcttatgttcagatacattccttctatacctaatccattgagagtttttatcatgaagagatgttgaattttgtcaaatgtttttttctgcgtcttttgaaatgattatatattttttctttcattttgttaacgtggtatattatatttattgatttgtgtgtattgaaccatccttgcatacctgggatgattggctatggtgaataatccttttaatgtgctatttgagtttggtttgctagtagtttattatggaattttgcatctatgttcattagcgatgttggtctgtagttttcctttttggtggtgttctggtctgattttgacatcaggatgatgctggccttatggaatgagtttgaaagaattccactctcttcaactttgtgaaatagtgtgaaaaggcttggtgttagttcttcactaaatgcttgatagaattaaggaatgaagccatcaggccctggggttttctttgatggaagagttttaaactgctaattaaatctccttccctattgatctgttcagtctttttatttcttcatatttcaatagtggtaggttttatgtgtccaggaatttatctatttcttcaaggttttccaatttgttggcatataattgttcataatagtctctatgattctttgtatttcagtggtatcagctttaacatctcccttttcatttctgattttatttatttgaatattctttttttcttagtctagcttacagtttgcttattttatttatctttttaaaaatcagctcttcattttgttgatcttttttagtctctattgatttatgctctgatttttattattttttcttctactaattttaggtttagttttttcttgtttttctagttccttgagatgcaacattacattgtttatttataagagtatatagtatataatgctgtatactctttttgtctttgacagtttgatgattatatgttgttgggtagtcttatttgggtcctttctttttaaatataggtgtttatcaccataaacattcctcttaggactgctaatgctgtattccataagttttggtatattgtgtttccattttcatttttctcaagacattttaaaattttcctttaaatttctttattggtccattggttgttcagtaacatgttgtttaatttccatgtatttgcaaattttaccaggtttctcctgttaattctttctagttttataccactgtggtcagagaagatatgtgatatgatttcaatctttttaaatatgttaatacttgttttgtggcctaacatatattctgttctgaagaatgttccatgttgcaattgaaaagaatatgtattctgtagcagttaaatgcaattgttttttgtaaatttctgttaggtctattttgtctagagtgccatttaaatctgatgtttgttaattttgtgactgaatgatctttccattgctgaaggtgaagtgttgaaatcccttacaattattgtattgcaatctatccctttctttagatctattaatattttccttgctgaattcacccctttgccattatataatgacctcctttgtctcatttttacttaaataaaaattaagttttaaatttacaatctattttatccaatataactatagctacttctgctctcttttggtttccatttgggtagaacatcttttccatcccttcactttcattgtacatgtatccttatagatgaagtgggtttcttgttggctgtgtaagttgggccttgttttttttttttttttttaaattcagctactttatgacttttcattggataatgtagttcatttatattcaaggtaattattgattgtaagaacttactcctgccattttgttacatgttttctagttgttttgtggatccttttttgctttctgtctctcttactatcttcctttgtggctaattttctttagtcgtatgttttgattcctaattattatttttagtgcataggtttttgctttgtggttaccatgagacttacaaagactttttatggttgtaacaggttatttaaaactgatgacaacttaaatttgattgcaaaaatttctactttttaatttaactcctctctcaacattttgaatttttgatgtcacagcttatatctttttatgttgcatattctttaagaacttgttatagttattatttataatagttttgtcttttaaccttttatactaaagatataagtgatttacataccaccattatgttaatagagtattcagagtttgactatgtacctacttttaccaacgagttatattctttcagatgttttcgtgttactcatttgcatcttttttttcatcttgcagaactccctttagcatttcttgtaagacaggtttggtggcgatgaattccctcagtttttgtgtgtctgaaaagtctttatctctccatcatttttgaaagacagctttgctgactagaatattcttggttggcacgtttttttccttcagcattttaaaattccattttctcctggcctatgaggtttctgttgagaagtttgctgttgggcatatagagaccattatatgttatttgcttcttttcccttgctactttcaggatactctttttgtctttgacagtttgatgattatatgttgtggagtagtcttgtttgggttgagtttgattagagatctttgaccttcctgtacttggatatttatatctttctccaggtttggaaagttttccattgttattccattcctttctctttctttactccctcttgagtaccagtaacccatacatttgctcttttgatgttactccataagttttataagctttcttcatttatttttattcccttttctccactgactgtatattttgaattaccctgtctttgaattcacagattcttttcctcttgttgttcagttctactgtggatggtctcattgtatttttaattttttttttctcagctccagaatttctatttgagtttttgaaagttatttcattatctctgttaaatttctctgaccaaattttgaattgttttttggtatgttcttgaagtttgctgagcttccttaaaacaggtatcttgaattccttgtcaggcagttcttccatctccatttcttcagggtcagtcactggcaccttattttgtctgcttggtgaagtgaacattccctgatttattgtgattcttgtagccatttgtagatgtccatgcattgatgtaagtacctaatctagtctttgcaatctggctttgttggggagcttcctttagcagtaagcctgtccagagattcagagaagtttgactggggaggtccctaagcctgtgaccatttcagcaattgcagcactaggagctgctctaagtccaggatcacaatggccagaatcctttggcagcagaggctgaggtagcactgggtcacatccaaagcttagagtctctgagaccagcacagcactacatagggcatgctcaacaccatggccactatggcctgcccactgctggcagtgacttgtaccaaactgaagtccatctcactggtgccacaggttcctctctggtgctggggtagatctagaggcttcatctacaggtataagtctggtggtagggatcaagttgtttgccctgtggtgggttttactgtggcaggcatggtactgagttccaaggtgaagtcttactcttaattcctttttctttccccaagagataatgtctctctctatactgcactgcctggggttagggaaggggtgatgtgggtaatgtaaaactgtccttcctattctcttcaatgtatctgttattattatgatgctaaaatcaagtactgtgatctctcacctggtttcctttgctcttgtgattttttttgtgcatgaatagttgatcaaattgatgtttctgtgtgggatgattaatgcaaagtcctactttcctccttcctctgccactctcctctaaagttttcttcctcaattgaatataatgttggcattgcagttttataaaaatcaacactaaaataagtgttaaagttaattaattctggaatatccaatagaagaattagtcattggatattcactcatatatccatgctatgctaataaatagtggcaggttgttacatctgccaatttatattattaattaaaagctgatgacacattagcttgtgacatgattatggttgtaagtgttacagcatctccatcctgctacaggctgtgtgatgatttggtattcccacctcttttctctactgtgaaaaactttgtttgttcagtcactgataccttggactttcacttggcacaaatgtgagctcaaacaaaagctcaaatatgagtcctgacatcatgtggctggactcaagggtaaggtgttcattctggtgatacagaagaggctatgatgacagagtataaccaaaatgaaaacaccaatttataataatctcatagaaagcatgtggaacccagaaaacacagatctgggctccctgccttacccagcacatgtgagaaatagtgtattatgccatggtttacaaaatcatggaggatccctgcaaggagcaatatcttcattttcaggtgaatagtctggtccacacctagtttttacacattgctatagcaaatacttctgcatttgagaagcacaagctctaggctaatactcattgaataatttgttttctttggacctttagcaattggtgttatagaaggtctgatgcactaggagaagggggattctgggggcgggggcggaattagtagtcttataaccatgccaccagagattcacaattgtagataaaacaggtgagcgggttgtttctctgtcaagtcgctttggggctgatatcctctcacctcaggactgctgaagggtaatggctgtttcctgaatctggacaggaagactttgtctcataattcattaacaactgggcatggggactgaagatgctgcccacagagtgctgaaaacaatggtcataattaataatacatgtcaataaaatattgttttgtttcttagactgttgctgtgagaaatcagcaacaattaccttgagcaagatggcagagcaaagtctgagacatgtcatcattagggctgtccctatctagcagggtgtcagcaaatgacctacccagggtagagtcacccaaggtggagcacctgtgcaaatgtcattacgtagtggcacaagtacagtaatgttcagcacacctgtatttcccaaacttgaaactacattagaatcatctggatattcactgaaaacctagggcacttgtgctcgctccatgcctagtagattaaaatcccctcctccagaaattgcaacttactaagtttatggtgggacctaagaattaatattttaccaaagaccctagggagtgctaatttctaagtaaacatgggaaatactcttctggaccatccagtggagttttgtgtgtaaaaagacacaaattaatcatgcttggaatgatctatatgcttctatagaaataaagagatatgtaacaatacatacctcctgctttttttgacatttacttttgtaaagttgttctctcttgagtgatttaaaagcaaattgaaggaaaatgacttgtataaaaagttcacatcctcaaataaaatttttcatatccccaaattggaaagaaccgaaatttccatcaagcagtgaatagataaacaagttgtggtgtattcaatgctacttagcaataaaaagaaatcaaggatgtgggtggtggcacgcggcacggcaatggcagcaggcggcagcgatccacgggctgacgatgtagaggaggacacttcacagctcctttttcctaaagagtttgaaacagcggagacccttctaaattcagaagttcatatgcttctggaacatcgaaagcaatagaacgagagtgcagaggatgaacaggaactctcagaagtcttcatgaaaacaatgaaactacacaggccgtttcagtggtttcgaaaacagagagaccattgccagtgttcgtagctctagaaaaaccttcataaatttgagttggtctgtttggccaacctttgcccagagactgctgaggagtccaaggctctaatcccaaacttggaggggtggtttgaagatgaggagctgcagcaggttcttgatgatatccagacaaagcacagctttcagtattaatccctaaacatcactgctgcttggagaaactatggccccacagggtctggggctgatttgcatagacatttcattgtagaagacagttgggaattcctttggagaaaacagcccaacttgctgttgggttaggttgctgtttcaaataattcgtaggtccaggtgacatgtaatcttggagcagccttgtgcagtggctgccagtggcttcctgagtgtgccctgggaagtgtgaggtggctcgggtgggagggggtgtcatattagccacactgttgactccctcattcatgacttttggcccccacgttatcttgtattcttaatacttcatgttttaatttcagtgtgtttatacgttttgaaactagaccagaacatagtagactttatagagaaagaccagttttatctagatgccaaaggaagaattaaaccactgttattgtttgagacttttttttttttttttggagatagggtcttaactctattgcccaggctggaggagtgcaatggtgcaatcatggctcactgcaaccttctgggatcaaaaaatcctcctgcctcagcctcccaaatggctggggccgcagttgtgcaccaccactcttggctaattaaaaaaaattttattttattttattttaaatagagggtgtgtctcactatgttgcccagactggtcttaaactcctggcctcaagtgatcctcctgtcttatcctcccaaactgctgagattacaggtgtgagccactgcacctggcctgaggagtatgtaaagttcctgggcctctgtgcatgcctgagcagctgctgttcagagacttcaagcagctctgtgtcagaccccaggtcctggtaatgtgcgctcactccacctcctgatctgagggttgcaaagattcatgggagaagtgtggtttcctgcttcccttggcggggtgctggggagtcccttggctctctgtcgctaacaggaggactgtcacctcgccctgctttcctttgttctctgtgggtcgagttgtttccctgatcagtcccaatgcgagtacctggatatatcagttgaaggtgctgtatttactcacccctttttgttattttccatgagtgccacacactgcagctgcttctcattggtcatcttggcccccaccagcagttcttaattctagagaaaaaattaagttattcaggagacaaaatgtaatcataatttactatatagcttaattgtcagtaatgtttatattgcaataatagtgtatatgctatccaaaatcatgatgtaaatattttggaaggatgcatggatgaatgagtgtgtgtgtgtgtgtgtgtgtgtgtgtgtgtgtttatgtagtagggagttagatgagttgtgtatgacaattaaaactattttccatggaaggatgttaacacataatggctcaaacagaaaaatcgagaaatagcaccacactcatagtactttgaaaaatggaggtaaatatcaaaaacaattaaaagagtaaaaactggttttctctgagcagcaggaaataatgactattctgttttgtaacaagactttgaagcctgagaaaacagactatgtttatgtgaagcttttgtttctggagatgaaaatagcagagccaagaggaatgatgaaaaaattcattgttggactatatggaaaactcaggctgtgttcatggtctttgagtgaactattttcaagtaagtggtctaccccttgatatttgaatttaagatagtttacttttgttattaatactctttctgttttaagcaaattgtgattgtcaattttaccaatgggttggaggccatagactgagaaagcaaccctccttttctgcactggaaggatgaaccatcattctgcctgtgggaccttgctctgacattgccttggattggaatccaagtctatggagagggactatgtgttttcgttcttcgtgggtccatgtctttaaattttaatatagtatttttacacttaaaatggtcataaaggattttattttactttttccttctgtaagatttagataaaagactttctggctttctcatataactggctttattttttcatctttattactgatgtctgatttatttctgccttttaaatatttattattttagcttattttgttttatttagatttacatatggcttttaaaaaaggttctctaagaatttaatgaagtaatgagattaaacactcaataaagaatagaaataaactcaaataaatatggaggtaaatatcaaaaacagttaaaagacaataaacaagaatacttattgttgtattgtcctgatcatctccaggaaatccaggaagttgctttataatccattttctttctatggtgtaaaagaaatactgagtaggtaagaaggaatatttgtaacaaatatatctaaggtctaaacaaaagagacctatataaactcacccagatgaataaacagaactaggaactttggaagaactgtatgcccatcctctattctatcctcttctcttcctccccacagatgtaattgtcatcctaaatttgatggtaactattctcttaaattttgttatagttttaccatctatgtatatgcccctaaaatagatattgtttatgctttaaactttatataaatgaaataatactgtatgtattcttttacatcttgcttattcacattcttgggattcatggtgatatgtcatgtcagtttgggtgctttgatgagaagatgttaagagatttaatgggagacatgcctgaaggccaaaaaagagggatcaggagtaggtagggagagcattcagactgtgaggcaggactgacaccaatgatagaaaagagagaaggaaaggccaggtgcggtggctcacacctataatctcagcactttgggaggccaaggcaggcagatcacttgaggtcaggagttcgagaccagcctggccaacacagtgaaaccccacctctactaaaaatacaaaaattagccagccatggtggcacgtgcctatagtcccagctacttgggagtctgaggaaggagaatcactggaacccaggtggaagaggctgcagtgagccgagatcatgctactgcactccagcctgggcaacagagcatcttgagactctgtcaaaaaaaaaaaaaaaaaagagagagagagagagagaaggaaggaggagtgggtaggaagagcgtcagactgcagtgcacctgtgaagctctgagaaagtctcaacctggcacattggggagccctagagcaaaacttggctgcagaggcattccacatcagtaggaaagactgccatcactggctgggagcagcccaagaaaagagtgttcttggcaggagcactgccatgaatccaaaattgcagcagctgaggttgtcttccaactgttctccttgtaacaggttcttttaaagggaagtctgagagtcacacctccatgctcacaatccactcttgtgctgcatggaccccatcctctacgtatgtttgggagcagatcatccatgcctcccatgggtgtctacctgaagggaaacttagcagaggaatgttagtgaatggactacagcacccatttctatagttgggccaacagtttgttctcatcatcttttttctccgctgtctattctaaatttcctttaccctcaactaatagcttggcaggtcttagtggctttcctggggatgtgatcaaatccctcactctggcagtcatgtacttcttgagctggggttactgcatgtctattcacatttagttattcaagggaataccaagaggtgtccaaatggatcacttgggttccacaaatattacacacatatacctccctatcttcatatgtaaaagcagctatacctcctcttacatatactgctggatggcagcccatccttccaaagtattaccacttacatggtgttccaggtatacctccaggaggccattcaatgctccaacaggttgctacttttgggttgaccaatgagtccagggaagtagtggagcaggcttatactgactttgcagggtcaattactacattttcaggattttctgtgtcggttggcaacttgaaattgcccattatagtagtatttacatcaagaaaattgacaaatactacaaatcagggcttttcttttttttctggagagccagttattaaaaatgtactagtataccattaagtgaacttaatgatcatggacctgtttcagctcttccttcactatagggccagtgttttggttagctgctatgttgttttggactcactggttggatgttgtattgcatgggattccataggcccctggatagtggttatagctgaggttctgaatgtaggagagcaaacccacacccagactatgtagtcatccctgtgaggacaaactgctttacttccaagagggaggggactgatatacttaacctgccaccacaagtttctgtctcagaaagttcttgattttcccttaatctgaaaaacttaagaaattttgcagagtatgaaattccattggaaggtttcctttctgcattttgagatatcattctattgtcttttggctttcattgttgtaattgagaagtcagttgtcagtcttttgcacccctcgaaggtaatgagtttttattatctgctacttttacatttaatttttgcctttggttttataaaatttcaatctgatgtgtttagaagtgaatctttaaaacatttatgttatttgagatttattgtgttttttgaaactgtgaatcagtgtctttattatttgagaatattcccagccattctctcttcaaataattactctgccttattttatctttcctcctaggactccagtcaatatcttgcaacttctcacctttttctccacattttttccaccttcttctgtattttctggctttcctgtgcctgtgctccaatctggatttcttctcatttgtcttcaaatttgctaattctcttttctgctgtgtgatgcctactgctaaatatagctattggcttatttaatttaatttacttatcatacagtcatagaggttctgcttgactccatcaaatctgtcactttccatagttttctgttctagaaaaatattttcatgtttttcatttgtttcttaaacatggttaggatggttgctttaagctgtgtgtaaaaaaattacaaaatgtgaagtttgtgtagatatgtttctgttatcttgttttgtttgctttgtttcttttttcttgttgttcttgttcttgtgaccttgtttactcatatgcctggtaatcttcaactatgtgtggcttgtgccgttgaaaatgtatctgagtgactcttccctcctctagagagactttctttttgcttcttgtggaatgagtttagcctacataaaattgaatacagtttgattgtttttagctcaatgaagctatgagtatttagtgtgaaaatctttgtgagagtctgtccctggccacagccctccagaaatgtttcttttctttttctttctctcttcagtgaaagtcagtgccaggacagtcctctccatggttcttagaggttggagaaaggcaatctagatttcctgagcttgccacctccccagccccaaccctgtgcactgacttctttatttttgtgctggtgtgactacagtactgagcataaggtgtactatatcagcagagagcatatagtggttttactgttcccttattttagatcctggttctgtaggtctggagtaggacctgagattctgcatttctggcaagcttcaaaataatgccaatgtatcatccataaagtacaccttaagtattaaagatgtacacaacaaggaaaattttatctaatgatttggcaatacatgaataatagtagccaaaataaatggtggaaattgtgctataggatttgggaaagatttgcagggtagaggtgactatattaaactttgaagtgagtaatgaaggatagatagggatggacaaaggaatgaaatcccaagacaggtctagttctggatagctgaagagatagagaaggctgcaactctaggctttactcctgtggaattcttttcttgcagagtgagaagtttccttcatcatatttggctcagtgtcctttctcaggagcattcacccttttggctataaaggatgtttcctccatgctagagagaaataagtacaggtcttgaacaatctggtatcaccacagccctcaccacctccactgatggcactgtggcctaagtacccaggccatatagagctccaagtatctatgggatgaaataagaattttaaaggacctacatcttagctgttgtcacaaatgagtttgcattcatatgtgcagcatccaaaccaatatgttttgtctgtttgcatcttcatacctatggaaggaccttgggcctcttcccccaagatattcatgtgggttcagttctgtgcagagagagtggagctgatgtcataggctctgaactttcttctttgagtatggaaatcatcttatgctaatggagacctgaggaagctcctctttataaactcagcgtgataccaaattctaattttgactcagggatacctgctacacatttaaatttgggctatacatgatttcacactcttgaggagatgactgtggggctccctgggacaaaattttaatggccttttatatcataccatgcagtaggaatatctgggaaggagacagggtgtaaacagaaggaaattctcctgctggccagataggtcattgatgaagttgcaaaaaaaccgagatctgagatgatctattggtagtcacagcaaaaatgctgactgagataaacaggtcaatctggggcttggtgacagacataggggactcattaggtcagttgctccaggaagctgtcacttatggagagcttttcatgctcttctttaacccacataacagcccagcaaggtgtaatgcatttcatatgcgtcatctgaggatcagggatgtgatagaatttctccaaagacacaattccaaaagttgcaaaacctaattttgaatgcacatcttttgaatacaagtattttgctttcaaacaccaaactactgtgttagtttgggttctccccaaggcagatcctggatgcagggagctcattcaggggattattccaggagatccaatagagaaaatgctagtgatcttgttactattatggggcaactctgagaaaccttagtgttatcgtatcagaggatggggtggctgaacatttgtctaccagtttctttcaccacttactgaagttgcccctgagatggaagccctagaggtgtgaagctgacagatgctaggatctccaacagcagttgtgaactcaggttgttgaaggtatggagcagagcatcaacagtattacctcagcttccttttagtgtagacctaatgtcaggtactgcgagctcagagcactggggcctctggcagccaggcttcctttcctgctgtattagtcaggagcctccagagagatagaatcattaggatgtgtgtttatgcacacaaacacagacacacatacagaatcggcactttgtatctgcaggttcaaccaaccagcattgagggatgctgagcctgtggatgaagagggctgactttttgtataagtgggttctgcagggtcaactgacaaacttgtgtagagacagggttttgctgtgttggccaggctggtcttgaactcctgacctcaggtgatctgcctgcctcggcctcccaaagttctgggattacagacatgagccattgtgcttcaactttaagttttttagtcataattgtgtaagctgaaccaattaagatgtctatgatattggctatcatttctgctgttaatattcagtcctcttcaactagggcacaaaaagattagttttttccttgcaaagtgatgtggatggtctgctgctgcaggtgctattttcaatattgtctcacttcttaaaatgagttatccattgtaaactgctgatttctttgggtcattgtccccacaaactttttataagccatcaatgatttcaccattcttccacccaagtttcaccataaatttgatttttgttcttgcttcaattttagaagaattcatgttgatcttataggggctcttttcaaactgatgtcttacctttcttagtgcctcaaactagatcctgttcaaacaccttataacaagttagtaggagtttattttggtgcaaaataattcaaaatccatgcatagtttttttcataatatgcattttccatgaactttttgatgacctcttgtatgaaaggggatttattaggggaatgaactcatgcaattttggaggctgagaaatcccatgacagaccacctgcaagctggagaccctgggatgcaggtaacatgctcagttcaagtcctaaagcctcagaactaggaagccactggtgtaattctcactttgggatagaaagcctgagaacccagggagatgctgatattaagtcctggagtccaaagtctggagttataatgtccaaaggcaggagagaatgccccagctccaggagagacagaaaatcaccttttctctgtcttttccatgccatccatgcccccggccagttggatggatcccacctacgttgagggtagatgttccccactagtacactgacttacacaccaatcttctttggaaacaccctcatagacttaccccaaactaatgtattaccagttctttaagtattccttaaaccagtcaaattgacacttaaaatttactatcacgctacctatactagagatagtgatctagagtccattgaggtggctagagtgctcaggagctggctttgctacagtaatactcccttcttccatggagaagcagcatgcacagtggctctgagaagctggaggagggtcactggagtgagtgggcttctggtctgaaattgaccaagaatatagttcctgtggaccaggagtgattagaagctacagaggtcttaagagacctatccctcctcagtctaccttgcacttactgagggctcccactcttaggaataattccatcgtttcattttgtggcatcagagatgagtcattgacccggaagaagtcccgtaatgtttctcaactcagtatctgtgactatatttcctgctcttaaaagtttagcatgccctcatgtttcaggttgcttggagaagtcttaaccatgctgttcacataaagagtcactaaatcctctggcatcaggaactagaaaatatcctgagtgttgggcagtgccagacttagtgaggcagaacttccttccttgcccatgtggataaaaggcctgggccctgttacagcctgtcagaaaacccaagtgcagtagaagccattgttcataatggtagggatacagggtccttcgtaacagattatcagtgtggcctatgctggaaagtctggtgacctctgattttttttgcttccaggtctttggccttggcactctttgtcatattagagttcctgggtctaggcctgggcaggattcataggtgcagctgcttctgctggaggtagactgcatccaacaaagtaagggtgctgggtgagttctgggagtatagattctgactggggtcactgctgggctggccgccagtctttcatctgacccagggttaaactgtggcttgggactgactcaggtcctctcttggggtcggtctgcacataaaaggactcctatccttggcagttctgaaacaacaccaccacaatggaaaaaggtaaagatcctcgtggaagggcgaaaaattgacaagggggtgatattctgtgctctcattcttactaatttacattttgactttctcaacagcattgaaaattgacacacctcagcaggggagcattcaggatatcaatcatcgggtgtgggttcttcaggaccagacgctcatagcagtcccgaggaaggaccgtatgtctccaggtgagtagccacggtctgtgaaaggcagctcctttggccagtgctgttgtgtgtttggtgctcagatgttattccacagtgggcttgttaaccgggcatatctacagagaggagcatctcacagacaataatgaatagagggtgagcataaggttgttctgggactatggtcatgaagtcagagaagagagagaaggcttaagggagactgaagggtcagcctatgaaaaacagtggaagacgtattctgagaaacttcaaggagtaagagtaggacaaaagagggtaatctatgggaggaccagtttttgaatccatgaaagactgacttttctaatggaaagtgttccccaaacataggatgggtgtcccggttaggtggtgggtggtgaggtgaccattctatgagtgcactgtgagtgtcagttagcagattcccttaaaactctggctcagaggtaccaccctggaaatggcagctgaacaccacttttcacatcgtgttcccagtcactattgccttaatctcatgccgacatgtggagacccttgagaaagacagagggaaccccatctacctgggcctgaatggactcaatctctgcctgatgtgtgctaaagtcggggaccagcccacactgcagctgaaggtgagtgtggaagacaggtcctgccatttatttgatggaaactcagatttcaggatcttttaaaagacaatgtacttattatgctcatgcatttttatttttggtttccttggggttggtatatgttatgaaagactaagaaaaattgcagggacattttgaaacaaacctactaaaatgacttattattttaatttacaaaaatattaataatttggcaaggatgatgtctaacttcaatagaacacacacacagagtaaaatcagcaaggacattttagcagttaattatcacaaagtagacgaacttattaaaacatctttttggcaaaaaatacattgcaactttaaatgaacaaacataattctctgtaataaacacttcaataatcgcaattttccattattaaaaaaagataattatagcaggcctctgtgtactacaggaactctcttgacccttttcagtaaacaagcataagcagacactcaacttgatgacaagatataaaacagtgtttttcagccaggggtgatattgctccagggacatttgtcaatgtctggagatgttttggttgtgacaacctgggatgggggtgtgatacttgcatttatcgggtagatgacagggatgctactaaacatcctatattattatacaggacagaccctgaaaacaaagaatcatcttgcctaaaatgtcaatagtgctgaaggtgcagaaacctgacagaaaataactgttttaatttgaaatttacagtaactgttacataaatattctttaagtttctgtttctgaacaacaaataatggcccaatcaatgctttgtattctcaaaaactttcatgtcaacacatttttcagagcctcacattaaaaaccattaaaatttgtagcctgagtttcaaccataatcttaaaagaatttaatttatatgattttcaatcccataatatgaaacagaggtctccaagctgcttcaatgagtagggaatgctatccttggacgtggaatatcagtgtgtaaagaatgtgaaacattcaaacagttatgtttcttgctggtgtctccttcgcacccttcaggaaaaggatataatggatttgtacaaccaacccgagcctgtgaagtcctttctcttctaccacagccagagtggcaggaactccaccttcgagtctgtggctttccctggctggttcatcgctgtcagctctgaaggaggctgtcctctcatccttacccaagaactggggaaagccaacactactgactttgggttaactatgctgttttaaggtcagttgggtttggaggatagtctccatgcagggaaaatcttagtataatcttagcctggaatgggcagggagaatttgttattggactttccacctaagagtatcttgctgcctcccaatatattcatgcagtgacctaagtgctggactggtccctctccctggggccatgtggaaaatagtccagggaaattgagggccttgccatgagcatgtggctgaaatatggcaccattacaaaaataataaggaaagctctacttaacataattgctaataatgctccaagtaaaaatgagggtggtgactctttttttttttttttttttttgagacggagtctcgctctgtcgcccaggctggagtgcagtggcgcgatctcggctcactgcaagctccgcctcccgggttcacgccattctcctgcctcagcctcccgagtagctgggactacaggcgcccgctaccacgcccggctaatttttttgtatttttagtagagacggggtttcaccatgttaggagggtggtgactcttaaattttaagtccaggtctctggattttcagatagattcctctgtgatggagtatcaagaccttttggattctgacaaggagaagcagatataaatgttccatcagaaagaggagaccaaaaagaaaactgcgccactcctgggcttggcttatgtctcagtgaagttacatatgctggtgctggtttgggtgaagaactgctgtggtttcttcaccacctttctatttttctttttaaaaattttatatattattatactttaatgatttcagggtatcatgtgcatgacatgcaggttgcttacatctgcgtacatgtaacatgctggtatgctgcacccattaactcgtcatttagcattaggtatatctcctaatgctatccctcccccctccccccaccccacaacagtccccggtgtgtgatgttccccttcctgtgtccatgtgttctcattgttcaatttccacctatgagtgagaagatgcggtgtttggttttttgtccttgcgatagtgtgctgagaataatggtttccagcttcatccatgtccctacaaaggacatgaactcatcattttttatggctgcttagtattccatgatgtatatgtggcacattttcttaatccagtctatcgttgttggacatttaggttggtcgtcagtgtggcgatttctcagggatctagaactagaaataccattttacctagccatcccattactgggtatatacccaaaagactataaatcatgctgctataaagacacatgcacacgtatgtttatagcagcactatttcaccatagcaaagacttggaaccaacctaaatgtccaacaacgatagactggattaagaaaatgaagctttcacctaaagtgttatcactggacctcaaaagcattaaatttgtgaaataaaaattttgacatctcagtggctcttttatgaatcaaatggctttagtggaatattgtggttataatattgattccttgcatttttaaggagttttatagtttgtaaagcaggctcacacaaaggctcttgtttctaagagctgccagtaagattgttggggagggtggtatcttcccaaactcaggtttctccaggcctcactactggggtgggtgggacaaatagtgcttcactaatagaaatttcactccctatttcagtgaacaatgcaggtgcacagctatctgaaaaaccctccctgcctattctggcaagggtttctgagagtctactgtgggtttttcctgtgaactcacaaaccataaactgacatgggtcgcattcatctagagaacacttattttgaagacttctttttaatcctctcttattttgaagacttctttttaatcctctcttattttgaagacttctttttaatcctctcttattttgaagacttctttttaatcctctcttatatttgaaataattttcttcttacagtaatattatgctgaaattttatttcttgccgtattatgattcccaaaatagttcatctgtgtagtcctgttgtaatgtttactttccattatatttttacttgtccctaagctttggaggaagatgtggaaatgctgttttcctgagcacactgatgaattccagggccctgcaggcattgccccaacctcctcatcccatcctgatgtcttcttccattcagcatttgagtcaccacattgatgttagagattacattttttcctggtgacagcatagcactccccgagcttttcatttctcatggttcctacaaaaaagtagaactgtttcttctctgcctttccctgtgctggtaattcctctagacctgtgagatgaccaaaacacttaggagagtgaaaggggtctatgaatgcacgaggttaatggacctaaactgagatgtatggaccagctgttggaccaactgggatattggatctcctaaactcagggctggggagaaatctggccatctttgacgttgcctggatgttttctggaagaagcaattcaacttctttagaaatttatgtctacttgtttttattctcctttattttcttataaatgcataaaacattgcattttctcttagtattccttgagatacatcctataattacttgtattatggcttaaaatgagatatacttgcctaataaatttttaaatgtacaatattgttaataaagtatactgtaggtatactcttgtacagatctctagaacttacttctcttgcttaaatgaatattatatgcattgaagagcatcccttcatttctccttcccccagtccctggaaaccaccattctactctctgtttctatgaatttgactatttcagatatcgtatctgtaagtggaatcatgcagtatttgtcgttttgtgactggctcatttcacatagcatgatatactccaggttcttccatgttgtcccaaatggctggattttcttctttttaaaggctgaataataatccattgtgtgcatatgccacattttctttgtccatttatccataaatgggcatttatgttgtttttataacttggctattgtacataatgctgcaatgaacatgagagtgcagaataaattaaagattttaatgtaagaccagaaatggcccaaactcctggaagaacacataggggaaaagtttcataacatgaatctaggcaacatttcttggatatgacaccaaaagcacaaggaacaaaagcgaaagtagacaagtgagactatcaaactgaagagcttatgcacagccaaagaaacagtcaaaagagtgaaaaggcaatctatgaaatgaaagaaaatatttgcaaaccatgtatctcataagaagttaatatccaaaatatgtaaggaagtcacacaactcaatggcaaacaaacaaacaaacaaacaaacaaacaaacaaacaaacatctgattaaaaatgggcagacttgaatggacatttctccaagacgtacaaatggccaacaggtatacgaaaagatgttcagcatttactaataatcagagaaatgcaaatcgaaagcacagtgagatatcacctgttagaatggctattaccagaaaaaccaatgtgttgtcgaggatgtcgagaaattggaacccttgtacactttgggtagaaatttgaaatagtgcagtcactatagaaaacagtataaaggttcctcaaaaaattaaaagtagaactaccatatgacccagaaatctcacttctcattatacatcccaaagaattaaaatcaggatctcaaagagatgtcaggacacatcctataatgttgatacagtgttttcattgtctttatttcaacttcaatctgttttggttattattttcctttaagatgtgtattatacatattatttctaaattcccaagtggttggataatatgggggctaccttagaattgtctatgtttattattgcctatggttagatggaatggcctgtatgatatcaactttgagcattttttggtatttcctttgtgactttgtgcactaaaaataagttttccatgcaaacctaagaaaaattaacactgatttccaataaatttagacatatataaatatacaatttcatttatatataatatatttcataatatgaacatatattacatagaattatatatatattatgtattttaatattttgacattaatagatacatacaatttaacatatatgtatttatatatttataagttgaattttgttaactatttactctttatatttttaattcttacttttttttgcttgatctatcagtttctcttagggagtattaaattaccttactatgactgtatttttaatcaaattatgttattattttataccatttgcttagattactttaattctaagttttttggtacctaaaggttcatgtatgccatatcttcttcttcttgtttcataccttttatcctaatgaaatattcatctttgaaccattattgatgtttttcttaacttctttgttagctgtgcataccattacttcaccacttgaaaacactttttttttctttgcattttaacttctctgaaacctagatacgtgttactacaatggatggcatcttactatattgtcagccaagtggcagtcatgacacagtggtcattgcctatgcatttgcaaatacagttggtttttctgatgccgtggttggacaaatgttccccatctgatgtttcattcaatacatcatcaagaaaaaacattcattgaaggaatatgatcctggttgttggtgatgaaccttctattcacacatcctataaattaaaaaagcaacagcatcaaaagttgctgaatggaggtcagcagcttggaatgatgtctggagataagggtggataaattaagaaatgctgtatcaccagtactcttgttgacacaggagagttttatcagaagcaaacgttggtgattctgagttagaagtgattaagcagaatcacattcaaaatgtaagaagttttagggctgggtgcagtggctcatgcctgtaactccagtactttgggaggccaaggaggatggatcacctgagatcaggagttcgaaaccagcctggccaacatggtgaaacccccgcctcgactaaaagtacaaaaattagctggacgtgatggtacatgcctgtaatcccatctactcaggagggtgaggcaggagaatcgattgaacccggggggcagaggttgcagtgagccgagatcacaccactgcacgtctagcctgggtaacagagcaagactctggctccaaaaaaaaaaaaaaagtaagaaattttaggaatactttaattgactaatctcatttatatttacctttttgtgaatgaaaagaatactagattataaatacatgtctttaaaacagctccatttacgtgtatgactctaaaaagtattgtattgtaattgggcaatttttttttctttttgatagtacataaaataattgtacatcttacaatccatggcattttagagtcaatgtaacatgatattgtcaactgctttttttgtgttaacatttgcttgacatatatcttcatcaattcctacattttcaacctttttgaattattttcctttacacgtatctcttatcaacagcatatagctagacgtgtgtgtgtatttggtttaacaagtcatctgatagtttttgtctttttattgatttggcccattcacctttattttgatcactggtatgcagaattaaatatgacatcttttctgtctttttcaatttgtcttgttttattttgcttttcatctttttttgatagttgaatctgatatactttggagtattgttgtaatctacacaaacctactagtgagttcttacttgttaagtaattagtttagttttttagtgcagaaattgtgatatgttacataatatgtcattacagtacaggagtgttttggtgatatatggggtattaatttggatttttaggtgaactagtttcttttttttcaatttgatgtagtgaaacatatgccacagtatctgaaaacttgctatccaacatggctttaggatcagattaaccacttgagtttctgctttgtgaattacttgttcattgcattttcccattttcttctcttgatgctatcgtatctttcctttttcttgttggtttgcagaaatttattatatatttttaagtcttaattcactatttgttttagttgttgcaactatcttatttcaacttgtcatcggctaactttttcctatggtgtctttaataaagagagaaattcttattgtttgctgtcatcaaatctatcttttttttttttttttgatggagtcttggtctgtcgcccaggctggagtgcagtggcgtgatctcggctcactgcaacctctgcctcctgagttcatgccattctcctgcctcagcctcccaagtagctgggactacaggcgcccgccaccacgcccagctaatattttgtatttttagtagagacggggtttcactgcgttagccaggatggtctccatctcctgacctcatgatctgcccgcctctgcctcccaaagggttgggattacaggcgtgagccaccccgcctggccaaatctatcttttttaaaacatagggtttgagcaattggatctttttagttattttaaaaacaacgttaaactttaccaaattattaatatgtcttcaaccttacctactgaatattgtgaataatcatcctggatgtattcctctgcatttggagtgcttctttcaagaggggtttcagaagcaggctgtgtggggcaaagcttcttagcctaggaggctccctgagaacagcttttatgtttttctgtatgatgataattccaggaaaggtgatttttaggggactggtatgctggagagagaacaaggtcatcaagaattaaggtagcctataataaaattgaagtttggaaagaaaaaacaaatgttagggaaaggccagagtgatctaggtccccagggggtgactaactcagtatccaagagaaaaagcaaaaaagtagagagatgcaaatgaatttcgagacagaggtagggtgacactaatgtagttggtctatgtgcattttttctgctgaatgaatagtgtgctgagcatattatccttcttaaccacaatatccaccatgaaaattatttctattttgtggaagggaaattggggactcagagctgtgaagagacttgactgaatccatgtagctagaagcaggcatctccaaagtttggactcacaggtgctgaatataaaaaccttatacattgtatgcagtagtaatcacaagtatcttccattgaacccctcttcatttccaggcactgggaattgggaaaagggcactgggaaaacctgggagtcaatgcttcaggcttcagaaagatgcctccgtcttctggacttctgaaagagggaatttgagtctatcgttagggaccaggatgcccacagtggtggcctgccctaggctctgaggtacagaggcttgttaggcggagccaactttgttcagctctaggaggtgtactcttgacctcagggattgtccatgtacagatggaacagcatccagtaacctgacttgggagagtccctgaaaatgttgatgtaatcccatttctttatttttactgtctggggatttccctcaccttctttccttgagtatctctgagcagtctaacctgtgctaccattgatatttccccacccaaagcctcaacaggaagcagctttctagagagagaagtcttcacatgctcctttggctaaaggagcataggggctactagagaaactacatatccactggaacatggagaccccgatccacactggtgtctggactccttggcccagctcatgctggaagctactggcctctgatcccaagctcactgctgggcctttggcctggcactggccatcgatgagggtctttgcttgtgctggaatcaaagggacagctgtttcttgttggacagtgagttggtgggaccgtgctctgtgctccccactggacacactgtgtttagaaagtaaaaacatgaggctggaataacaaggcacagataaagcccactgcaaattaacaagcaataatatttctcccaataatatgctgcagctgtagtatcataacattcctcttctttgagtggctactatttttttaatcactaagagactttgttctttacaaccatggacaattggacatttgacttttcaagttgtatgaacaagaatgaagcattccagttttgcctgaataatataaatcatgctgacacagagaagcagcctcagtctccagcctgtgaacaaagcttcagataaaaggtttctggtcacaacattctacatgtatcttaactttgtagtttcacaggacacagaccctagatcctctttacactactgacctaatgtagacccctctccatacagcactttttgctttgagtccatctaaactttgcttcatttaaattttgcctaaatattacttttcccccaaatcctatacattgtctttcttccttgctatggctcaggttcctgatggacagtctctcttactgcagtaagtcaataaatctgactttgttggactacagagttgttcctgttgattttaggctgatggggcggggacaatgtgatagtcaggcacaggacctgcccagatgggtcctaatggcagacccagtgcacataatattttagatgagtgactaaagtatgcattgctacccctattaatgagccatcttccttcaccagcactgcttagtgcttgggcttagccatcatttcagactgaactccactattagtcctgtctggattaggaagcacccattgataccaatgaccttggccatggatgaagaattggtttttgccacgttaattgttagtgcttgaggggaggggtaatagaggtaatccctctttcccacttgagttatgaaccaattgagaagtaagacaaagacttttttttgtttattgatacatttattattgataaagctgatattgattgtggattatttctgcaaatgagtaaagcacagaatgagacaatgagaattgcagtcacacatgtcacagtcagaaccacagggaagatggctctcataaaagtacaaatcatggctgggcacggtgggttgcacctggactctcagcacttgggaggctgaggtgggaagattgcttgagttcaggagtttgagaccagcctgggtaacacagcaggactctgtctcttggagaagaagaaggagaaggagaaggagaagggtgaatcataatcgaacagagaaaaatgaaagctttcttcaattctatttgctttcagtggaaagtaggtagacagcagttggaccacacatgaagaagaagaaggagaggaagaagaagaagaagaagaagaagaagaagaagaagaagaagaagaagaagaagaagaaggagaaaaagaaagaaagaaagaaagagagaaagaaagaaaagagaagaaaagaagaagaaggagaaggaggagaagaagaagaaaaaggagctggaggaggaggaggagggagaaggagggagaaggaggagaagaagagtgaatcatgatggaacagagcaaaatgaaagctttcttcaattctattggttttcaatggaaagtagatagacagcagttagtccacacactcttagtttctcatatgtagtatgaccacataatttatatataaggtgtcatttttaagaggggaaggggtggtatcagtaatgacagcaggataataggtgtgcagcaggatgtatgggtttcttttcacttggctgaggtgaatgaaggcaggaagaaagccaagtgtttaatagaaggaatcatgaggaggaaagaactgttcttcctttggagagttatgtcaaagggaaaggggaggctaaagcgggccgtgacagctgcactcacaaactgaaggacttgggtggacctgggagtcccttcattctctgcgacatcaaggctgaggaacaggaagacagattttattctgagtgagactagtcttgttaaaaaaggtggactgcctgggaaggaagtcagttcctcatttatccatttattcagttattgatttattaataattcaacaaaaattattaaacacagacacagtgttaggggctggaaatacaatggtaaactagaaaaatatcacttccctgcaatcaaagagtttataaggtaatgggggaaggaaagaaagatagaggcaaatcaataaagtgattacaaaccctgtgaaggaaacagtcaaaagctgacgtaagaggtagaggaaggagattactttagacatggtggccaaaaagtcacatataggaaggtgacttgaaggagctaaaaaaggaaaatatgagaataaactaatacaggtaaaaggctgtacatgaacttagcatatgcaaaggtcctggggctgtgaagaacttggcatgttcaaagagctgaaagattggaataactgaagatactgatggaaagaaagagttatctggaagaggggttggaggcaggccagatgattcaagcaagcctgtaaatgatggtaaggactttgcattttcttccaagtgcaaatggaaacgttgaaggggtctagagattggactggcacggttaagatttccattggtagagataatcctggctgtctcatggagaatgaatttaatgggtgcaggagtagacgaagggcaatgggcaggaggtggatccacattcagatgagccttggtggttgtctggcattcagtggtgggtgacaaggaagttgaagagagacgggtagattcaagacatattttggagaaaatctgctttagagacagcctttttaataggttggatgtaggacttcagcgaaaggaaaaatcaaggatcactcctaggtttctgttgtaactgagacggagataactgagtgttggaatgtgcaggttgtggaaggatcaagcgttctacttaggacatattcaatttccaagttcagagacagtctacattggtagctacaaatgcatatctggagtttagaggagacttctgggccagggataaaattgtcaactgatacggcttggctgtgtttccatccaaatctcaccttgaattgtaataatacccatatgtcaagggcagggctggtggagataattgaatcatggggacaatttcccccatgtgttcttacagtatgaataagtctcacgagagccgatggttttataaatgggagttcccctgcacaagctctcttgcctgttgccatgtaaggtgtgcctttgctcttcctttgccttctgccatgattgtgaggcctccccagccatgctgaactgtgagtccattaaacctctttcctttataaattacccagccttgggtatgtctttattagcagcatgagaaccaactaatacgtccacatacacccgttcatgaaacaaatagtgtcacccagtgaaatagtataaaggagaagaggattcaaggatgagttctgaggaatttcaactacaagaagtcacatgagggggagccagtaaatgaaagtaaaaagaaaatttcagtgagtctgaggaaagcccagagagacttgttgcagaatccctagtatgtgcatgtaaagatgtgtgggagcagtggagtgtgcctagcgctgattgagattaggacagcagagtgcccattggcatcaggaaacaggcaggggtgtcattgatggtgctcagaagaaaggttttggtggagaagtcagatgtcagaggtcagactggagagtgcagagtactgaaggactaatcagtaatcaggcatgtgcaaatgaaaataacagtgagagattatatcagtggtccctaagttttgtggcgccagggactggtttcatggaggacattttttccatggactggggatgtgggtgttcttagaagatcatcatgcattagattctcataaggagcgcacacataaatcccttgcacacgcacttcacaatagggttcacgcacctatgagcatctaatacctcccactgatccgaaaggaggcagaactcaggcagtactgctcgctcgcctgccactcaccttctgctgtgcagcccggttcctaacaggtaaggactggtaacggtccatggaccatggcctaggggttggaaacccctgctttatgtgctagaataataaaactttttaaatttttaaaaagtaaaaatgtagggcagggaagaatgaaaacaccattggaagtgtaaattttaaaaaaatttcggaccatggcctaggggttggaaacccctgctttatatgctaggacaacaatactttttaaatttttaaaaagtaaaaatgtagggcagggaagaatgaaaacaccattggaagtgtaaattagaaaagccacatccaagggcagatattatctattgaaataaagaatggacttactccatggtcaagcaattcatttatctatttttttcagctatcttgtctaagatcacttatctattccaaagaaagtcttgcatgtctgcacagaaggcatacactagaatgttcattgccacattgtttgtaaaaaaaaaaaaaaaaagtagcaaaatgtggaaacagcctaactctccatccatgaaggaatggctaaacaaaggatggtaaaaccattctgttgggtgctctgcagcagttgtaaaggaatgagacagccatccatgccagtgtagacagatatttgaacacatttttcagtgaaaaaatgagttgggctgggcatagtagctcacacctgtaatcccagcactttgggaagctgaggcaggtggatcacttgaggtcaggagttcaagaccagcccggccaacatggtgaaaccctgtctctagtagaaatataaaaattagctgggcatggtggcgccctacgcctgtaatcccagctacttgggaggctgaggcaggagaatcgcttgaacctgggaggcggaggttgaagtaagctgagattgcaccactgcgctccagcctgggtgacagagtgagactctgtctcgaaaaaaaaagaaaagtgagttggagaaaaatatgtattttattattccagttagagaaacatgcactcacatggacacatacatacagatgcacaggggtacacataagacaacattgtatgcttccaatagagcctatgagtacgtaaatgcataagaaatagccagagtgacaccaattcataacagtggttaccattggggtggagaaagaggaactaggatctggggggaaagaatttggatttatctggtatattttaactttatttcaagatgaatgtgtcgatgtattaataactgaaaaattaacgtttttaaaagtgaaaagtgtaaacagcatgtgaagaaagtagctttagcagaggctgtgtttctcaaatgctgtggtccccgttatgttctgtatgcttgaaaattttctgatacaatagctaggtgttgttctgagcaaatcagtggatgaaagagtggatacccagggtggctactcggtgcctacagtaggaggcctagactattactattccattgtaagaaacaactgactgtcttttccatggctataatccctaactttttgttgctgcatcttttgggagaaaaagactcactgggatcctattacataggaatggaaatatatggttctgcctatggtagataaagagcagcccacatgggagttaaaggcaaatggatgaagaaaaataatatactataaaaataatatcatatagacttgattacatgggaaaaactagtttattttaccagtgtaagattatagaatttttaagaagaaatgtctttcaattacttttaattgtatgtgttccttttaagttatacatactaaacagagcgtttcactcctcatgctctagtgaataattgcacattatgtaaataattttgaataattctgctgtttcttccataggacttaacccctgtacatcaggaaaagaaataacagattgagctctagtagcttgctgctctgtgggaattcaggagcaatgttgtctgatcttcccatttttcatgaaaaccttgactttacaattttttaaaaaacactctaaggactggacaaaacacatttacaggttatgtagtccaaatctactcctaaaaagactccgaccttctctagctttacaggtaagatttaccaactctttaaaaatacatagtgtccttgttttacaaactctccagaacccaagaaaagagaaaaatttctgcaacttattccatttgtagcatttcattgatagcaaacccactcaaagattgtagagatgggaatcttcctccccttatttctacatccttcctggcattcctatgttggtccgcatggatgagaaatctttgtccttcttcctgagatggtgatgttgaaaggaactcttccacttctttctacctgcaggaaaggagaagtatctcctaggcttagcaagatgtggacatttgctaaaccaccaattgaataggggctaaaagggcagattctacacggaggctcctggaggagattggagtttgccttcctctcagccttactcacttgattctgctgaagagtgatggattattacagtgactggagaaaatgaaattagagttggtgggcatggtttttgccccaaaagtctagattgaggccccagaagactaagaggcacccctcacttccctaatccagctgtaacaataataaaggcactgctatgattttgattttggcatcaacatagtttctaaatgtttgaacgtggatggcgattggaaggagggactgttacctaccaaccttcaacatttaatgtcagttccataaggatggccatattttcccctttttgtttactactatgtccccagcacttagaacagcataggtgctcaaaacatatttgttgaataattcagattattgatcctgacacttcctttgagataaaaacaagctttgttgtttggggttcaaactacatggtgagtttggagaagacattgctagtggctttggccttggtcagttagatgtggcttttattatggccacactgctattataggcatagataaaactgattttagtgaactagagctgtaatctgcaaaatttaacctgctaaactgtacgagcaatagagaacatcagtgtatggtttttgatcttttgatggttgctattagatattgggaggtggcactctgtcagctgcacagtctttgctagtctctgtctcatttttaattgcatccttagttaaggagacaaccattaagggaatgacattatgggtttccatgtagtttattcacttatttctggtgttacttcccaaccatacggcctagagttgactttgaagtattctttttataatcagaaatgttctacttgtaagtgactcaaactagtaaggtagttaactgatcagttctttaactgcatatttatctcccctcctttcttgttgataacccgtgttgttttcttgcccctaattcacattagatcatcaacaacgttaaaataaacttattgacctaagtgagagacaaagattctcagttgcaagcttatagagctttttacattttctcttctgaagaataaaggaaactgaagtggagggaaggacagggcagatatgcatgctgatggaaattgaagagaaagatgggtggaagcatgtagggatctctgaaatggacgtgcattcatttaggtttctgaatagaagagattcaggggacaaactatctttgagtgtcacacgggtaaactccctctctaccaccctgtgaaaaacccaccattcaatagtcctgggcctgaggaccgtgactcttgcttaagaaagcaacaaaagcatcaacacctccgtgaatattagagtatctcataggctggaaaaaaaaggtcataggaactagtgcttcagagactggaacagggggaataacactgtgctctttctccatttatcgatattctatttcgtgtgtgtgtgtttatgttggccttattttttccatactacagatagacaaggaattagcctacctccttgcaaggcttaggaaacccacattgtttgggaagtgccttctgatactgattgaacagaaatctgtcatcccgtgccttctcctgtggttcttagatttaagcaaagaacatcacagctctcgatccaggagagcaaataaaatatttgaggacacctcttgagtctttctgtggtttctcctcctcttcttcctccttcaccatcacaatgtcctcactcctctggcagagggcacaggtggtgtgatgtaagatgggctggctgtctatctcttgctcatgttcagtgcccttggaatagctgggaagctgatatttataagcactgtccaggattacattgcatttttcatcaccatcttcctatagattctttctgcacatttagctatttacagaactcacattctttgcagcccttctcagaaaacctatgtactacgtatccaagtacattgttgcaagtctctcatggccatccttgaggccatttgtgcttagtcatgaccttgtcagagaaaatatttgcaatggtgaatttccctgggctccttctcttgtgcccctatgctgttgtgcatatgcataaatacatgtggggaaaggcttggacaaaatgcaaaccctcagactgtgcaccgagccctccaagagggaggcagaggatactggctaaaagctcctggggatacccttggttatgtttcatttctgcagccatctcctcccgagtggatgcccttgtatcatcacattcccctggagccatattggcataaggggaagaggaggaagaattgagacagggaaatttctgagcagcctttctatgtttttcctctccatattctgtgagaagctttccagttccttggacccttcttgaagttgaggactgccctgatataatgcaagattctccctgacacactttggtattaatgggaagatgctaatacatgaaatgaaaattaatttgcttcaacagtgcattctgagaaactgctaagagggagggaagatttggtatctaaagggagtgcataaatgaaagagacaaatttctgcctctatgtacctagaatttggttgacgagaagagagcaaatgggccaagacaaggagaagaagctatagcacaaagcctaagaaaataaatgttccatgagaaggcaaaaatgctatggacctcgcagaagataagatgttgccttcggttgggaagatgaggagagtcccgtaaaacagctggaagggatttaggatgttagtaagacataggcagcaatggaagtgtttgagatgtgtgcaaaggcatgagcaggaacatagagggaagaaatccaacgtgttggaggtggctagttgagaaaagaagttggttttgatagaatctgtcttagctaggtttataccagaaagcagagactgagacaagggtttgcatgcaagatgatgacaagtgaccctagggaacatgagaagggactggggaaattgaaacagggaagtgagagaagtcaattcaggatgtattcttgaacttagacctgccatgggtgattatgtctcaatactgctgggatcctctgaggaaccatgaagaatgaacgcatctcagaattgtccacctgtgggatggataagagaatttgctcctcacccactcctattccccattggtcaagggttcccatgaagcagctctctctcacatccaggtttatgcatgtgtgaattccaactagtttccagcaagtgtccttccctatgttatcttgggagccctgaagctggaagagagaaatgttcaatgttgctgagataatacactgccaggttacactgtctcaaagttggttgcacggcaatgactggagtaaaaggcctgcatacagcatgtaaggtggggttcaggagtatcccaaagagaatgcggggcactgaagcaataagagataatgccagaagcatagttttggggacaaattatgcctggctgagaaattggaacttagcagtgggtacccattgcaagacccaatatgcctgcttgtcatgtgcaaagaaggacaagttctcttgagagaagacagcctgttatgctcatgttcatgctcaggatattatggtatatttattgcagtatacatgtacttggttagtggatttgcagattatattacaaactttaattaaaataactctcacaaaatggacaactggcttaaaagtatccctatagaggagtggtagattgaatgtacactaacaaaattccagaaaatatgaataataacaaggaagtatcatagctgatgcttcttcttccagcaactttataaagtaaaaacaaaaaaacattcagttctagaagttgtctgaaagaaattaaagccaatataaatgattttttaaaatatggattggtttacattcaccatggttagcaattgatcttaaccaaagtacagttgacccttgaacagcatgggggtagcagtacagtcaaaaattcatgtataactgttgacttcagaaaaacttaactaataacctgctgttgaccagaagccttgccaataacataaacagtcatttaacacattttgtatgttatatgtattatataatgtattcttacaatgaagtaggctagaggaaagaaaatactattaagaaactcgtaaggaagagaaaacatatttattattcattaagtgggagtggatcatcataacaatctatcctcattatcttcacattgactgaggagaagaaagaggagggattgtttttgctgtctcaggggtggagaggcagaagaggtggaggagttagagggggaggcaggagaagcagggacatttggtgtaacttttattgaaaaaaatcagtgtttaagtggacctgtgcagttcaaaatcgtgttgttcaagggttaagtgtatacactgtgtgtcaaattattaacgaatgacattaagaattcattaggattagaaagacatgcaaacctttaatttcacattcatctcattcttcagctttatctttggggcacatattataatgttttattgaagaagttgtatgaacaaaatgtcatgaatccacatctctacatcatgggttggcaaaaggaataggaatggaaggttgcatgaagcagcatttggggggttgactaaactgggcatggcagctgagtggatggtggggtaagatcaagaaagaatggaaagtgatttttaggtttcatcttgggatagtgacattcgagtgagggtcttggtacagaaatggatgtttggaggaggaggtggcttttggatagtaagaatgaggtaagctatggatgggctgaactgctagtgaactcagtcgcataatgatctgttaagatgactctgacagcttgattctctatcctggaaccagccacccacagcctaggctggatttattccacagaatctaagtagaagttagtgttattagttatgcctctctccttggtgagaaagatgggctgtcctgatgtggtggaggtggctatgaaccagccagggtaagagactgactgaaagacagaagtggagccttctttattgtggaaaaagagaaagggcttctgtgctttcttctccacatacaggtccatgatatttttttcctgggggtggaaaagaggcttgttagagaggaggataggaggaggaagctaaagtaactcagctctgagtgtgtaacaggagagggactgctgcccccaaaggaagggacagaggctagggacaaaggcagatgaagcagggcattagagtgttaaaaacgggaactcactgggttcccatagcctggctccaccccaggatcctctgacacaaggtgctctgactctttgaagcatcactgtcttccctggaacagagggaggttgaaatctctttcttggtgcttttgatatgcatttgtctgcaggttcaggccagtcttgctgcattctcaacctccaagtgggcttatgcattacaatttccaacaatagcagaagaattagcttcataactacaatgttgccttggtaagagttatgtgtttatggtacacagaccataaccacattcaaaatctttttgtctcctctgctgtgcagtcacctttggtgtagtgagagcatcccgttgtcttagaggatttccagaatgcagttaaacaggaccgagaatggagaaaatactgttctttggcttttctgaaacattcctgtaagtgtattttctatctttcagaggatctatgctctgacattaaaagaagtgttatatccattccaaaggcagcatttatagattcagggatcagccaggtcagaattatttccttacattgaatagtccagggttgcaagcatattatttttattcagtaacatagtaaatgaaatagaaagtccatatgacagtacttctctcgttagctgcacaatcactcaccttaagctgcaaagtaggcttgccctgaatttctgcacagaagagacagagatcttttcccttgattcccaggtaaaccatattacccttttccttgtcactgaattctgtgtctctacaggctattaaatgaagagtgactggaaacacaaaggaaaatggagaagatgtttcagtctttctggtctgacactcagttactccccccaggtagggaatagtgacaggctcctcccattagccatgtggcagagaccctccatcaccctcctcaaacctattttgtttttcgtccttaataacagaaccccagttgtcaccaggacatgttgcttcccaaaaagaagtaaaatttcctaccacacttgcagcaaaatgtggtcatatgcttaagatgtggcccatgagataaaagtggggagcttctatctcatgggccacaatatgagatgggatgggggctacccaaataaagtgagaggtgggtagtgagaatgtgatggcagtggtccaggcaagagatgatgttatcttagaaatcaggcatgttttgcacgtagacctaccaatctttgctaatagattggatggagagtgagggaaaggaggaatcaaggatgtctcctgtatttccggctcgaggaaatggagtggacagaagtgccaccaacagagaatgttagcggttttgagaagacagatcaatagtcccacttgggatacatgaagttagaggtatctgagaggacctcaagaggacacgggtaaactattgagagaggagatctgtgttggaagtgtaaacggcagagtgaatgagtgtaggggtgattcatcaatgcaaaagatcagctcattacccattcacagggcttgtaaatgatgactggctgagccctgaggaacgccatcatttggagatttcagagacaaaggagagtcataaaagaaaatgcaaaagaggagccagcaaacctcatgagaagtaatattctaatagaaggagaagatgggccaggtgcggtggctcacgcctgtaatcccagcactttgggaggctgaggtgggcggatcacgaggtcaggggttcgagaccagcctgaccaatgtggtgaaaccccatctctattaaaaatacaaaaattagctaggcacagtggtgggcacctgtaatcccagctactcaggagtctgaggcaggagaattgcttgaaacctgggaggtggaggttacagagagctgagatcgtgccattgcactccagcctgggtgacagagtgagactccgtttaaaaaaaaaaaagggagaagatgtagagtattcaagaaggaaatggtccattacactagtgagctaagggccaaatagcatggggaccaagaagtgtcctttgggtttgagtatttgaaggtcatgggtgaaatagaaggttgggggggagtaggaagagtaatccagatgttagactgcaaattatgcagccagctctcgtgaagttttgctatgattggcacaagaaaatgtgttagtaggaggaaaatgtgggaatcaagagaaggttgcagcatgtctgacaatgatagaaagggtccagtaaacaaaggtggaatttgcagggaagcgaggaattaaacattgaagttctggatacagggaaagaagctgagatggactgacttttgatgggagaaaggaatatttccccattattagaaaagaggatgccaacttagaaagctgtgtaggtttggtggtggaaagatgacggagtttgaatctgaggacacaggtagcaatggttggaacctgaaggagagaaactccaaggagaaggttagctgttgtttgaatggataagcccttctaatctgaagatattttcttttggtaagaggagctgtcaacccttcacaccctcatttctagatatgggatttcctttgtggaagggaatcatagtgtcctttctcacttgaccttcctgtggctgttgggctggtgcctagaagtgggtgaggtccagggccaggcttatgcaagctcagcctcattcctggtgaagatggcatcacctcaagaagcaacagtgggtttgattgtcactcaccaggcttaatgctgcggctaagaggagctgctattaaagaatttccactcaggacccacaccatctgtcgagaatcacgaatagcataggatttgggtgctgcctcccctgccagatgacaaaaatgcacaaaatacacgtgaggttatcaacttcaggactccagttgcatcctggtattaatggcttttgagtttctggagagagtctcattgctctgagaagtagtggctataacgataaatggaggggaaatagggcagggactagtttgtgaatcaaagcatttgaaaggatctacgtgcagtcacagtcccaagattcacctttttctagggctattagtgacttgtctttttccgaatgataaaatgtctaggtggtaaaaaaaaccccataatatttaaattagttatccatatgttgttttttaaaatcctctcatcaaaataaacaagcaattctaaatacagataataataaaagagctaggtgccccgagattttcaaaggccgttttaggaactgagtgttttagcaagagcaaatacatttatagcttagcaaatgataggggtccttccatcctattgtctttgatgaggtcagatggagatatttccaagctgatttgcaattcaccacttacgttgtgggttcatgatgtcttcagagccttttgtgaagagaacaagatagatcagatggtggtgaggaggctgttaacagttggccatgtgagagaaggagagaagaaacatgttatgcttttttctcctctccccctaaaattttactgtaaaaattctttagagagagctgccctgagagcctctcctagatgcatatttgagaataaggatgggtacaggacatttcaaggccagaaaaccctaaaaggaagctcccatctctgctgtggctggcacagtcctgcttctctaggctgtgatggtcttggtatgctttccattaatcacatctgggattgttaggaggttccaacacatcaccacgggcaccttctagtactctgagtctctgggttgagaggaaggagggagagacagagtgcgtgtgtgtgtctgtgtgtgtgtgtgtgtgtgtgtgtgtgtgtgtgtgtatctccattttagccctccacacagcaggttaatcaccacttttcctgacttgaagctgaacactcctaagtaatttgtagctaacctgcctcactgagcccatcttcttccattcctcatccaaagagacatctgtaaggatcatgcacatggccactgagggccccacaaggtgctttgactattagggatcatctgcctctggttttctagttagggcaccagaacagtccccaagaatatcacagacactccacaatgagaaccagttgttcacaaccctccttctctcaggatccttgatgtgtgattcaatagttgtccctacacagtggataagcagatcaccaacctgcacccttgtaagcagccctggatccttcagtactctgtacctttgacaagactcccagaggcacttcgaggctaaacacagagacatgaaagaagttccccatacctgggttctaagcagcagaagttacctttagcaagagatgcttttgtccctcgtttcaaagtcaaggctctagttgcatgtaagtggtctagctgcatgaaaagctggtccaggactcccaggccccttaatgaccaaggaaagagcattctttcctgcccctgggtgtgttcattttggaaagaaagctgatatggcccaaagatctcttgaggctctggaggactgacagtggagcaacacaagcatgactggtctgtgcttcctgattaacaagagcagaggcaacatcagaaaacagcaatgaggaaatgcggattaggccagatgctgagttgaggagagtgcctttactggtcttccttggaggcagaggtgtgtctcccttggaggcagaggtgtggctctcttgacccactaaactgcatgaagccattgctgtgtttgcatctgatgttaggccaatcacagtactccttgcaggagttttacacacccaccatgtcacatttatatggtacaaatattgagagcttattctgtttctgctaaagttgtaagagctttacctgagtaaccttttaatcttcacgctacatttactttttttttggagatggagtctcgctctcgctctgtcgccaagctggagtgcagtggcacgatctcggctcatggaaacttccgcctctcaggttcaagtgattctcctgcctcagcctcccgagtagctggaactacaggcacccactgccacactgggctagttttttgtattttatatttcagtagagaaggggtttcactgtgttgcccaggctggtctcaaactcctgagctcaggcagtccacccgcctcggcctcccaaagtactaggattacaggcgtgagccactgcacccgtcccacacacaactctttaggggccattaattttatttctcatgtaagaaaacagcggctctgagggatgacagaatgtacccaaagtcatacagctactaagaaatctagccaagttagaagccaagtctctctattcttaatgattatgtgacatgcctcccctgggtcatagtctcctgcatactgcactagccggaacacagtcttgcattcagttgaggatactgaaaaatctataatgtgtccaggagaggagaggagagaacttggaggtcttgtggctttctaactctgaattaggagtcagacgcggcttcaatgttggctatgaaagaaaatcattactcttgaaaccgaatattattggtcagtcctactcccaatcactctttgtggttctgctcttggaaatccaccattgactctatcttctggagcattgcaatagtctccttgcttctgttcttacctccctagagtcagatgtccacctagcagtgaccagaatcaaagatgtaaataaagtcgtatgactctcttgcacagaaccctctaatagctttgctttatgccccaaataaccaaagccctcaccaagcccacatgatctgggtcctctttatctttctgctgccttctatccctgcccatctgacttccctgctctggatgtactggattctgctgattttcttgccctgcaagcttatcttcgcctgcagggagtttttcctgttcctctgaaggaacagccttccccaggtcaacaagtggtccactccctcgcttcttccatgcatatgcaaaaaagccaacttctcaataaggtattccccagccagcctatctccaagagtccctcacccatgtcctagccccttattttgctcaactattttcttcataaaatgtatgcttccatggttttggaaaatgtatttatccatctatttatttatttattatctccactaccaaaatgccagttctgtggggccagggaacctgttttgtcttgaggccagagaactatgtgctcagtggcaggaatggtgcggacctcttatgggaactaacaaatattttttgataaacaaataaatgtatgtagtatctcatgaataagaggaagacagggaagagaaaaggggagtgggatgctttgtaggaaaggcatcacttgtggtgagaggtgagttcttgacctcctcatggagaagggccaggggatgctctcctatcgccaggatggagcctcccaagagaatcactcaaacagtcagtgggactggcagctttgcccccatctggatgactggcacacctagagacccacaggctcaccttggctccttggccagggcagtgtgtggtgagggagttcagggagaccctgatgtgattttactgaagtgtggtgtactctagagatacagacaaggctctaaccttcccagcaccagcagagcctaaagaaactatggggtcacattccttggaagaacttggcagaaactcccaccccaactcagaacttttagacatttaaagtgtggaagactgaaggctctcatgactccatgcaaagaagccagtggttggcagaagggttggaaccatgagattttccccaagggatcaatgggtcaagtgataggatgtccaaccatgaaaagaatttgaatctgggatctattcaggtcctgagagtgcttaatgatgaagacagacagggtgacactgatggtcagtcaccctgtccaagaaactacacacacggtgtactgaaataaaatgaaatcagactgtaccagaaactgtgggaacccctccctctgcaaacccaaagccagtgctgcaagaactctgcctttcctgtgctttttcttggcccctaacatctcagcactggtaggggtacatgatccattcgcctatgcccaccatcttgagaagctcttctgaaaaaaaaaataataatagcaacaagaaagttgtgaagtttggcagggatgttgttagaggacctgatatccagtgagaaaaaaagcaagtgaatatagcaacatcgaaagtagaaattaaagaagaagaaaaggaaaaaacaaaaatattttgatgtttatacctagatgacttgatggtaaataaatgggtgagataaataaatgagttagaaacagaaatagattaagaagaaggcaatcccaagagtcatggaataatggcttcacccagggaggaggtgtgaagattcccaggatgaagctgtgtctctgacatagacaatgcctttcctgactgatcagaggattgagataaaagaagggaagtggttgcctcaggagagtaggatttggtggggaagaaatggtcagggctctgttgttggtaattttgcacttttcgattcttttgtttttttcttttcttttgctctgtcgcccaggctggaatgcagtggcgcgatcttggctcactgaaacctccgccccacccgggttcaagaaattctcctgcctcagcctcccaagtagctggagttacaggcatgcaccaccacacctggctaatttttgtattttttttgtagagatgagttttgccatgttggccagcctggtcttgaattcctgacctcaaatgatctgcctgcctctgcctcccaaagtgctggaattcaggcgtgagccagcgtaccaggcctgattctatattatttttaaagcaatatacatgtgttgttataaaaaaaaagattaaaactaattagtcacgttccatgccctcattttatttatctgaaaacaccttgctttttttttttttttcatgaagtgggtgctgagtctcctttaaggagataaatataggaaacttaggagggcttattcagacacaccccatggcatcttttctctttttgctcagagagaaaaaccaaatatctgatgaatgcagctgagggcatccaacccttgatatgaagctcagttttcattcccaggttggagattctgcctcagtctctgtccttctggtgacaaagtcagtaatgagcaggaatttcctcttcctgcccccaggaagaacacatttctgtgggtgctaaaatagcttaattcctggataggccaaactcaggccttcagaagcctgtgaggcatagaataaataagcatttgatcctgcccagagcgccttatcctgattctttaagctgagagcccagatattcctttcctggtgtgaaggtaggtggatgatgtcggaggcccagccttggtgattcagccagtcagaagggactgcatctgagccagacaaaatctaggacggcactgccctgtgtagcctgcctatcttgcctgcatcctgcctgcagggaatttgcgctgctccgattctccagtctggggaatgtaatagagtcacagtaactgtggtagcacaagtgctaagatccagtcgaaactatggagttgagggaaccttggctctgaatttctcctttgactcttaggtgcgctcagaagtgcttaagaaccaggtggccgctccctctgtaccttcccatgatgagcgtgagcatctgtgtggatcagcgaccacagttggaggtacctatggctctcaacgtccacgaggctgtgtgtccacctatccatgtccttccgtgtcacaggccccagggatgttcccagcataaagtcactttcctgttacttggagttcaatgatactcctttgtggattctctggaacagaatagagagtacaactttgtggcttttttagaagagccagctcatttagaaaatccaattgaggctgggtgtggtggctcacacctgtaatcccagaactttgggaggccaagacaggcggatcacctgaggttgggagtttgagaccagcctgaccaacatggagaaaccccatctctattaaaaatacaaaattagccaggcgtggtggcacatgcttgtagtcccagctactcgggaggctgaagcaggagtattgcttgaacccaggaggcggaggttgcggtgagctgaaatcacgccactgcactccaacctgggcaacaagagcaaaactctatctcaaaaaaaaaaaaaaatccaaatggtctatactttctgattttgtacagtctttataccataatatgaatgatagaggagttttctatatccttatgattgtcctttaatattttctgtcattttgtacacatgtaagtactttttaggcaattggccttaataaccatcagattctatgctgtagaggtaaattctcatcaaattatatactacattttacgtgttgatttgaaattaggtcagattaattaaagaagtgggtggctgatactactaaatttgcatagataatttgtgtgtctttctttagtttaatttatgcttcacaattagggcagatctgaataacaggagtttttgacgagcatttgacgctgacatttgaagtctggtagtactgctcctccttaggttaaattatagcttcaaggtccttccctggaatttacaaaaccttaagtgggactgagatatttccagagaacagattgtactgataatttgggccaggaggtagtttgggatctgggcttttcactttccagacagggatgatgcttttcttcttgctacaagttgttgaaagagaggccttctgagaacaggacccctggaccagatcctcactcccagttccagagtgctcctcactgctgactgggctcagacatctgcccagtgtctagtatggtcattctggaccagacttcatcctgtgccacttctatttctgtgaagatagatgagccttcatactaggaagtctgaaatggttctaggtttttcccatttgctttcagcaaatctctccttcatgcttcctctttagaaggtccagtttcgaaaagtaagtatttcctggtgggagatctcaagcgcagctgtgactgctggttgctccactgtggtagtttgtgcagagtgagatgtgcggttctgggtgacatccccaagtctcagtccaatttggccacacactgaggaggttggttaatgtaggggcagatacagaatagtaatgacttcaagcctgaagctcagatggcaggctgtggggttagttacttttggaaggtataatcccagagagctgagagaagatgtaaacttcatggcttcaaggactagtggtaggagagggagacaaagagacagagatgaggataaaagattgagctgcagagccaatcattaattcagagacatcctggagagaggctgtcctctcaatgcctgatctccatctatgcttgttttaggtgatgggttctacagtgagtgactcagtgggagactgtcagtttcagactggattaaccatgttttcccatgtccctttctcaccagagtgaaggcaagtcgtcgtgggttctgtcctttaagtttaagggatgagaaggaaggaaaagtaggttggccttggatttctgcatccagcctcctctctctagattgggatatcagcatagtccaggttggcccctggatatgagactcactctggtcatcttgggagttcaaggatatagtcggtgtctgctgtgagggatgagacaggcacagagcactggaacctgctcttgcttgacccctcactaagacaattataagacaaaaagatccccagggtgtcccagtcacaaaactcagggaacacccaaagagggaaaaaccaaatactccaggaagtggccactatcccacccctgcaaccaccctcaccgtggcacagttccctggcttaaagtactgattaactttgtgtttagttaagtcaaggagaactgataaaatagagtttacaatattacagtcttaggctcacactgatttctcatctgaagaggcctagaaataaatatactagccattatgtattaaattaatggagagtatataacttccaaactagaggggaggatgaacaaaggaaaaacaaacaaaaccaccttactcaatccagttgaagccataaagggaaggagaaacaggaacagaaaaagaggtatcaggaaaaaaagcaaagaaaaaattaaagcatggtaggaataaatccacatatttcagaaaccacagtccatttaaatgaatttaattctccattaaaagagaccttcttaaaacagaaaggcacgagtttatttttgtgtcactgagttggcttgtattggatcaggacttttacaaaaacagctataagacctgggtcagatagcgaagggaaactgctgacatcggtgaataagcataagacaaggcatgcaggcagatcctggagggagtagtcactcggggaaaatcatctgcatgggtcaatttcccatttttgaaagtttcgtaaggtgggcaggctgaagttgcacagtgtagaaaatccaatagtctttcttgaagaataagggaacagatgtgactccacatcaagaataaagatcatcaatgaagaccaatgctgaaattgtccagacaagaattgtaaagcagaactacattaatggaataaaggagaaatgccacctaaatcttttaatagacaaagtattaggccaaaggtaacatctacttaggatataaactcccagcaaactaggaatagaagaaaacttcaacatgttaaaatagtgcccaagaaaaaaaagtctacagctcatacttaatggtgaaagaattgatttttttccctaagattcataacaggtcaagaatgtttgctttttccacttttgttcaacatcgtatttgaagtcctagtcattttgagaagtctgctaaaaatacacaagaaatagaaatcagaaaataagtaaaactctcctcaaataatatgattgtttatatagaaaatcctaagaaatccacataacaactactagaactaataagtgcaaggctggaggatacactattttttatagaaaagttaactgtatttttatatactggcagcaggctatcagaaaatgaaagcaaaaatcaaatccatttacatagcatcaaaaacttcaaatacttaggaataaatttaacaaagtatataaaagacctgtgcaccaaaaactacaaagtgttactgagagagattaaagaatacctaaataattgaaggtatataccatgtttatgaattaaaagactgaatatttttaagatgtcagtctatggattccatgacatctctaccataatagcactaggctttttttttggttgaaattgccaagctggccagtcatagtggctcacgcctgtaattccagcactttggaaggccaaggtgggaggatggcttgagctcaggagtttgtgaccagcttgggcaacttagcaacaccctgtctctaaaaaaacacaaagattagtggggcatggtggcttgcgcctgtggtcccagctacttgggaggctgaggcagaaggatgacttcagtctgcggaggttgagactgcagtcagccgagattgagccactgcactccagccctgggtgacagagcaagactttgccacacacaaaaaaaaaggaagaagaaaggaaagaaaatgccaaacaagcttggagaaagatgatccaagaaatcactatctgtaccacaaaatgacaaaaatcaagacaatgtcttactagcagcatgaggagtgataaataaaacaatcaaatcgaatagaaagcctatatgccaaagtgatccagtgggagaaagagataccttttaaacaaacagtgccagaacaattagatatccatgagaaaatatgaatctcaaaccctacctcacacataatactgaaaatttaatcgaggtgaattacagacctaaacatgaaagctaaaaccttagcgcttttagagaaaaaaggctaatatttcttaaacttgagggtgagcaaaggtttcttaggcagatctcagaaagaaataaccatgaaagaaataaagattaaactagacattgttaaaataaaaacttacttattaggctcatcaaatgacactgttaaggaaacaagtagcaagtcacagacatatatctgatcaacaactgatattcaacatatataaagaactggtataattgacaaataaaaagttaagcaatctaatttttttagagacagggtctcacctatgttgcctaggctggagtgcagtggctattcacaggtgcaatcacagtgcaaggcagccttgaactcctgggctcaagagatcctcctgcctcagcctcccgagttaacaatctaatttttaaaatgggctggctttctgggatgatggtgacgaggtctcagtgcctggaaagggggtggcattaccctcaaggatgctgggaggctttttccagggagctgacagtagtgacaaaggacatctgatatggaacatcaggggaaagagagcaggacttcacctcataaggacaaccactaggaggtgcctctgacaccagccatgggtttcagcacctgaagtgttttaagggctgtatctgaggcacctgttcattcacctgtcaccctatgttgtcgtatccagaatggaacctctattagggcaggagtcgtcttgcctttccgagcttctcactattcagggacacataataggtcattcctagaatgcctaagctagctatatcccttaatcctgcactcagggtttgaaaaaaatttaactttattgaggaataattagcacacaataaacggcgcaaaatatacaatttgataagttttgacatatgtctatgtttgtgaaaccatcatcaaaattaaaatcatgaacatattcaccatcccccaaagagtcttcatgtctcctggaatctgtccttccctcccatcccccgtcctattcaccaggaatctacagatctgctttctgtcactataggtttgttttcatttgttttgtaattttatataaaggggatcccccagtatataattgattttgtctggcttccttcactcagtgtactttccttgagatccattcaagttgttccaatagtcattccttttaattgtcctccattcagtttttaatagaaatttggtttcttccactttttggctattacaaatagagctactatgaacattgatgtacaagtcttagtatggacatatgctttcttttctcttaaattaatacctagaagtggaatggctggatcatagggttggtatatgttaactttaacagaaactacctttttttttcattttacattttcatcactattatgtgagagatctggttctctaatattctcaccaagacttggtatagctagtctttttaattttagcaatagtaataggtaagcaatactaatagctcattgctattttatttgcagtttcccaatgactaattatattgaacatctttttgtaggctttttgttttggtcatctgtatatattatttgatacaaatatctgttctaagtttttgcccattttaaaaattgtcttttttgtttcctttttattaagttttgagagttctttatatactgtggatacaagtcctttctcagatatatacattacaagtatttttcccagtcagtgacttctcttttcattctctgaatagaatctttcaaaaagaaatttttgtttttaataaagtcaaatttagcaatttaaaaaatcatacgtaccataatttctcactgtatctaagaaatctttgcttaatagaatgaaaaaggtttcttctatgtttaattatgaagcattgtagattatgttttccattttgatttatgatcaattttgaattatttttccatatgctgcaagaaatggatcataattcacctttttgttgtcattatatgaatatctcattgatttgtcaccatttgttgaacatggtatttttttctccactgattgtatttgttgttgttgtttttaagacagagtcttgctctgtcgcccaggctggagtgcatggcacgatctcagctctctgcaacctccgctccccaggttcaagcaattctctatcttccaagtagctgggattacaggcatgcaccaccacacccagctaacttttgtatttttagtagagaaggggtttcaccatgttggccaggcttgtcttggactcctgacctcaggtgatccgcccacctaggtctcccaaagtgctggaattacaggtgtgagccactgcacccagccacactggttgtatttgtatgtttgttgaaaatcagttgttcatatatgtgtaagtctatttctggactctatcctttttcattgacctatttgtctatctttttgccaatgccacatgtaataatcagcatgtcaatttctttaataaaagcctgctaggattttgactgggattgtattggatctacaggtcaagttggggaaaattcactttttaataatattgaatcctctgacccttgaggaaggcatatcgttctggctttttgggcctttcaaaaactttcttttagcaatattttaaaattttcagtgtgtcagtgtactgttaatcattgtgaaataaacttcttatccttggcaatattctttattctgcaatttactttgatatatctatatctatatgtgtgtgtgtgtgtgtgtgtgtgtgtgtgtgtgtgtgtgtgtgtgtgaatttagaaacattgctctgttgcccaggctggagtacagtggcatgatcattagttcactgtagctgtgaactcctgagctcaagtgatcctaccacctcagcttctggagtagctgggactacaggcatgtgccaccatgttcagctattttttttattttttgtaaagacaaggtctcactatgttgcccaggctcactttgtctaatattaatatagccactccaacttgctttttattggtgttaacatggtatatcattttccatcatgttccttttagcataattgtgtctttacctttaaagtgcacttcttgttggtagcatctagtaaagttttgctttttaattcaatctgacaatcttttaattggagtgtttaggctatttatatttaatgttgctattgctgtggttaggttcaagtctaccatcgtgttatttgttttctatatttgtcatcagttctttgttccattttttcctgagtccttttggattacttgaacattttctgattcaattttatctcctctgttaacttactagtgattactaattattttgttgtttgagtagttgatttagaattacagtatccatctttaatttgtcacagtctcccatagtaaaataatatactttcatttctcccctcctaaaccatatcctatttttgtcattcgttttacttatatatatgttataatcctaatgataccttgttattgttttttaaataattatcttttaaagggatttaaatattaagttaaaaatctcacatatgtataaatatagttatcatttctggagcttattttctgtattaaaattcttatttccatacagtattattttctttctgtgtgtgtctgaaaagacatttatttcatcttaattttgaaagattttttgctggttataaccgcaaaagcataattgacaatgtttttttcagtagttcaaatatgttgctctactgctttctcacttgtattgattctgacaaaaaatctgccgtcatccttctttttatgtatttgtatgcattgtgtcctttttcctccagctacttttaagattttctcagtatcactggttttgagcaatttgtttatgattttgctgctgtagttttcttcatatttcatgtgcacggggtcatcaatcttcttgaacctgtgtttatggttttcatgaaatttagaaaatatttggctaacatttgaaaaaaatctttgttcccaccatcctcttttcctttaaaaattccatatattaggccccttgaattagtcccatatatcactgattctctgttcttgtatgtgtcgtatgtccttttatttttatttttcacttcataatttattttggaacatttctatttcgatgtcctcaaattcactaataatttcttctgtatgctaatttcatgtagtgtatatttcattccagacatggcagtttttacatcttggagtttgacttgagtctgttttaagctctttcatgtctctacttaaattattaaatatacagaatttagacataacattttaatgtgtatttgttcattttaacatctgtatcagttctgggttggctttgattaatttttctcctcatactgtgtctgaatttcctgtttctttgcctttcttgtaagcgttggatgtcagacactgtaattttactgtgttagctgctaagtacttttttaatacataataatgcattcttactttggaaagctttcaaatttacagaaaaagtgcaaagattgtgtattaacattttacatttgttttgcatacatgttacaatgaatacaccaatattgatacattattattatataaagtttatattctggtttcttcaggttttttctttttttttttttttttttgagacggagtctggctctgtcacccaggctggagtgcagtggcaccatctcggcttactgcaagctccacctcccgggttcatgccattctcctgcttcaacctcctgagtagctgggactacagactcccgccaccacgctcagctaattttttgtatttttagtagagacggtgtttcaccatgttagccagtatggtctcgatctcctgacctcgtgatccgcccacctcggcccccaaagtgttgggattacaggcgtgagccaccgcgcctgccctcttcagtttttatctaatatcctttttttgttccaccattccatcaaagataagacttttagtcaccatgtctccttagactcctctttgctataaaaatttcataggctttgtttgttgttaatgacggttttgaggagtacagtaaatagattcggatttgtctgatgtttttcttatgattagactagggttatgggtttgggggagggagatcacagagataaaatgctatttttattatatatcatatctaaggtacatactgtcaacataacttattactgctgatgttaatcttacctggctgagatagtgttcattaggtttctccactgtaaagttactctttcacccccatttccatactatattcattacagagaagttactatgtgtagcccacacttagagcctgaaggttatgttgtaatttcttgagagttggatagctaaataaataatttggaattattttgcatgggagattagtctgtcttatttatttatttagtcagctggtgctcactgatatttgttttatgttttaaattataatccagtgctactttatttattttgctacttaagttgttccagctttggccattggaagcacttttatttagctcctgtgttcctttgacataccaatcactgtggatttttttaagtatttccttactttttgttacaacaacatgcttaggctgctcttgtgtattttctgtgcccgtcccaaattcagccattttgccaagggtgttgggtacttttgtattacaggttgagtatccctgatccaaaaattcaaaattagaaatgcttcaattagcatttcttacgagcatgacttttgagtgtcatgttggtgctcaaaaagttttggattttgaaagatttcagattttgaattttgagactagggaggctcaacttgtactatgaatattcttgagcttaattccgtagtgtaattaaggctcttggcaagaatttgatccatttgggacttgattttaggatttgataggttgaacctgagaagcatttagtttaggtctagttattttccattacttaagcaagatccttctgaatactgtaaccaatgccttgggaatgataaggttttccaggccagacagtgggaacaggtattgtgacctttgaaatgtttttatccccagccttgtggataatgacaatgataatgcaaagtgtagaaagaaagaattggaaatatattgttgtaaggtccttgtggtagacttaaagtggtataaaaaaattaaaggtagactttaattaagaatatgtattggaagccctggactaaccaatataaatatataatggtataattaataagtcaataaaagagataaaatggaataataaaaaatgttaactcaggagaagacagaagaagaaaaataaatataaaacagatggaacacatagaaaacagcaagatggtagatattaatccaaccatattaatactcaaattaaatgtaagtgataaaaacacgccaggtaaaagactgagatcgtcagattggataaaaatgcaagatctaaatatatagcgtctgtaagaaaccctcttgaaatataaaactgtagacagtttaaaggtaagaaggtggagaaagatgtatcatgcaaatactaatcacttgaatcacttgagatcaagagttcagcctggccaacatggtgaaaccctgtctctactaaaatacaattgtaattgtattaaattgtaaaaaatacaacagttagccaggcatggtggcatgcacctgtaatcccagctactcaggtggctgaggcaggagaattgcttgaacccgggaggcgaagattgcagtggactgagatctcgccactgctctccagcctgagtgacagagtgagactctgcctcaaacaaaaaacaaaaaacacccccaaaattatagctaaatttgtgggatacaactaaatcatgcttggaaaaatagcataaatgtttagaaaagaagaaagacgtcaaattaataatttgagattccacctgaaggtactagaaaaaggagtaaaacaagctcaaagcaaggagtgggaaagaaatttataagatcggagcaaaaatcaatagaattgattgcagaaagcagtagagaatattaatgaagctaaaatctgattattaaaaaatcaagaaaaatgagaggagactaattaccagtttcatgaatagaagagggacatcactactgattacacatactttagaagggtaataagaggatactacaaacaaatttatgcccataaatttaacatcttagataaaatggaccaacatttggaaagccaaactactaaaacccacagaagaagtaagtaacctgagtaatcccatttctatgaaagcaattgaatttattttaaaaatgtttaataatttaaaatatgctagctattgttcttcttaatgatgatgaagaggaagcatcacacaataatgatactgatgatggcagttgtgttggtgggtgatgatggtgatggtggagcaagtggtgatggtgcacatgcaaaagaatgaaattagacccttatcttataccacataaaaacatcaactcaaaatgaatcaaagacctaaatgaaagttaaagcccttagaagaaaacataggggaaagctttatcacattggatttggcaatgatttcttgcatatagcaccaaaaaataggcaacaaaagcaacaaaagaaaaaatggatacattggactacatcaaaatttaaaacttctgtacctcaaatgacactattaatagtatgttaaggtaactcagggaatgggaggaaataggtgaaagtcatataaggggttgacatctagaatatatatagaactcctgtaactcaacaacaaaaaagcaaatagcccagttaaaaaatggtcaaatgacttgagtagacatttctccaaataatatatactaatagccaataagcacatgaaagggtgctcaacatccctaataattaggaaagcgtaaatcaaaaccacaatgatatactgctatttcacacccattaagatggttgctattagaaaaaaatagaaaataacaagtgttgatgagaatgtggaggaattgggtggggcgtgatggcttatgcctgtaatcccagcactttcggaggccgaggtgggcggaccacctgaggtcaggagtttgagaccagcttggtcaccatggtgaaaccctgtctctactaaaaatacaaaagttagccaggcatggtggcgtgcacctgtaatcccagctactcaggaagctgaggcaggagaatcacttgaacctgagaggcagaggttgaagtgagctgagatcacgccacttcactccagcctgggcgacaagagtgaaactccgtctaaaaaaaaaaaaaagaatgtggagaaactggaacccttgtgcactgttggtgggaatgtaaaatggtgcaaccactgtggaaaacggtatggttgttcctcaaaaacttaaacatagaattatccatatgatccaggagttccacctctgggtatattcacaaagaattgaaagcagagacttgaaaagctatttgaacacccatgttcatagcagcattattcacaatacccaaaaggtgatggcaacccaagtgtccatcgacagatgaacgaataaagaaaatgtggtacacacaccacacagccttaaaaggaatgaagttctgatacatgctacaacatggatgaatcttgaaagtaaactcagttaagtgaaataaactaataacaaaaaaaaaaaaataccgtgtaattccacgtatatgaggcgcctaaagcagtcaaattcatagagatggaaagtaaaatggtggttgccaggggccgctggggagaggggagtgaggagttattgttttgtaggtacaaaatttctgttctgcaaaacgagaagagttctggagatggatggtggtgatggttgcccaacaatgtgaatgtccttaatgccactgaactgtacacttaaaaatggttaaaatggtaatttttatattatgtatatcttaccacatttaataataacaatttaaagatatatcaaaagaggcaaatgtgcagacatctatcgaataaataagttatcaaaaacagcaaaaagggacagataataataataaaaaaagatagtttctgtttttgaggagcccacgaaagccacacatcactgagaaagccgaggagagctggggctttctcaggggtagccctggtgcagctcccttgcctcgtctagtcctgctttagatgctcgctactcgggtgagggctgcagatccttgtggaaagagacagaaaaagaggaagagagcttgaattggaggccgtgcctctcagcgtggcctcccgatccttgaatcggaggccgtgcctctcagcctggcctcctgatccttgaatcggaggccgtgcctctcagcgtggcctcccgatccttgaatcggaggccgtgcctctcatcgtggcctcccgacctagcctggtggagagcgccccctgccggtagatcctggcccggcacactgagagcggcaggccccgccggaggggccagcgcaggaccggggagaatggagctcagccagtgcctagccctgggtttatttccagtttcctgctggagagcaatggtcaaactacacagtccggcggaggcgagtccgccagctctggaagcctctgaggcacagacgaggaaagcgcctgaatgtggatctggggtaccagaagttgccggtggctcttgcccctgttaatgggacttaatcagcagaaactggggggtgtgacacacaccccggacctaacctgccctttgggactggcccacactctttctcagagcctcacctgccctgtggactgcccacgcgctctctcagatcccggcctgtgcacctggcccttccccagcctcccaggcagagggtgccacggggctgagggcaggcaacaaagccactggcctctggctcagcacccagctgcagccctgtggatcctggccccacagcctccccatgacttcactggcatccagggtttctcgaaagcgctatgagccaagtggtacccttcccctctgatgtggctgggttggagagggagtcctggatgcagctggaggtccccttctgctcacggctccctggaggctgtgtctgtgcatgcacaccatcactcctactccaggaaggactttcacggatgtcctcagctaccaaaagtcactccagggagtgataaattccgtccaacccaaagtgtgccacactctgctatggggcactcctttgtctctgcaccaactctgttggtttctattatcttctctccctctctccttttttttttttttgagacagagtcttgctctgttgcccaggatgaagtgcagtgacatgatctcaggtcactgcaactttcacctcctgggattcaagtgattctcgtgcctcagcctcccaagtagctgggattacaggtgtgcaccactatgcccaactagtttttgtatttttagtagagacggggtttcttcatgtttgccaggctggtcttgaactcctggcctcaagtgttctgcccgcctctacctcccaaggtactgggattacaggtgcgagccactgcacctggctggtttctattatcttcttagaaagcctgttggtcctttgtgcagactccttcattcccccagcctcgagctctgccttctattccaaatgtgtgaatttataagcattacacagcttatttttcatattggggaatgggtgtgaattagtatgaagtcaagctgcaagagtaccaataccaggtccatctcttactagttttgtgaccttaggtgacttagcctctctaattttcgttttgtcttatcagttaaatgggaataagcatagcacttaccttagaggactgatgtgggaatgaggcaacataatagctatattgcttttatcactgtacctgacagagtgaatgtgtaacaaacgttaacctttcttgtcagcaaatttaaaacctcacagcatattctgcactcattacgccagtctgttggagctgagtccatgcctttttctctctgcgttgggaaagccatgctagctacatgcatttttggtcatgaaccagtcttagatttaagtcaatgtaaatttggcctttgccgtgttcttaatgtcttctttacatacctaggaaaagtgaaggagaggtgagaaagacagagtggggaggaacccgtgtctgtgggtttgtgctagatgccaacctggctcttcacatcctctgtctcatccagtcaagcagccacactgagtcccccagcatgagaacagcttccacagagcaggagattctgggtctgaaatgaggagagagctccagtcccaccagtgccctagagcatacctcagaatgctcctttctcctggtgggatccgtggagtctgcctgctcttccaaggatgcctcagccttttaagtaaggcctagggaggggccctgaaactaccaggacctgaggagaagcaggattctcagcgtgatttcacaccaccctaagccgccgggaatacttgctgctcattatctctctattggagtctcatggaacacattgtgggaagtgctatagaattctagggacatagtgggcaccaagtgaatatcagttactttaattattactaaatttatctccctaacaggaatttactatcttaccataataaactctgcttacattctcatataggtgaatacacctgccctaagtcatctctacagcaagagcagaggccacatctacctccagggttattgccattctcacaaaggtgaggataagtcaccacagggaacattgcttctctgcaggctgtgacactttccagggcatataaagcccatgaagaactgagatgtttgctgagaagagagcatacccaccgaagacagtggaaaatgaaaaaacaacaggagtagaaacttcccaatagtgatgtcaaactgtattagttactaattgctgtgtaacagcaaacctagcgacctaaaacaaacaaaaaaattatttaacaaagacagagtcgggaataagaaaactggcttggctggagggttcggctcagggtgtctgattaggttgtaggaaagatgtcagccaaggtttcagtcatctgaaggcttgactgggactgaaggatctgtttgtaagattgctcactcagaccattggcaggaaaccacagtttctcaccatgtgggcttctatataggggtgcttgaatatccttattagatggcagctggcttcatccaggtgagtgttctaagagcaaggaggaaactgcaatgccttttatgacctggtctcagaagtgacatgctgccatgttcaccatgtaacatactcattagaaaaaagtcactaagtccagtccatactcaagagaagggcagttaaacttcctctctgtatcagtctgttctcacactgctaataaagacatacctgagactgagtaatttgtaaaggaaagagattgaattgactcacagttccacatggctgaggtggcatcacaatcatgatggaagatgaaggaagagcaaagtcacatcttacatggcaggagggaagagagcttgtgtaggggaatgcccctttataaaaccatcaggtctcatgagacttattcactagaatgagaatagcacaggaaagacctgccctgatgattcagttacctcccactgggtcccttccatgacatatgggaattatgggagcaacaactcaagatgagctttgggtggggacacagccaaactatatcattccacccctggctcctcgcaaatcacatgtcctcacatttcaaaaccaatcatgccttcccaacagtcccccagggtcttaacgcatttcagcattaactcaaaattccacagtccaaagtctcatctgagacaaggcaagtctcttctgcctatgagctgtaaaatcaaaagcaagttagttacttcctaaatacaataggagtacaggcatttggtaagtacagctattccaaatgggagaaattggccaaaacaaaggggctacaggccccatgcaagttcaaaatccagcggggcagtcaaatcttaacgcttcaaaattacctcctttgagtctctgtctcacatccaggtcatgcttatgcaagaggtgggttcccatagtctttggaagctccactcctgtgactttgcagggtacaaccctcctcctggctgctttcatgggctgacactgtctgtggcttttccaggcacacagcataagctgttggtggatctaccattctgggatctggaggacagtggccctcttctcacagttccactagacaatgccccagtggggacattgtgtgggggctcccaccccacatttcccttctgcactgcccctagcagaggttctccatgagggctatgcccatgcagcacacctctgcttggacatttagacatttccaaacatcctatgaaatctaggcggaggctcccaaacctcagttcttcacttttgtgcacccacaggctcaacaccacatggaagctgccaagggttgggatttacaccctctaaagccatgacccaagctgtacctttgccctctttagccaaagctggagtggctgggatgcaagtcatcccaagtcctgagactacacaaagctgccaggccctgggtctggcccatgaaaccattttttcctcctggacctccaggtctgtgatgggaggggcttctgtgaagacctctgatatgccctggagacactttccccattttcttggtgaaaaacatttggctcctctttccttatgcaaatttctgcagccagctcgaatttctcttcagaaaataggtttttcttatctcatcttcatgctgcatgttttccaaacttttatgctctgcttcccttttaaatgtaggttccaattccaaaccatatatttgtgaatacataaaactgaatgttatcagcacccaaatcacctcttgaatactttgctgcttagaaatttcttttgccagatgccctaaatcatctctttcaagttcaaagttccacagatttctaggtcaggggcaaaatgctgccagtctctttgctaaagcataacaagagtcacctttgcttcagttcccaacaagttcctcatctccatctgagaccacctcagcctggaccttattgtccatatcactatcagcattttggtcaaagctattcagtgagtctccaggaagttgcaaactttcccacatcctcctatcttcttctgagccctccaaactgttccaacctctgccttttacccagttccaaattgctgggtaacaggcaaagtgttaaagtgctgaaatgccaatagtgatgtcaaggtgtgttagttaccaattgttgtgtaacaaagtatcagcaaagttagcagcttaaaacaagaaaaaattattatttaacaaaggctgagagtcaggaatgagaaaactggcttggctggagggtttggctcagggtgtctcattaggttacaggaaagatgtcagccagggttgcagtcatctgaaggcttgactggggctagaggatctgcttctaagattgtgcattcacagactgttggcaggaaaaaatagtttctcaccacgtgggcctctccatagggctgcttgagtgtccttatcacatagtggctggctttgtccaggtgagtgatctaagagctaggaggaaattgcaatgccttttatgatgctgccatgttcatcatgtaacatagcgccccactcccagtatcaatttactatatcagtctgttctcatgctgctaataacaacataaccaagactgtgtaatttataaaggaaagaggttgaattgacttagagttccacatggctggggaggcctcacaatcatggtggaagatgatgaaagaagagcaaagtcatgtcttacatagtggcaggcaggagagcttgtgtggggaaattcccctgtataaaaccatcagatcttgtgagacttattcactatcatgagaccagcacaagaaagacctgcccccatgattcaattacctcccactgggttccttccatgacacgtgggaattatagaagctacaattcaagatgaaatttgggtgggaacagagccaaaccatatcaccttcttaaagatgaagtttccaagaatttatggacatattttaaaacagccacacatggtttgcgaattggcagcattgtctttaggtagtgccaaagtttatttttcagaagttcaaaacttgactctcatacacacatatagtgagcatgtgtcaaagatttactatttttcataagtgagggaatcagcaagattataaagctgattatcaaaagataattcagggaatggaggcttataccgtcagtcaagaaataaaggctgaaataggttggctaagttacgttttaaagacagctttatgacttgtgaggcaataaaactgcaccctttggagttatcttttctatcagacaggaataatgtgtaatttatcaatgttctcttagttcatggctaatttcacagagtctgagacctaattagtaagtcaagcaaagggataggtccagagagaacttattgttggtgaggcctgtttgataatgttttcatataatattgacagtatacacagtcatagtttcattttacttattatttatttatttattgaggcagagtctagctctctctgtcatccaggctggagtacagtggctcaatcttggctcactgcaacctccacctcccaggttcaagcaattctcacacctcagcctcctgagtagcttggattacaaatgtgcaccaccaacccggctaatttttgtgttttcagtagagatggggttttgccacgttggccaggcttgtctcatttcatcttatttctactgtcattccatttggtcaatttgtaatttaataattttgtacaaggcagtttctacattaattttatttttctgaaaagtgtctatcatattagtggcattatgaaaatcgtagattattttctgtgttttgaacaacttgatattttatttattcttgaacacttgtaggacctcttggctcatatgtctgaataccatttctttaaaatgtacgctttaacatgtacacatatgtaacaaacctgcacattgtacacatgtatcctaaaacttaaagtataataataataataaaagaaaaaagaaaaataaaacttaaaaaaaaagtgtatgctttaacaataaattattaataaatagttatctgtgttattcaagatataattaaattgttttttgtgcactgacccttacctttatttcagatccatcacagagagtgcatggaggtatttaaactgcattaactgtttcacaattaagtattatcttatcaattaggtattcaagaaagatcacttacagaattatagatggcatgagctagattttactttctaaagaaataaccagatacatgagcaaagatgttaatacaaagatgtttgtcacaacatggttttcaatagcaaaaaaagagagaaaaatatataaaagacaaataacagtggataggtttcaataaataatgttacagtgatacagttaaatactatacagctattgaagcatgtcattattcatatttagtatggaaagatattttgctattttgccacatgaaaaaatgaggttggaaaaagtataggttttgtgaatctgttgtatgaaagctgtctatagttacatgtgtatgtgtgtggaggaaatagtgttgtcattggttttctgatgatgcactcagaaaagacaagtattcacattttttcttgtggctgatctggattttcaggtttttctacaatgaacatgtaggctgaacattccctaagcaggagagtcccacctctaacatctcctgtaggcctggcaatggcaggcaggaaagacagaggaaggaaggagggagaagggaaggagtgaaggaaggagtgaaaaaggtaaggaagaaagggaataggggaggaagggaggaaatgggaagggaaagaaggaaaggaaggaaagagggagggaagaaaggaagggaaaagggagggagtgagtgaatgaaagatggaaagaaggaagaaagggagggaggcagggaggaaagaaagtcgcgcttcccttgagctgccatgggcactgactcttagggtctgaaagcccctgagatgcaaaagcctagtgctcacaaagagctggaaagcctcaaggaagttcttcaatatttctggaaggaaactgtctccagaagcttccctccccacgacagataatgagcagcaagtgcttctggcgacttagggtgatgtgaaatcacgctgggaatcctgctcctcctcaggtcctggcagtttcagggcccctccctaggccttacttaaaaggctgaggcatccttggaggaacaggcagactccacagctcccgccaggagaaaggaacattctgaggtatgctctggggcgctggtggtaccggagctctctcctgaccccagacccagaatctgctccgtggaggctgttcacatgctggggagctcggtgcagctgcttgctccccagaccccagccaactcagcctctctctccatgattttctgttgtttattccaaaataggggagtctacaccctgtggagctcaagatggtcctgagtggggcgctgtgcttccggtgagtgtatgaggccctggtttggtggtgtcctccggaggaagtgagttctggatagacccgttgtccagctctgagcaggagggaggaagggagggggctgccattgcagctgggaaattgtgaccagcacctcactgctcttagagttttcccagcctttttcaaataggggcaggactggggcaggccatctcacaaggggtccctgatgctgagggggataagtgaacctcccagtctagagctccagccaagtctatccaaggtgggaacgggggccaggatccctgctcagagctccgccattgtcccccatcacagtgaatggatgtaagctcacccactctgtgcccctgcctccctgctactctttggggataataataaaacaaaaaccattaccatcagtcagtctgtccacccactggcatgtaccaagccagacactctgccgtgttctgggctttacaacagaggatgagagtggtcctttctctcagtctaataaagcacttcccatgatgtgttctatgggactcgattagaggagtcccacagaggcatccaggagatgctttacacagtggagctctctgatcaagtaaatgcagggaattctgctttctacatcctctcataagagaaccacagcccagctcagcatatgagtgactctgaggttttctgaagtaaggcaacttgttgaattgtatttagccatgcatcgacccaatttttacactgcatccttttcccccatataacttttggagaaacccactttaggatacatcttccacctcataggatgccaggaaatcaactgagttcaaagatgagaaacaactttgaaaagttaaataaaagaaatttaaatttaaagaaactcctcacttagtaaggaatatatgaccaaatagaaatacatgtatcttgaagaattgaagaatcaggctttaacgtggaagaggcctggatgttatccaacccatcatcttagtgtagcaatggggaggctcaggcccagagtgggcgagagagttgtctcctgcgactcagcagcattggaggcagagatggggcaagaacctagggctctgactcaccgtgcagcttctcttccagcaggagatgggttggggcagaaaaggttgaatagggtgaaggagcaaaccacagactccagtgggagactgtggggtcatcctccttgtagggcatgagcccagcagggctgggagacaaggctgtgctgttacttctggcacagtaggaagaaagagagacaaaatgcctgagatcagggggttctctggatccagggcatgctggagtgtccaccctcctcctaatgtagtcctcaccccttcctgatgtttcagaatgaaggactcggcattgaaggtgctttatctgcataataaccagcttctagctggagggctgcatgcagggaaggtcattaaaggttggtgatgaaacatgacccactttccttggtctctatacactctcaggggagggggcctgaagagggcttagaatagtcatacagattagcataggcctacagagcccaggcattggggcagcacaaaccaggctctaagcaaaggcaaataaaatactacacctctcagcaaagtgaagacacaggctctggggccacctgaagcttctatgcagaagtgggaatgttttccaagaggcttgtcttgtcattcccttacaggtagatttaggtcaagcattgcattccctgggagccagtaagtaccaaggagagaactaacgtagattctctataccttttttcccatatgggagtgggtttctgcctctccaccctgggtcccctctgctctctgaagatcctcagtcacttagagtggagggacccagagaacaggtggcattgttggacctcctgcttgctcactctgccccatgcactgcaacacgtccctctctaaaatagtttgcacctgcccacctggggcacccttgctgagcacagatgccaggtagatccttcagctaggccatatgtgtatgtgtgtgcttactggtgtatgtatgtgtgcatgcaggcatatatgtgtgagcatgtgtgcatgcatgtatctgtgtgtaaccatgtatgtgtgagtgcaggtatgtaggtatgagcatgtgtgtgtatatgtatatgtgtgcatgcatgtatctgtgtatgtatgtatctgatgtatgtgggtggtgaggggatgtacagagaggaatgagaccctcttttgctctcagcaacatcacagggtgtagaaagttgtccaaacaattccaaaggggggcttatcaagacagggttcagaaaaaggcctgagacccaagggacattaaaggagggggttgaatctattttggggtgtagaggcttgaagatttgaccctgaactagagggtggagtggaggtggtacaatgtgcttccatgccttgatgtccactctgagccagtggacaggagaagccatgtcatgacagctgctgagaagcctcccttctgcccagcctgggggcaggccgtcttacagcagtcctgtgccctagagcccaggacaggggaagaaggagggaaaggcatccagggccctgcatctggcctctttcccacaggtgaagagatcagcgtggtccccaatcggtggctggatgccagcctgtcccccgtcatcctgggtgtccagggtggaagccagtgcctgtcatgtggggtggggcaggagccgactctaacactagaggtgagacttggggcatcctcactggggactcagccacagatgctgagcctactgaagccgggcagcccacagccctggtgctgtgggacaccctagcaggattctgttgatggcagctttgcctcctccctaaggatcctgcccagccctccctctgcccctgcttctgccctcacctgacctcccctcctctgccggcagccagtgaacatcatggagctctatcttggtgccaaggaatccaagagcttcaccttctaccggcgggacatggggctcacctccagcttcgagtcggctgcctacccgggctggttcctgtgcacggtgcctgaagccgatcagcctgtcagactcacccagcttcccgagaatggtggctggaatgcccccatcacagacttctacttccagcagtgtgactagggcaacgtgccccccagaactccctgggcagagccagctcgggtgaggggtgagtggaggagacccatggcggacaatcactctctctgctctcaggacccccacgtctgacttagtgggcacctgaccactttgtcttctggttcccagtttggataaattctgagatttggagctcagtccacggtcctcccccactggatggtgctactgctgtggaatcttgtaaaaaccatgtggggtaaactgggaataacatgaaaagatttctgtggaggtggggtgggggagtggtgggaatcattcctgcttaatggtaactgaccagtgttaccctgagccccgcaggccaacccatccccagttgagccttatagggtcagtagctctccacatgaagacctgtcactcaccactatgcaggagagggaggtggtcatagagtcagggatctatggcccttggcccagccccacctccttccctttaatcctgccactgtcatatgctacctttcctatctcttccctcatcatcttgttgtgggcatgaggaggtgctgatgtcagaagaaatggctcgagctcagaagataaaagataagtagggtatgctgatcctcttttaaaaacccaagatacaatcaaaatcccagatgctggtctctattcccatgaaaaagtgctcatgacatattgagaagacctacttacaaagtggcatatattgcaatttattttaattaaaagatacctatttatatatttctttatagaaaaaagtctggaagagtttacttcaattgtagcaatgtcagggtggtggcagtataggtgatttttcttttaattctgttaatttacctgtatttcctaatttttctacaatgaagatgaattccttgtataaaaataagaaaagaaattaatcttgaggtaagcagagtagacatcatctctgattgtcctcagcctccacttccccagagtaaattcaaattgaatcgagctctgctgctctggttggttgtagtagtgatcaggaaacagatctcagcaaagccactgaggaggaggctgtgctgagtttgtgtggctggaatctctgggtaaggaacttaaagaacaaaaatcatctggtaattctttcctagaaggatcacagcccctgggattccaaggcattggatccagtctctaagaaggctgctgtactggttgaattgtgtccccctcaaattcacatccttcttggaatctcagtctgtgagtttatttggagataaggtctctgcagatgtagttagttaagacaaggtcatgctggatgaaggtagacctaaattcaatatgactggtttccttgtatgaaaaggagaggacacagagacagaggagatgcggggaagactatgtaaagatgaaggcagagatcggagttttgcagccacaagctaagaaacaccaaggattgtggcaaccatcagaagcttggaagaggcaaagaagaattcttccctagaggctttagagggataacggctctgctgaaaccttaatctcagacttccagcctcctgaacgaagaaagaataaatttcggctgttttaagccaccaaggataattggttacagcagctctaggaaactaatacagctgctaaaatgatccctgtctcctcgtgtttacattctgtgtgtgtcccctcccacaatgtaccaaagttgtctttgtgaccaatagaatatggcagaagtgatggcatgccacttccaagattaggttataaaagacactgcagcttctacttgagccctctctctctgccacccaccgcccccaatctatcttggctcactcgctctgggggaagctagctgccatgctatgagcaggcctataaagagacttacgtggtaaaaaatgaagtctcctgcccacagccacattagtgaacctagaagcagagactctgtgagataatcgatgtttgttgttttaagttgctcagttttggtctaacttgttatgcagcaatagataaataatatgcagagaaagagaaacaaatgcatttgttttattattgcaattttctccaatattttttattttctttctcacaatgaacaactatccttcatttacccaaatattctatttaaaagctaataatacagcatttgttgagtcatctggttctgcaagattgagatcctcttgtcctatgtgccaggaatgaactccagtgtccccacccaaaccctggggaatgggagcagaagccagaggaggagcccatatctgagccccaggtattccacctgcacttcacctgttggaccagcttggtggttgagagtccactgaggcactggcaaggaggtggccaggacagacaaggctgcctctatggacctcacagctccagcccagattcagctgaagtcctcaggcaacaggcagcacagctcctaccccaggcctctcagggctgccaagaacatgagctccggatgctaggctgtgtttcagaccctgttcacactctctttgtccatgggcccagacacagtcttgtgctgctccctctgcttttgggtcctccatccatcctctctgcctagataaatctctcatctttcaataccctgctaagatgtcacctcctccaagaagcttttactgagttgagacacccccagctatctgatctggcaatgtttgtatgcacctccctgcactgtagtaccttaacttggagtctgtggcccctgggatgaccttaaggttagggacatataagtttgtctcttagcaccttgcataatgcttggcacataatggaaacccaatgagtatataatgtagaaactatttctccaccctggaatattctctccttctcctccacccatctaaacaggcccacctctaagggagcagcttaaattccacctcattcttgaaggtttctccagcctgaatttgttgcttcctcatttgtaggatgacagaactcagaagagctttagccatgatgagccgacacaagtcagtagtaaaagaaggaatataaaatgcctccttcaggaatgtacaggctggacatcatgactctacaagtgaaaaagagttagtggctttagatttctgcaattttggtataaatcactggcctggacctgtatttacagagatgcaatactcacatcatgtggggtttgtacaaattgcagacatcgaggaacagagaatgttccaagggcaggctgtagggaagaggctacgatgtgggaggtattatcctgaaaaaagcaatgcacagggagccctcttcaagcacttaaaggcttgccaagtagaagaatgtgcttgttctgtgtaattccagaacacacaagcagaaccaatgggtgcaaattatgtggaggctgtttttcctatatgacccccatattttaaccacaaggaccacaaacattgatagggtttcttcaagaggttgtgtggtccctgaccctggagatgttaaggcagagcctaattaaccaatttctcagggatgccatagcacagatttctccaattggagggaaactatgattccatgtctatgagatggagtttcactctgtcgcccaggctggagtacagtggtgccatcttggcccactgcaacctctgcctcccaggttccagtgattcccctgcctcagcctcctaagtagctgggcctacaggtgcatgccaccatgcctggctaatttttctatttttagtagacacgaggtttcaccatgttggccaggctggtttgaactcctgacctcaagggatctgcctgccttagcctcccaaagtgttgggatacaggcatgagccaccatgcctggcctaaagtcctttcaattctaagattttttttttgcccaaggagcttatctgccactattgtttccaacatgtccttggcccacagcttagagagtctggtcttcttaattatcttttcaagtgtttatgacttagttcctcagctagactgtgaaactacttaacaacaaggactgtgtattgaatgtctgtgtcacacagcagtgtaaatgctgggtaaacactcattggttgcctgacatagtaactcatgctttaagccttcccatagaagggtgagagattgggagagtggaagaagaatgatcactggccttagaaagcagaaatctggtcccatttctgcccatcttttctcatttctcatcctgcaggcatctgagtcttagacccacctatcccacttcctcaagaagcccttggtggaactttgcaaatgaccaaagagggagaattataataaggttgttagtttccagagaacattacacctaagcttctccacgcttgtaatggagggatggatggatggatggatggatggatggatgaatggatggatgaaagggtggacagaagggtggatggatgggcacatgggtggatggatggttggatggatgatggatggatggaagaatggacagatgggtagatagatggacagatgggtggccgggtggatggatggatggatggactgagtcaagtaatgtcaattagagacctgagtgttctttcctctgtgctctactcacactatcatatttcctagcagtccatggcacatgatgtctgctcagtctcagggtgaatctgaggtcaatatctttgcagttgggtttccctagatgttctgtcccatcaagctggtaccaactaattaaacccactgaaaagcagagactcccttctcgtctttccaaacagagtcacactcacagtgctatcagccccttctcttattctggctgtctggccacagcctggattccggcatcagaatttgttctgtccttgggcttgccagacatactttctcttgtattcaccacctcttcaagcctaggatggagccccacggggcaccaaagatgtctgaccccagcactgtttatctggctgcaaacccactaataacatagtcaacgacagtcagtacagagcaggggccccataccttatttctgccaaggctttatggatgactctctcccccttcaacaaatgctccttaatgttcccaccatcttattattcatgctgtaccaaagacattgtgaaatgcccaggctcttcttccttcatgtcctgcagccaattatagagattggtgcaggcctgacccacctgtaccagacggtataaacacagcgcaatgccctggagaaatcagttggagtctccagggatcagggttccaggaactcaggatctgcaggtcagtgatggacaggcaatattctctctctcttttctttcttttctactctctcctgtcaatatctctggtatgccctctatcccttcactcctcctggcaagctgtctaggtaacaaggtagtcccctcatatgacatgatgggacatcaaaaacatttaggagcacataaagagatttgaggagaaggaataggttaagccaaatcaagatttctgaactacttagaacaactgactttagaaagtaatctcaaaagaaaccatctgggccaatggtattcaaaccgtgtttggtggaagcttaagagattttttgttttcgttttttttttttttgtgctccttggtagctcctcagtgtcttctttgtaggcaagagaaatactagcagggttccaaagtctccattgcttcctgtgtcagcaaagcagctgccctttatcctttttacaatcattagaattctgcataaaattttattgtgaaacttaaaacagttttgaaagataccttactcaatctttccatccaatgttgataagttgaaggcccagggataaaaggtggcaaaataaattggtagcagagctaggtctaggactcagcctttctattcaaagtctgctctgtgtgtttctatgtcctggccacaaggaccagggtagttcaattagggtggttggagagagcttcaagtgagctgtaagccatgcttcatgacttcaagatcttataaacttttataagggaaacaaatatctttatgtacaacaataaataatacagtaaaatttaataggagttcagagtagagttacaatagtaagggaaagattcattaaactctgagtcatggaattataaatagtttggcctagaaagaaccttcataaccacataatctaatcccatgaatgtatagtgctgaaactgagggttggaggttaaaagacataaccctgtatgtctaagctgtaactctacactggtaattaatttgatagaactagatactgaacccatctatactgatactatctccagtgatcttaatatcaaaagatctgaatggatgacaatgagaagggatgacttttgaggcagggagaacaatgggacacctgtgagtacgtccactgagaagataagaaaggaattatgtcgccaggaggtgtggtttagtgtccatggagaagtgagatgctatcacacaagaaaatcagtgccagacggtgacaaaacagtcagtcactgtagattctagagctgggcagggatgtggtgaaaaaaatctttagaacgtgggtccacattcctcacataggttggaatgaatgaaaggcagaaaaaccgggaatacaagtacagtagtaatggcaattaaaaacacaaagttatattttaaagaaataacctgtagggacttgataagttagacactgagtcaggagaagtaggagatattgtcaatgagtctcaggttttgaatatcactggtgagaggaatattatgacagtgagagaaatgaaattgggaggaatgtgtgggctgggaggagaagataattaacttaaccttaaatatatttggttggatatcagcaggatgtccaaagtgggctgtcctgtaggctgcaggaggtaaagtgggatgtgcagtctacatttgggagccattagcccaagataatcattgcagctgtagaagtcaatgaattgcagcttaatatgatgtgaaatagaagtgcttaggaccttgttagccttaggggtggccccagaaggaggtgaaatctacagtgggagaaagaggtgtgaagggagtcattcaatgtcaagggttccaaggaggcaatgactaaatatcaaaggaatcaaaagaatctctggatcttgctccacagaagttaatattggtcttggacagaacatcccacatagatactgtgcaggagaatgatgaaggataggacagggtgctgtgcaaaagaacatggggaaagcccaagtttagctgatggcagtgtttgagccaggacaggtgaattgcggaggtctgagagccagatgccatgtccagggagaaatgagaggaagaaaagagggatatagactgaagttcagtgaaaagtcatttgaggaaaatagggaggggaagctttgggggtgaggcatgtggcacactgggaggggcttggcacacagcagaggttcagcaccaagacccaggctctctgatggaccagacgctagcttcctacccttactcacttcatcacaatctatcagaacccaggcggagggagccgaataggggagcctttgggaaagacactgtacattttggctgtgccagaatgggaggtttctagggcccatgggatccagctggactggaccagcattgaatttcttccagctctttgagctgacactgacccagagtgggagtcatcagcttgctatccaccttcacccagggccctccactttgttgccccacctagatctgggcacagctaccacactgcccactgtcctgctgctacaaccaaagaagccccagtggtttggccaaggggagcccatcatcaagtgggcttgcattgaggccatgatgctgttgagttatctgtactgggggattgtctagtcctttaggactcaaagtgctggccaggaggaaccagcagcattgacatcacctggttgcatatttgaaatgtacagtctcaggccccaccccaggcctgaaaaaccagaatctgttattttaacaagaactgcaggtggtttatatatttattaataagtgtgaagaatggaatgaaagtacaccagttcccaagcagcatggctgattgctggaatcactccaagtcctactgaattagaaccttcggcccaggaaatagtaattatacagagtcccccaggtgatgcagatgggcaggcacatttaggagccaatgactttaactgaacacttcatttaaaaaatgttgaaacttacttgatactacaaaggaaattcatgttcattataggaaaactgttgatatgtttagaacattactcataaagccataggtaagtggtgcaacaacacgagtaacatttctatgtatgtgtctctatgtgtggatttaaatagaattacagtgtacacttgatttataatctgcatttttcacctaatatattttgaaaatttttatgtcctaaaacaagcttctataatatcatctttaacaaacacatacatccttattgattgaatttcgctataatccgcttagacaatcacctattactgaaaattcagacttttttcaacttcttgctattgtaaaaaattatgcagtgaacatttttgtaagtaaacatttgggcaatccgttatttttcctaagagtaagggaaacacatgcaatcacaaagtatacagaatgctttaagactttcattcacagcaccaacatccctccagaatttgcacttgttagtccctattatccttcactctaagtctcaaagtcataccccaaggcctggggacagaaaatgacttgtccaaagtgacagtgacagacccagtactaaaagccaccttggctacagccctgtttctggaacttgagagctgaggtggttggaagccgtatcctcagcacccacctgttccttctcacctgcctccccagggtccctcagcatctctctattcctccctgagccctattactttcttccacctgccttcttcctttctcttctctcattttctgctttcttatattttttcttctctattcccttcttatttggtgagaatcagatctactcggtaaacctcagccctagtcatacttgcgttactttcctgagctaatttccaactcctgattagctctgggtttatttccatgctaaattctggactggcctttccaatgggtgttcattttagggaagagctctaggacaggataacccatcgggaaggagcagagtcatgtgaggctgtgtggcctggcatttatacagggccactatcttcactgtgccattttccatctggaacagaatgggggagtttggatgggctgttttcggcagtcttggccaagcacttctagtcactaggaatgatgttttccaactctctggggagaccccaccagcctcactgctgctggagaccccttctagttgtgctctcttctttcactctgggctctagttatctaacccttggctagttatgggggcgggggtgtggtgccctgttggccaacagggcagtgggactgggtttgagctgggcttatcctccaactgtgagggaggctacagcacactccaccccactctcagggctgggaattgttgtggctcagctatttgggggaatctgttttccagtttctcagaaccagcgcaagcacacacatcccaggctcacacccctggtggctggacttgctcccggatagcctcagtcagggagaggcagagctgcctggagcctgctgggctggtggaagccttggtggattctggcaggccaattatagacgaatggcctggggaacccgtgcagcccttggctgagtggttctaagccccagcacgtctgcctctggcttcacccagcctccttttctaactgcccttctctcctccccatcagtgaggaccagacaccactgattgcaggaatgtgttccctccccatggcaagatactacatgtaagttgtcctggcatgtccctgctttccaagccagggggtcagggtgggaagaggaaaggaatgctgagtcagaggatgaggctccttctcaccttagaaattgcaagtgccccataattaagcttcatcatcaccacagtagcaacagctctttcctgaacgtctgcaagatgccagccaatctactgcctcatctctgttccaaaaagtctgtaagtggagtgttattaaacccattttacagatctggaagctgaggctcaaagagggtaaataacttcccccatgtcacacagctaccaaaaggcagagccaggaatcagacttcatgtcctctgtgctgctccatccgcctctctgaaatgtcagaaagttttgaatctcaatgacagcatcttgatggtggtccctgtggcctttactcccagtgtgggcttctaacacttacttacatttcatctcatttgagatttgcatccttccttatcttttactactttgttgtctgtgattttgtcataagctcctttcaggaaggaggtgaggcataagaaaaatcaaagaggactctgggatgcatttcctctgcccctcccatggaccctgtaatgtccagggctgtgtcctggacaaggtgggtggggagcagtcctggtctcaaggaggtgacagcctggctgggaagcaagacacatacataggaagcacataaatgacaaagcagatgtcagcacttcagggcatctaatctgggttctggtctccaaatagaatgctgctggcatgtgagttgtcacatctgggttgtcaaggtggcaaggggaatgccagataacacgcccaggatctttccggaagtttatttttattgtacaagtgaacctgctttaaatatgtacagtcattagctaagggtattatcgttagctgttattgagatagaaaaatcccctggaggtggtggaatttgtccagaggttctgccctaaaaggttaatgagagctctccagccctgacagcagctgacaggcatctttgaaaccaactaggtgactgagctaataccctgcatgactttgaagcctttaaaatatctgaaaagcaaatcacacttcagtatacactcaatctctgtactaaagagaataaacatttataaacaattagggcaggcccaaaaaatttaagataaggtccactgtatcccaaagtcatctgagcctcactaagaaatttctcaggaagccaggaacattttctttacccctctgtcagagggcattggctctccgttctcctctgaaggcctccccaagccatgagaaggcaggaagcacagcctctgaaaagcaagaacacaggagaccttccttgctttaaggctggcctggtctttacctgctcttgggagtgaccattcccctcttaccacctgtgaaggagagaaaatcgcccaaatgctcaaggtggtgattcagagcatggaagtggaagggcttgggggccagtggtgcataaagggaatgggccatcagcactgtcatactgtttcagaattaaatatgcagaccagaaggctctatacacaagagatggccagctgctggtgggagatcctgttgcagacaactgctgtgcaggtgagcttctggggcctccaccccatgctccatctgccataggccctcccttctcttcttccctttcctccccagcagagggtcagcagctgcccccagtgacagtgagaagggccagagagcagctgtggcctctcctagcgaggggacatgactcctgcagaagtcctggctcaccgtccagtctgcatgcagggccaggccaggtgtgcccatgtccagttccttcctgcctgagcctttacctgccaagagcctgcaacatggggttcccttgtcccttgactcttctctctcttccctcctagagaagatctgcatacttcctaacagaggcttggcccgcaccaaggtccccattttcctggggatccagggagggagccgctgcctggcatgtgtggagacagaagaggggccttccctacagctggaggtgagaggcctctccccattctaggggacactgcagacctggcctgacccctgggatgctctggcatctttgtgcctatctgtggattcccagccaggtccacatgtcctacttcctcaggtttccaccatctccctctgcacctagcaccaagacccttgccctctagaatctgcagaaggcagtcccttgggtaaaaaccagccctgtcaggtccttttttggccaagccccagaggcctccagggctaacacctccatcagcactctcattctgcagccatccaccttgcccccacaggatgtgaacattgaggaactgtacaaaggtggtgaagaggccacacgcttcaccttcttccagagcagctcaggctccgccttcaggcttgaggctgctgcctggcctggctggttcctgtgtggcccggcagagccccagcagccagtacagctcaccaaggagagtgagccctcagcccgtaccaagttttactttgaacagagctggtagggagacaggaaactgcgttttagccttgtgcccccaaaccaagctcatcctgctcagggtctatggtaggcagaataatgtcccccgaaatatgtccacatcctaatcccaagatctgtgcatatgttaccatacatgtccaaagaggttttgcaaatgtgattatgttaaggatcttgaaatgaggagacaatcctgggttatccttgtgggctcagtttaatcacaagaaggaggcaggaagggagagtcagagagagaatggaagataccatgcttctaattttgaagatggagtgaggggccttgagccaacaaatgcaggtgtttttagaaggtggaaaagccaagggaacggattctcctctagagtctccggaaggaacacagctcttgacacatggatttcagctcagtgacacccatttcagacttctgacctccacaactataaaataataaacttgtgttattgtaaacctctaagtttgtggtaacttgctatagcagccatagaaaactactacagagccttattcgaccctgtgtccagtgtttgatgcaagagacttggtgagttcttagaaggctacctgcagcttctcctccagtccatctgctatggagcctctagaaacaaccaagaagccccaggcagaactcagtgtcctctgcacagggacaaagccctgggctgcttacaacttaaattctagctcaagtcttgtgattttctaccagatacttcacagtgaatccacaattccgtggttgactgttggtacagtccgctatctgccaggtgcttaagtagtagcaagggccagacaatatgtgtgtcctggatgtgttgagtttaaggttacagtggagtctctaagttgaggtgatttgatatagctgggagtacagggctggaattcagctgagagtttgcaattggaattcatactcatcctcagagctcaaacgcttctctgtttcatggaaaatatttgactgggatcaagctagagcagaaagcccatggtatcaggactcagagaaggcacaggctgctggcgctgtccctctgttgtataactacttaacattcacctagcgtgttctgagttccaaccatggggcagcaattttaagaacattctgttgtcatcctcagaatgactcttcaaggcaagcattttcacctccatttgacagatgaggaaactggactaagagaagtgaaataacttgctgaaggtcatatgggctatcagtgttggagctcaagataaaacttggtgcagctgacctcaatgccattttgcaaatttttattccacttaaggagctgaggatagaatggtgaataaaaccaaacttccttgtagctgataattgaaagggagaaacactaaacaagcaaataaacaaacaagaaaacagaaagggcacttttcatgattagaaggtgagggcagcaggtattcaatggaaatattagatgggggggtcaggggaggttttttttttttgttgttgttgttgtttttttacttttttgaagaggtaacatctgcactgaggttatggacaggaaggaactgtgactagaaataatcaaggcaaaagagtagcaaatgtgttggccctgagacagaaaggagctggtatgttcaagtaacagtagaaggctggggtgggggctggagcctggagagcaagggaggagtaggcagtgagcaagaccagcagggttgggtcatgtgtggccttgaaggcaaagtacaggcttccaagtattaagtgtgacgggagctacacgataggctctgataatgtttaggttctttctctgagctgcctctccacagcctgtatgtgccccgggaaattgatcacctggctggcccattataactatgtgtttacatggtgggactcaattttatgtcagctgtggccagaacagctgctggtaaatgcagaagaggctgagtaaatgcaaaatcttaaacaagttaatggataatcacacttgattcctattcctcctcctcctcgtcggcctacttctgctacttctgcgtcttcttcgtctacatcatcttcgtcctctcctcctcctcattctacgtcgcttcgtcatcatcgtcctccgtcttctcattctcctcctcctcctccttctcctcctcctcctcctcctcctcaggacagggtcttgctctatcacccaggctggagtacagtggtgcaatcatggctcactgcagccttgacctcctggatcaagccattctctgcctcagcctcttgagtagctgggaccacaggcatgcatcaccatgcccagctaggttttttttaattttttgtagagactggctctcgtcatgttgcccaggctggtcttgaactcctgggctcaggtgatcttcccacctcagccacccaaagtgttgggattacaggtgtgagctgctacatctggccaatcacttggttcttatgggacattcatcatactgtgtgagaagagctatggtaccaggtagagacaccattgtagcctagaggtggagctggcagggagggctgggcagggcttcacagaagaaagagcatataatctgggcctcagagaaaaagcaggtgttttccaggcagagaacgcagggatgggcatcccaggcagaaaaactgctcaggaaggtgtgatgatggagaagagctcccagcacatctgaggtgagtcatcaatgtggctgggacccagggcttggactgaggagtggctgcaaattcacatgagaagatgggtggctcctgattgctaatgccttgtgaaggagtttttatctgggaggccccaaggaatcatccaggtatttcaggcaggacccagattttaatcctgggcccctcagatcagcactgggccaacacagatgctactgggtcctcagctcttctcagccaccccctccctccccttctccctccctgacttctgtttagcactgccccggggtcagcttccatgctgtgatttcacagtcagcctgacccctgcttcatcttccctgaccagttcatcaccttcatgcatgtgttgaaagacaaactttggcatattaaaattttaaggagtttatttgagcagagaatgattcatgaatcacaaggtgccaaattgcaagtgattcagggctccacccaggggctaccggaaaaccatttataagttgttcaggaagcaaaaggaagaaaaaaattcattggttaagtggaaaatccttagttgcaggttagtcggcggttcctgattggctaagcttaagtttcgttttcttagtcaatgaccattcactctgggttgggttttagtttacttaggcaggaacccaacacgctggagtcatctcagcctaataccttcccaattaattattttaacacatggtaactcatttctgctggcccttcccttgtgaactgtgcccatggaccacccaggcaaatgcaggcctcctcctacttactagtggtgctgttccaagttgaatcatgttctctatataactaaaaaaaattttcacatgtaaaatatgccaattctctaacagtgcacagaagaggaagaggacataaagacttagaagacatgtctctatgactgaaggacacatagtgcagatgggaaaaccagaccttgtgaataaaagctcatatttattgactgcaagacactccaaatagcacttagaatcaaattctgcaggactgtggtagaaatagtgatgggactttctggcactagggtttaaaagtaaggaatggaggcaatttctgacaggtgcagttcagcgatgccaagagtattcttctcccacgccccaaggctcattccttaaattccttctcctccctagaaaccacaccaaagtcttcactccaaaacctaaccaggctagagggttattattatgtgaattctagggagaggtacactttaggtcttatccactatttacatctcagaatgaactggtaggtccagagagagagcaaacaggcaattaaacacagtgtggccagctttcggtcaggtagcaccaggagcagggtgggtggggagggtgaatgtgtgtgtctgtatgtgcatgacgtgtccatgtatgtgtatgtgtgtgctgtgtgtgcatacgtgcttacaagagactccagatgtaggcagcagttgattcacagggggcctagtctttgttccaagaagctatggaacaacttcacacaagagggcgatgaacccagggtctcctataacctgtgtttcctaagtcattccaccaggattcagaatctagtcactcttccctttgacccaaattttcatctcgcgatcctaggcccacctctcgcatcacaatagcccctaggaataccggctcaaaacattgtacagaaaactccgcaggacacacaactcatgtcagttctagggaaatctaaactcagatttaaggaggaaacagtaaaagtgaaggaaaatgcagacaactttaatggatactaacttttccttgatataattctctaaaatatacagctacttcataaatgaacttgacagaaacaagtgtaatgaatataaacagtaaagttaacatcttggactgaagcactggcattcggtttacctgaccttatttctggttggattttacatttgcataactaaaagggttcaccagaattctaccaaaacacagtctatccccagagcagattccaatctccgccctcaaaggcacagactccacgctatctagaggcttgatccccctgcccatttctgaggctgggagcctgcagtgtggcctttgggctaaagatggcgacagagatcaatgttggcgctgcctttttggggctaggttctgaatgagctctaacatttaattcttcaaatacttagcagctactgtgtgtcagcccttgtgcctcaaatccccgcctcacttacagtagatgcatccttccacgcaatgcgtgagagtagaactggatcctgtgatgacttcaggaagtccgggtgtccattctgttgggtaacaatttttgttagctcccccttgtcacgagggacacagcccctgctctctaggagtttggagcttaggagggaaggtagatattagacacatactcatttcgacatttttcccacctatgtgaaggagcatcacacgaatgcttgatcccttctccccatgacagagacgttgctgtgaatctgtctcctgtacactcattccctccaattcccttggatgttcttgcccaggctctggtcacagaattgggtgacaaaggatgctgggagccttgagttctagcagaggctcttccatactggaatatttctcacagacattttctgaaggtccatagtcacaggacccatgatacaaaaaatagcactggttatgtaagtttgtctgcataaaggacagcagacgtaggtatcagctagttatgcattttgtagactggttccagtgcacacattccaatgagtgctcataggtttatgtgagaaaatgtgttatttttgataccttcttccacatgcctctccctgttcacaccctctgcttcagacactggtctcctcacaattctccaaagacacactctaggcacgatgctactccagagctccagcagtagccttgtgttttgaacacttgttccccaattacctgcctggcttgtttcctcagtgaggcctacgctggttacccccgtgaaaactgcaatatgcaccccctcaaatctcagcacccttagattacctatggtactatcacattctaatacactctataatttattttttatttactgtactttttttcctttatcctccactagaatgcaagatccacgggcagaggattttctttttgccttgtttatgtattaccagcatgtacaagcatttatgacgtgtcaagcactcagcaacatttgctgaatgaagaaaagaactcaaataggattcccaaaagggtcctacttagaggtcatgctctgcagagactagcaccagggcccctgtccagatttattaggaaagactgtggcatcaggtgggagtagtgggaagagggtctagtctccagaaggagggctggtgaggggtggacaggatatcagggtttccagtcaatatctgaatcactttgcatggtgtctcagttatctattgctgagtaacgaaccaacccacaatgcagtgatttaaaacatcagtgattcattattccttctgattctgtgagttgactaggtggttcctctgctgatcttgccagggctctgttgcactcagctggaggctcaactcagctggaaagtccaagatagtctctcccatgtctggctgttggtgctggctgttggttgggggccttggctattcatgtgtcctcccatcctccagtaaactggaatgactttcttacatggctatcttagtgttgcttctcaaaaagggaaaggtagaagctgcaaatgctcttgaggcctagggtccaaaactcacatttgtcaggaaggactgtggcagtgggtgggagtagtggagaaagggtctagtccccagaagtggagctggtgagggtggatgggatactggggctcccagccaatgtcagaagcactttgtcataacctgcctcatgttattcactcctagcatagcctgttggtctaagcaagtcccaaggccagccctgatttatggagacgtgggtagagaaatggattcttcctctgaaggggaagatctgcaaagaatctgtgcccaaagtcactgtaaacaaatggaagaggagggggtaaagcacaggctgactgattcgtgaatgtgcactcctgaccatcatgctatgctgcctccatgagaaactctgacatggctgtgtagccagcaattcattcattcattctttcatcaaatgttactgaccacctgcaatgttcaagtgcagaactgggcagggggcatacagaattgaatggggtccaagatttggtgctcctaaggaagatgagaaagccagccttagccaagctctctcaaatcttcttcatcttgctctgtggttttaatgctaactaggaacccaagggagagggtcagcccttggaatgtcttccagaggaaggtgaagcccagctggagtcccagtctgtggcaagtaaactgggagaagcaaggacaggcttaaggcttagcttctgtgccaggggctatgtgtaaggtttgacttcctagccttctcaggttcacacactactcctcattccttcatgccctcccaagccctgaattcaatgttgggcaacagtgagagcttaatcaatggctttgaatgattcttaggcaagctgagaggaatatcaacaaatgttttatccgatattcccaagagtagcctgacccaaatccaagattatctccatggcctgcccctttacatcaactcagaggatgctgctgacattatatatttgcatgcttactatgttaaaaatgtactgtcaggaaaccagaggctctcaaattatcttaaccacttatatcaggatcagctgaaatgctagttaaaaatgaagatttctgggactctaccccttactggctaatacaaaattgcaaaattgtggagctgagcctagaaagctgaatttctaggcagcctgtgggttattcttatgaagagtctgaggatctccagcctctacagaacgtcacttcttccacgtccatttctgccactgatgctgaataggcagaatccctccttactaccaccacctgtaacatgtgcttgtcacatgagttaaaaataaagccccctgttgtaagtcgcaagtcagacccacagaatttagatcccaatcagggaacgtgacgcttggtacgtttatgttcttatgacaaaaaagggaataactaaaacaggaagttgaaaatcaaactttgactttcctatatggaaccatgcgccaaattctgaccctctctgtcactctctgctcgtgtgcgttagtcataggaggtcatggaaaatcatcctcattcctcattatgagaggctgctcatcagtcattacccctacaccctggcggggaggcaaagtaggtgaccacgcatgcaaattcagggaagtttggctcagagagttcacatcccctcctaacacaagagacagagacaccaaaggtttggaatccagtaggggtgggagatgctttgcccagggctgtctagtatggagttaagaatatgttttttgggggtgagtgttcaaggtagatgatgcttccttccctgttctggaggttgggtcctcttccataaggtgttgtcctttggtacagctttgttgtaccatatagatggtaccttctgggcctggacaatcacttgaccaaagggatgggagctcttgctctgaagagatcctgacaagagaatataggtgtggcagagcccattcctactccctgcacaccctgctggcagtaggtagacatttacccctttatcggtgttcttatatggcaccagactgtgagctcctaaggggatggggccttggcatttttatttctagatagagtcttgcctcacaaaaggacagagatacagtctaagaaatgtgtcattaggcgattttgttgtgtgaatatcacagagtgtacttacacaaacctagatggtacagcctactacacacctagactatatggtataacctcttgcccctaggctataatcccgtacaacatgtgactgtactgaatactgcaggcaactgtaacatgatggtaatgatgtgtatatttaaacatatgcaagcatagaaaaatatagtaaaaatatgatattataatcttacagggccaccgttgtgtagacagttcatcgttgagtgaaacttcattatgtagcacgtgattgttctcataaatgaacatgaaatgattgggccaccttatatagaaatgcagggtttccactgtgtaactctagagggcaccactcacatgttgatatcatagaattgaatatttactataacaatattatgacagttggctataaagtgccttgtactaaaaaaaaaaaaaggccagcatttctaataactttctaactgatgggaataaaatcagaacaggcagcctgttgctaatccactccaaggagccacaagttgttaaagcaaagagcacagccagatcaggaaatccattaaggcaagctacaagccgggtctttatcaggagggcaatatggagtcaccatggatgatttcaagcaggggagtgacacgatcagattgacctcctaaaatagttgcttctggctgccaactggagcatggattattggcacagccactcaagtggtttccttcaagaattgttagacactcatcatctctcaactgcaggagatttgagagaagttaatagatttaaggcatctttgggaggtagagttaatagattttggtggtttattgtaggcagagtgagagagtcattgtgaaggtttcttgttttggtgtctattggtaggtgtctctactaatgagtggtggttctattgatgggtggtgattctattcactgacataagcaatgctggaaaagaaagtggtagtttgggagcagagagtgtggaaatcataagctctgcttttgcctatgttgaattttgaggtgtatgtgagcatccaggtaaaggatttcagtgggcagttacatatgcagatatggagtgcaggagagaaatttggaatggagatataaatttcagagttttcagcacaaagaagatgaacttatgaggtgaatgaaatgaagtagagaggttagtttaagagaggagatggcccaggagagagagatatttgagaggcaggcagaagatgaaaagccttctatggaggtttagaaggagaggacctggagaggcagaaggaaaatcaggagaagtggaatcatggaagtctatataagagggctttagggcgagagccagcagtgtcggatgctaacagtagatcaagtccagaaaagtttgaaaagtgtccactggatctaggagctaaaaactccagagtgccttcagaagagtgattgtgcaaaagtgaagatgaagggtcttcaggagtgagtggaaagtgagaacacagagacagtgagtagggagaattattttaataactttggctgtgaaggggaggagaaagagaagggtgtagctagagggagtcatggggctaaggaaagaaactgtcaagatgtggcaggtttaaacaagtgtgaaagctgataggaaggaaggagccagtgaaggacaggttggaaaaaacagggcgaggttacagtatgagtacatgcatgagctctcgagcaaacctgcctggattcaaatttccactctgttatttctcatcagagaaaatagaatgaaattgatgtactcaaattactgaaaaaattataagtgtaggagagtcatgcttttcttattttctaatgaatccgggagcaaagaaaaatgtcagtgtctggctgggcgcagtggatcacacctgtaatcccagcactttgggaggctgaggcggtctggtcacctgaggtcaggagttcgagaccagcctggccatgttggtgaaaccccgtctctattaaaaataaaaagttagctgtgtatggtggcatgcacctgtagtcccagctactagggaggcagatgcagggagaatcacttgaacccaggaggcagaggttgtagtgagctgagatacatgccactgcaccccagacctgggtgacagagcaagacaccatctcaaaaaaaaaaaaaaaaaaaaaaaaggctgggcacggtggctcacacctgataatccacagcactgatgggaggccgaggtgggcagatcatctgaggtggggatttcgagaccagcctgaccaacatggagaaaccctgtctctactaaaaatacaaaattaggtgggcacgttggcacatgcctgtaatcacagctactcaggaggctgaggcaggagaattactgtgagctgggcaggtggagattgcagtgagccgagatcatgccattgcgactccaacctggacaacaagagcaacaactctgtctcaaaaaaaaaaagtgtcagtctaccttctttagaagttagcaataaaatcttttcagtatttatgaccattaaaaatttatatcattcaaaatcatgaaaatacctttcttcagtattatttccattgtatctatttatctatgtttcatgtatctattgctgtggaataaaccacccttaaacttaatggcttaaaaatagaaatcatttaatctgcgctcgcttcggcagcacatatactaaaattggaacaatacagagaggtttagcatggcccctgcacaagtgatggcatgcaaattcataaaccgctccataagaaataacttttttttttttacaaaagaaaatacctattctcctgttgtgactctgtaattgggcaggattcaagtggggacatgagggacatcttgtcattcactccacgtcaagcatcaactgagaggagtctaagggtgggaactggactggtcagatgactgccttactcacaggtctggagattgatgctggatctctgctgggacctcagcgggactgttggccaaaccacctttgcttggcctcttcatgacacctgggcttccccacaatatggcaactgggtttcaagagtaagggctaggagagagagagagtcaggcagaaactatataacttttgatgacttcgcttcagaagtcattcagcataacttttgcctcgttctattcactaatgtcagtctgcattcaaagggaggaaaatcatactccacttcttaatgagaaaagtctcaaagaattcatgggcatgttttaaaatcagaacagcaacaagttgccaattaagataacaaattacaggtttcattttcagggttgtttctacagtactttgaaacattttctgaaatcttcagtgtcttacactgattaataaacataaggaatgtacgttcataatatatccctcttttgttcaaatctttgcaatgacatatttattttaactaggaacagaaaagttggagatggcagccaggtgcagtggctcatgcctgtaaccccagcacttcgggaggccaaggcgggtggatcacgaggtcaggagctcgagactagcctggccaacatggcaaaacactgtgtctactaaatatacaaaaattaacagggcttggtgtcatgttcctgtaatcccaactactcgggaggctgaggcttaagaatcacttgaacctgggaggcgaagtttgagccgagatcgtgccactgcactccagctgggcaataggatgaaactccgtctcaaaaaaaaaaaaaaaaaaaaaagaaaaacagaaaagttggtgacagcagtgggtatttgtacaggtctttataatgcacagaaaaaaagtgctagtcttgcggctgttctcagtttaatgcctcccagatgaattctttgaaaaagtttatgttgcaaaaccactgaagctgtgagggagtgggggcacctgtatcagagaactttttgtttgtttgttaattctgaagactagaagcactataagcgatattatttgtatgataagcaacagctcaggcctttgggctcttaagattttctcagccgaaatgaaataagaacgaaaagcagtttcatttaataatagtgggataaagaatatagagcatttttcttcccctttgtgtaaacatggttaagtaaagtgggtgtaacagtaataagaaccaccacttcacaggcttctatggggaagactgggttcactcatgcactccaagcccttagcacagagccaggcacactgaggtatgactaagtgactgaggatgactgatgatgtgagagccttgaggagcctgaatgggacacaaagcaaatgcagagggactggccttgggtaagagtgggctcctgcttctattgaatgagagagaagagagaaagcataaagaaagtttcaataggttttaatgtgggctaatggggaactgagaaagtgtccttctcctagcttctattactttgctataagtgaggaaaaaggagatgggctaggagattgaagtcagtggagtaggctggaaatattttctgtggagatgggtcagccagctcattatagaaacatgaaaggtttgctaagcaaacatggggccagttagttttggatatcatcagtgtggggcagtggctttgggttagtctgggagggtggaccttggacagatccagagctttccacacagtgcaatgggagggcaaaggagccaaacagtggagaatattgatgaaagaatggtccaagtgagcaactgaaggaagtgaagacctccaaggaggaggtggtagagcaaatttgagcaggttaaaggatggaaggtttctgtgtggttgaaatgcctgagcaatgggaataatgaagaatgagaaagagagagagagagaacaagactgctatcggttgtggtcagagggtagtatagtaatttttacagaaaggtcatggtgttagtcatccaaatggacattaagaccccttggggattaggacaaagaagagagctaggttccagtgacaaatatttaataaataggggagaatgactaggcagtcagtagctgaaagctacaaagagagatataggatggtaaaaacgttaaaggactgatgcttttgtttgtttttgtttttgttttgttttacaaaggctggagaagtcacaatctgaaaatgtcagtagagagatgaccccatgctggccctgtgatatccagatggtaggggcatgagcttcttctccttgagaaagatgcagggcaaacatggtcccagaggatagccaggtctccgccaaggcacaaattgagaaaacagttagaaaagagaatggaaaaaaatagataggtttattcatttaaaaagtaactatcaagcacctgctctgtgcatgatactgttttgggcgttgagatgcatctgtgaataacacatagtaaggaatttacattctagcggtaggagacagagaataaatgcctgagcaaatacatactcaatataaatttggatagtgatacaggctgtgcagaaaaaatatctgctattagatgaacagtgaaggtgagcagagaaagtggaggtttgctacaaattgtgttctccaaaggaaatggagagtgctgtgggagttgtgttgacagtaaccctagatagattttattgtattaatgcttgctagaataaatagctctactgaatagcagatggaggaaagcacactgggctttgcaaatcatcactgtgatgcatgtaattttgcagcactgccagggtttctcacagcaactcattcccattgtggccccttagggaaagctgtgaccagtgcaagatctctcctacctgcatgacctcagggccagcaacagacaattgcaactcctgcccacagactccatgggtcagggaaccactggaaagcaaagcagacacttgctgtatcagggttggaggaagcctttgaggccctttgcatgcagctcagagaggaatggcattctcaggttgagcaaagggaagtggctagcacttcagacatgacactcattgaagcttggaggagacttttttagggcaaagaaagggaagttttatttcactcatggttagtaaacataagacatgtacattcttaatacatctccaaataacattagaggaagaccaggaacaatgctgaggggatagagctataaccgactggggtgagaagtgggggcatttgggaagggtgagaagtgggggcatttgggaaagagtcctcattccaagtggcctcaaggtcagtatctgggctcctgtgattctctctgatgctctgattggccactgcattggaaatgccactcaggctcagattggtgccctccttgtgtgttttttctttatcacatatcctacagtccactttcctgattctctcctaacatgtgcctcttcttgagatcaagaggaagatattattttctagttacagttaaagtttttcctttttaaaatgaccaaattaattcattgatacctcatttattcccaccttttgagctctcattatattcaagacactattgtaaaaaatggagacttaaagataaaaataatgttataattcacccagcaggaagaagagataatttttttgaatgacgctacaaaataatgtaaatgttgggtttccctttactccacattctctccttcaggcatctccaagcttcaaccataactgacagatctttatctttagtgcatttttctcttctagcttccaggtttgtacatccagtttccaactggacactccatttagcatcccatctgcatctcaaacacaacacaactcaaatggaattaaccgtctccctgactacccttagaatcaatctgttcctccacctcttgtatcatctttctcaatgaatgatgctattgctgcccgccagttatctaagcctttaaataataatacccttgatcccttctacattcaatagtcacttcccatatttagtagttactaggtcctattgagtctacctcctaaacatttctagggttttctctccatcctcacggtcagcactgtgggttagactcttgtctccttatctgtaggtcactgaacaacctcccagctagtctccttaccacaaagtcttgcctccattttttttttgttttgttttgtttaggagcagaggtttaataggaaaaaggaagagaaaggagaatggctctctcttgcgagacagaggggctcccaaatgggaattcccagtcttgctttgttctaaagcaggtccacattgctacatagggatggcaccctgccttttcttcaatggctccccacatgtttgtagcacagaaaaggctcctcagattctgggccttgccaatcttcaggtcatttctccattgcccttccggattcttgtacatgcagcaaatttaataacagccattatgattatgaggttcttaaagattctccaggatgctgtcatctctcacaagttctgtctttgcacagaacttgtatctcaacttctgtttggaaaatccttcctcttctacttccctggttaattttctcacatttcagagatcagctgaaaactcaacccctcttggaaaccatgtgtagctctgcagctttttctcagcagccacgagacactggatcgcccccagcataacacttgccaaatggcatgttaattgtgagcctcttccatgaatctgtaggtagttcaagggcagaactgtgccctgtgtgtttgtatctccagtgactgacttgtactggatactcaataaatgtgtgttaaatgaatacatgaaaaaagggagaaagaatgaaaggaagaaagggaagaaagaagaaaggaaaagaaaaggaagggaagaaggaagggaggaagagggggaggaagagggaaagggagaaaaatgtagactatgggaatgaagaggagcaataactaactttaaatcctatactaaataggcagtacagtcttcaaagaagaggagatgtttgggccaactgttgaggtaaagggaagagttatccaggcagagtaagggcaaggggatttttagacacagccaagaacgcgcacaagcagagaggtatgcaaaagggtgaaatgttggttaatttgttgggattcagtgaaagactataggaagtaccctagctagtttaatgggaaaatgtttccatataaagaatttggttcttacagagtcagctggaggaccacaggaatgggcttttgactggacatccaggaataattcccagagggacactgtaaaactggcttgctggagagccatcatctctgtcacaatcaggaaaatgctgctacactgctggctccagcaacacggcactggggcccagtgcagggatcacacagctgttggctccagaaaaatacggctttacctataatccggagatcagaaagttacctcctgaagcatgctgtgcttgctaaaatatgcagtaaggaaatagatggctctaggtcaggcgtggtggctcacgcctgtaatcccagcactttgggaggccgaggtgggtggatcacctgaggtcgggagttctagaccagcctggccaacatggtgaaaccctgtctctactaaaaatacaaaaatgagccgggcatggtggcagatgcctataatcccagctactcggaggggctgaggcaggagaagcccttgaacctgggaggcaaaggttgcagtgagccaagattgcgctattgcatgccagcatggaggacaagagtgagacttcgtctgaaaaaaaaaaaaagaaaaaagaaaatagatggctctatttaaataatgtattccaaatgtcagtctgccaagaatgcatctgcttggcagaattgaagtcacatctggaactcttgctgtgagagagtctgagaaatgtgggttttagctttccaagcactgcaggaatgagttgggtgggtgctaagagagacattgagtagccaagccaccatctgtactacctcttccatgtcttctgaggtgtaggaaccagaaatggtctgtgtatgtcagtagggataagccagagctctttgtagagtggtttcccctcctgctccccggccatgctggggcactacgcaatttgtgtacctttatccccatggtggaaagttgagccaacactctcacattcttctcaagtgaagcctgtgctccttttctgggtttccaccgtgcagcttagagcccagcttagcatcaccatatctggggacagtgctcatagggtggctgactcacagagactaacttgatactcttctacaagtgaatgtagtacagagtatggggcttggaggagaggtcttgtcccaccatgagccctactcttcaatagctgtgtgaccctggacagactcctgcaatgttctggatcttgtttggtgctttgtgatatcaaaatgctcactcataaagtgagtggtcaggataggagctactgccacaggtaatccaatgccttttgtgtcttgcttcactccctcagattcaaagtcttcagtaagagcatccatgtgacctataagcaaaggctcatgtgcccacactttcctcactatcagggaggaggaagggagtagttggttctttctggttatgaaatggaaggcagagccctgtcttccaccaaaacgagaccagtgtggaattcatccccaaatggaaagcatgtttagttaatgggtagaaaatttaaaagccactacactgcgaatgcctgtataattgcacatatttttaaatagagattgctcacttttgcttcctcctgggcatgacactgatatccatgaaatcataagtttaatggactgtgtatttctattacatcttgaaataaacacataataatactattaaaacacagaaatacatcctgagatctgaaattaatcctgtgtaccaccagtgatatacatcacatactttaggaacccaaatgcaaagtgttgacaacaattagtgtggcaaattaatctttatgggtagatccatgtgcatcagtcaggtctctgtggaacaagcagtggaaatagacttcagactaatttaaacagaaatttatttatttttagaaaaaagtattcaaaaaaaatcaggttagttcccagaattaataggaaagctggataactggcttagaaaatggacagagatcaagggagatttttgtagggggtggggaatgtgccaatgaaagatagagaggggctattcacagaggaaggatcattctgctgtaacattctcttcttcctttaaaacaaatattttttgggtggtgctgggaatgaaaatcattttattttcagcattacttcgtttctgcgtgtgattacatttttttcaataggttgctgggaaacaggcatgtttggttacatgaataagttcttcagtggggagttttgagattttagtgcacccatcacacaagcagtgtacactgtacccgctgtgtagtcttttatccctcattcctcctcccaccctttccccctgagtccccaaagtccattgtatcattcttacgcctttgagtccttacagcttagctcccacttatgagtgatatatatatatatgtatatcacattttctttatcccctcattgattgatgggcttttgggctggcttcatatttttgcaattgtgaattgtgctgctataaacatgcgtgtgcaagtatctttttcatataatgacttcttttcctctggatagatacccaaaagtgggattgctggatcaaagagtagatatatttttagttctttaagaaatcttcacactgttttccatagtggttacaccagtttacgttcccaccaacagtgtaaaagtgttccctttttaccacacccatgccaacatctatttttttttattatggccattcttgtgggaataacttgttattgcattgcggttttgatttgtgtttccctgatagtgatattgaacatttttccataagtttcttggccattcctatatcttcttttgagaattgtctattcatgtccttagcccactttttgatgggtttgtttttttttcttgctgatttgtttgagtttcttgtagattctggatattagtccttttttggatgtatagattgtgaagatttgctctcactctatgggttgtcggtttactctgttgattatttcttttgttgtgcagaagctttttattttaattaagtgccgtttatttgtctttatttttgttgtgtttgcttttgcgttcttggtaatgaagactttgcctaagccaatgtctagaagggtttcccaatgtctagaagggttttctagaatttttatggtttttggtcttagatttaagttcttgatccatcttgagttgatttttgtataagatgagagatgaggatccagtttcatttttctacatgtggcttcccaattatctcagcaccatttgttgaatagggtgtccttttcccactttacgtttttgtttgctttgtcaaagatcagttgactgtaagtatttggctttatttctgggttctctattctgttccattggtctatatgctgatttttataccagtactatgctgttttggtgactatggcctttttttttttttaattaattaatttatttatttattgattgatcattcttgggtgtttctcgcagagggggatttggcagggtcataggacaatagtggagggaaggtcagcagataaacaagtgaacaaaggtctctggttttcctaggcagaggaccctgcggccttccgcagtgtttgtgtccctgggtacttaagattagggagtggtgatgactcttaacgagcttgctgccttcaagcatctgtttaacaaagcacatcttgcaccgcccttaatccatttaaccctgagtggacacagcacatgtttcagagagcacagggttgggggtaaggtcacagatcaacaggatcccaaggcagaataatttttcttagtacagaacaaaacgaaaagtctcccatgtctacctccctctacacagacacggcaaccatccgacttcttaatcttttctccacccttccccgctctctattccacaaaaccgccattgtcatcatggcccgttctcaatgaactgttgggtacacctcccagacggggtggtggccgggcagaggggctcctcacttcccagtaggggcggccgggcagaggtgcccctcacctcccggacggggtggctggctgggtgggggggctgacccccccacctccctcccagacggggcggctggccgggcggggggactatggccttatagtatagtttgaagtcgagtaatgtaatgcttctagatttgctctttttgcttagtcacactttgactatgtgggctcttttttggttccttatgaattttaggattgttttttctagctctgtgaaaatgatggtggcattttgttgggaattgcattgaatttagattgcttttggcagcacggtcattttcacaatactgattctaccatccatgagcatgggatgtgtttccatttgtttgtgtcatctatgatttctttcagcagtgttttgtagttttccttgtagaggtctttcatctccttgggttaagtatattcctaagtatttatttttatttttatttttttgcagctgttgtaaaagggattgagttcttgatttgattctcagcttggttgctgttggtgtatagcagggctgttgattagtgtacactaattttgtatcctgaaagtttgccaaattcatttaccagttctaggaactttctggatgagtctttagggttttctaagtatacagtcatgtcatcagcaaacagcaacagtttgacttcctctttacttgtttggatgtcctttatttctttctcttgtctgatttttctggctaggacttccagtactatgttaaatagaagtggtgaaagtgggcattcttgtcttgttccagttctcaaggggaatgctttcaactttttcctgttcagtataatgttggctgtgggtttgtgatagataacttttattaccttaaggtatgtcccttcgatgccaattttgctgagggttttagatcataaaaggatgctggattttgtcacatgctttttctgcatctattgagatgatcatgtgatttttgtttttaattctttttatgtaatgtgtcacatttattgagttgtgaatgttaaactatccctgcattcctggtatgaaacccatttgatcatggtggattacctttttgatatactgctggattcgattagctagtattttggtgaggatttttgtgtcatgttcatcagggatattggtctatagttttcttttttgttatgtcctttcctagtttggcattagggtgatactggcttcatagaatgatttagtgaggattccctctttctctattttttggaatagtgtcaatagtattgataccaattcttctttgaatgtctgatagaattcagctgtgaatccatctggccctggacttttcttgttgttaccatttccattacaattacttctaactaccacttcaatctcactgcttgttattggtctgttcagagtttctatttcttcctggtttaatctaggagggctgtgtatttccaggaaattatccatctcctataggtattctagtttatgcacatgaaggtgttcatagtaggcttgaatgaccttttgtatttctgtagtattggaatgtttcccatttcatttctaattgagcttatttggatcttctctctttttcttggttaatctcgctaatggtctatcacttttgtttatcttttcaaagaaccagtttttgtttcatttttcttttgtattttttttggtttcaatttcatttagttctgctctgatcttgtcatattaccagaatagcttttctggttccttctcatttgggtagactacgtcagagtgaatatctgggactcaagggctgctgttcagtttcttttgtgcctcggggtgatcccttgatgtgctgctctcctttcccctaaggatggggcttccttagagctgaactgcagtgattgttatttatcttctggacctggccacccagtggagctactgggctctgggctagtactggggagtatctgcagaatcccgtgatatgatccgtcttcaggtctgtcagccatggattccagcacttgctttggtggaggcagcaggggagtgaagtagactctgtgagggttcttgtatttttgttaactgcactgattttgtgttggttggcctccagctaggagttggtgctctcaagaatgcatcagtatacggaggatcaggcagtgggtgagacctactcctggccttaaagctcccaagagattatgtattttgtatttggctgtcagggcgggtagagaaagatcatcaggtaggggcaggattgggtgtgtctgagctcatactctccttgggccaggcttgctaaggcggctatggggtctgggggtgtggttcccaggccaatcgagttctgttcccaggtggattatggctgcctccgctgtgtcacacaggttgctggggtgtggttcccaggccaatcaagttctgttcccaggtggattatggctgcctccgctgtgtcacacaggttgctggggtgtggttcccaggccaatcgagttctgttcccaggtggattatggctgcctccgctgtcacacaggctgctggggtgtggttcccaggccaattgagttctgttcccaggtggattatggctgcctcctctgtgtcacacaggttgctggggtgtggttcccaggccaatcgagttctgttcccaggtggattatggctgcctccgctgtgtcacacaggttgctgggggtgtggttcccaggccaatcgagttctgttcccaggtggattatggctgcctccactgtgtcacacaggttgctggggtgtggttcccaggccaatcgagttctgttcccaggtggattatggctgcctccgctgtgtcacacaggttgctgggaagtaggagaaagctggcagccacaggcctcacccagctcccatgcagcccacagccctaaaggccggtttcactcccaccatgccccaccaacagcaatgagtttacttccaggaagctggtgagcagggctgagaacttgctccaggctacaagcctcccagctgagaaaacgagcgaactcacagttcctcgactgtcccatggagcctgcagtggcaatccgcctccttcaaagggtctgtggactttctcggctttcctggtatgttcctgtggaagttcttggagcaaaagttcacgatgtgggtctccatacactgctctgttcggcctgcagtcccgggctgcaagattagtggctgcgcaccgtatacggcccgttctttccttttgtttcctttaaggcttttcttactcctttcccatttcttttctgtttcttttctttgcaatggcatctagtcctgttggctggctgtggtgcagttgcctcgagatcgtcccccgtgttctccacgtttttttttctatgtatgctagctccgtctcaaaaaaaaaaaaaaaaggctggaaaactggagattattttgaggccaggcgtattcatgtttaggccaacaggtactagctgagccttgtgctagtcacaagagaagcagcaaatgacaaggggaggacaggagtctgtcaggccaagcactggtcccttatggagacaaagaagaatgagccggaccacagctatgaggttgacctaatggtttctcttgcaggcacagtgccattgcatttcctacagggccccacttaggaggcacttctatcactctatcgcacagatgaagaaactgaggctcggagaggttaaggaacttatcccagttagtaagtggtgccgacaagaatcaaatttagacagttctgacagaaagccatgtttgtaatcaccacatattcatgctccttcttagcacagggtggctaaaaagctcaaacaagccaagatttaaataccacaaagaagatccaagtgacctgtgaggaggagactgccagtggatgggcgatcaggaagactttgtaggagaggaaaaatatttttttctcagttctcataagttcttagttggaatgggcagattaataagagaaaaacaagcagatgttaattaacatgtatatttcttatatacatgggagacacccagggaataagtagctttcaaagaggtggctttgaattccagcttatatagtgtcttcaacaaagaacagtaaagttttagagacatgacaagggaattaaaaaggactttgagtctctaagagtagtgacttgtggaaaggcgaaatgtcagataaaggctagtttgtaaagcttgttaatgtagattcccctggtgccatctccagactgataagagtcttaaagttgtcttcgctggttgacctttgtcctctctggtagacgcagtgggggtgaggagtaggggttagggtagcgagggggtttccttccacctgtgggaagaggcattcacattttaagattgggagcaggaggcctgatgtgattacagctgtgatgtaaaaccgacattcaatgatattttaatatctcatacctgtaatctttttaaaaacttgggaaaacaacttataatttttacaagaacattaataaaaataacaagttgcacctactatagccactatttcataaaagaaggccatttttacatttcctctccactcagtgagcatgatctcagaagaaaggactgcctttctcaagaatgaagagttaacaatagcatcccaacatatttaaatatcaagccctgggctctcgattttctaatttaatttagctcatcattaaaactggcactggtctaaggaccaacatgtagaaaccaccgctctgaaagatctggcagtagcatagaaggcagattggagctggggaagagagacttttttattctttttttatttttattttttgagatggagtttctctcttgttacccaggctggagtgcaatggcgtgatcttggctcactgcaacctccacctccccagttcaagtgattctcctgcctcagcctcccaagtagctgggattacaggtgtgcgttatcacacccggctaattttgtatttttagtagagacagggtttctccatgttggtcaggctggtctcgaactcccgaactcaggtgatctgcccacctcggtctcccaaagtgctgggattacaggtgtgagccaccgtgccccgcccgagactttttttcttaaggagattgtcttagtcacctcagactgccataacaaaataccacaggctgggtggcttaaccaacaggaagaatgtatttgctcccagttctggaggctgtgatcaagtctcagatcatccacttgctggctggcagacagctaccttctcactgtggcctttccttggtgtctgtgcaggcacggggacagtgagagctctctggtgtctctacctcttcttataaggacaccaattctattgtgttagggccccacccttatttaacctcaattactttcttataggctctatcttcaaatacagccacactgggagttaggactttgatatgtggattgtggagggattcagttcacacagagctattgcaatggtttggacaagcagctctaattggggaagggggaagcctgtaggcatgggaaggagaggtcaggcgtgtcacgtgcgtctgtgtgaaaagaccaccaaacaggctttgtgtgagcaacaaggctgtttatttcacctgggtgcaggtgggctgagtccgaaagagagtcagcgaagggagatggggtggggaggttttataggatttgggtaggtagtggaaaattacagtcaaagggggtttctctctttgggcaggcgtgggggtcacaaggtgctcagtgggggaggttctgagccaggaaaaggaatttcacaaggttaatcgctcagttaaggtggggcaggaataaatcacaatggtggaatgtcatcagttaaggcaggaactggccattttcacttcttttgtgattcttcacttgcttcaggccatctggatgtatatgtgcaggtcacagggcatacattggcttagcttgggctcagaggcctgacaaggcacagaaggagctgggatagaggtgcaaagtactcatgctgacctgacatcccatgcccacggcagacatgactacttgatcggacaatactttcttggaatcaaagacacaacttcacagtcctcagcatcatagttcaggcagcctgtatcagtagatcagagtgggcacatggcctggtgctatcactccatcctgtgaggggagatgggattggaatggaggtggaggagtcacaggtggtcctgatatcacaggcctgggagtctgaaagaagtgcagtaggtagtattatggccctcaaagacatctgtgtcctactgtctagagtcaattaaagtgttacctaacatagaaaaaaggattttgcaggtgggattaaactaaggatctcaagatagaaagactctcctggagtatccagttgtgtccaatgtaagaacaagcgttctcaaaatagggacacaggagattgaattgcaaaggagatgtgctgataaacggagaggttggagtgatgccgccatgaggcaaggaatgtgggtggcctctagcagctagcaatgattcggaaatggattctcccccagagtccagaaagatcacagcagtgctgacaccttgatttgagcccagtgtcacctctgtcagacttctgccctatagaactgtaagaggataaatttgtgttttaaggcacaaagtttatggtaatttgttatagcagcaatgggaaactaatacaagaagggttgtgttatcaacagaaatacagcaatcagaagaaagatggttggggagagcagagggtggggtgggaaggtgatggattctgtttgggacattctgggtgtcatatgaatattattggggaactgtccatcaaaagctcagacttcaaagaaagaaaggaaggagcaacaatattttgaaagggagaaagtaggtaatattcaatatgtgttgagtacctacaaggtttttagttctttcaccaagttattttatttaatttttatggcatcaaggggtgttttttttttttcttaaaccaaattttctcagttaagcatcccatgtaagtggccaggggttaagagatgtgactaagactagacagagtgattttcatcattacatggtactatggttctactgaagcactgaggaaggaagtcaagagagttcctgagaaatgtctggagtcttagtaacatgcaaagtgaggcagaggtattgtcagtgttagctggtcactttgaaaggttagaggtaaataaagttcagggcaatggtacttggagaggagtgaatctttggtaacctggaggagatgcttctcagaggaaaatttcttcacagcatgaagtcaccagctctaagactagtgggtgttctgggggatgttagcagtgactcactgactgttggcccagtgaggggagggatgaaaggctgggtagtgggtagagaatctgactcctcctgcccccacatgtctattcctgggccttctcttggtgggggcaaaaggtatgcaaagggatttccgcagtgtctgagtgctcccaggagacggaaaagtaactgatgacttggagttggagtcttgttggctcaggcagctggggcgttttgggatttcaacacctccctttagtttctatgtatggtgctgagcaagtagtcaaagactttggtcttgctttaccccagtagcccacaagcctgagtacatggctaacatttattgggcacttagtgtgtgccaaagagctttatgagacaggttctttttgagtcccattatactgataatgggactgataagaaacagaaggtcagaaaggcccagtaacttgggcaaggtcatgtagctagtaagtggtccagctgaaatttaaaaccaggtttatccaactccaaatcccacatctgatttattttgccatgaattaaaacatagttctgattttgagaaactcccagtcccagtgggaaaacagatggaatcacaaattaccataacacagtgtagtgatgtagatataaaaacaaagacatgggaaccctgaaaggaagttgtaacaccaatagaggaatgcatggaggagatctttcagaggaggtagcctcgtagctgggctcaggggtggatgagtttctggctagaagcgcattgtgggtagagggagaacatatatagaaaggcatgaagatggtggacatgtttggaaagagtgagtactagactgatgaacacgatgagtcaggagcttatgacgtcaggggctactgctagcctagctaatgactgaagattctgtgaaaagaaaaccctaacatttccagctgagtactagggccatggtgattatatatcatctctcatgacaacacaaatgtttgggcttacttatcatcctgctcagtaatcattatgtcactcattaaagatgtatcagggtaaattttaggtgagaattgattagaaatgtaaactctatatatgtagttacaggcttcacagtttgccactcaaacaatatggtcatccaatcatgaggcacaaccttctgctcagaacttttttataattgggagaaagtgacatccgagttccatctcttctgagaactgtgcagctcagaaatcttcttcccttttttgatcccccagttgggtgagatgacattaacagtgtgttataagcacttttcatgtttactaccccatattcaaaattaagcatttcaaacaactgtataattgtctataaatgtagcattattagttaattttccttttaacacattgaggttacctctaatgttttgctatttttaactatgttgaaataatcatgtggtttttattctttgaattattttatattgtaatgttccctgaaatgaaattagttgatcaaaagatgagtaatcttttcatgacttttgatacatgtcactcaatcaccttctggaagagttggaacaagagcctattgctggcatcccatttcatagccatctcaccaatgttggaaaatgggcttttcctattttctgctaattcattagttgttaatggcttattttaactattaatcccttgttattgatgaaagttaagcattttctgtatttttattttctgtctaaattctactttttgcacaatttcctttgctcacttcttcactggaatttagtatttttctttccaatttgtatgactccaaaatcagtgataaaataagcaaagggtctttcttagaggctaaacaagggaatgaataaggaacaagaacagcaaagggatagtgaataaagatacaaaataataacttatttttatttttgaagctttccccaggcagtaattcttgacctttttaagattataaattattttgagatatgcattcttatcctcaaaatgaattagtacataaaatttaaatgggttgatagatcccctgaagtgtatccacaaaatgctctcaggttaagcaacattgttctataataactgctttaaccaaaatgtttaattattgcttgtgtttacctgtcctagcaaagagctaattgttaaattttgtgttagagggtcaatattataaataacttaatgtggcctctctttcctttcctttttttgagagttttgaggctatcactaagtgggctttagagtaccaggtgggaatctgacctcactgctcaaactttcaacttcaggcatgaagtggtcccagtgatgtgggaacctcagagtctaaaacaaaaatagtagactgaggccctcagaaaccagacttatcagattcagaatttaatataactatgtttgaaagatttaaagaaaataaatcaaattaaaaagtgagcaagaagcaagaataacaaatgaactggcatatttgagaaagaattttgagcttttagaaataatacatacacttattgaaataaaaactcaagtcaataggtttaaacagcaaaatgaatatagttaaagaaaactattgtgctgaaagatttaaaaaactattacacagaatgcaaaatgatgaaatagggtaatttaatatatggcagatatgttaagacactatgaggatagtatgagaagacctgatagacatctaatcacagcaccttaaggtgaaaatagagagagtgcaccaatattgaggagttaatgtctgagactattccagaactgataaatagatgaatctacagatctcagaaacacagcttttacaaaggataaatgaagagaaattcaccagagatacattgtaatgaatctgtaaatcaccaaagctaaagatattatttcacaagtggaatgacagctgacttctcaacaacaacgaaagcaaggagacagttgaaagacatcttgaaaatggtgagagaaaaactaactgttaatataaaattgtgtacctatcaaaaatatcttttggccaggcgtggtggctcacgcctataatcctagcactttgggaagccaaggaacgtggatcacttgaggtcaggagtttgagaccgtcctggccaacatggtgaaaccccatctctactaaaaatacaaaaaaaaaaaaaaaatagccatgtgtggtggtgtgcacctgtaatcccagctacttgggaggctgaggcaggagaatcgcttgaacccaggaggtagaggttgcagtgagctgagatcatgctgctgcactccagtctgggtgacagagtgagactgcctcaaaaccaaaccaaaccaaaccaaaccaatctttcaagaagtacaccataaagacatttccggataaacagtgaatgagattacttcctaaacgaatatgtaaggatgtttctttttaaaattttttttgggtgtattcatcacctcaagcatttattcttttgtgttgttacaactgataagaatatctaaggatgtttcaaaaggaagaaaaatgatccctaaagtctggtatattagtttcttattagttgctctaagaaattactgcaaacttagtggctttaaaaaacacgaaattatctttcagttctgtaggtcagaaatttaacctcctgatttctggtcagaagtcttactgggctaaaatcagggtatcagcagggctgctggaggctctggagatgatgtttctctaatttctagaggcatttgcattccttagctagtggcttcttcccacatcttcaaagctaacagtggcagtcgagtccttctcttatcttttttttttggggggggttataaattttttttattattattatactttaagttttagggtacatgtgcacaacgtgcaggtttgttacatatgtatacatgtgccacattggtgtgctgcacccattaactcatcatttagcattaggtatatctcctaatgctatccgtcccccctcccccaccccacaacagtccccagtgtgtgatgttcccttcccttctcttatcttatcactctgacctcttctgcctcctttctctacttttaaggacccttgtgattagattgggtccacctaaataatccaggataatctctttattttaagggtagctgattagcaacctcaattccatctgtaaccttaatttcttttttgccatgtaacctaacatagtcacaggcccaagggaataataggatgtgggaattgcgggtggtggagtaggggcattattctgcttaccacaggggaccttggatgtcagtaaaaaatggtgaggaagaaaacaggaaacgtagaataatctaaacaaatctttgaaaaataagttgaaatgtggggttagaaaaagggcagaactaaaatgttaagacaaattaaaatgttaagcctataagttgagagggagatgatcaaggttaaaaatactcataaatcatatttttttgggtagggggttagatatttattaattttagaccctgagaagtaaaatagtcatgacaaaaatttaatagtaaccactaaaacaagagaaacagagtatataacttctaaatcaatatgggaaggggaatggaataagaaaacaatagcaaccaccaacaccccacccaaaataaataataaggtgagagagaaaaagaagcattgaaaaggggctaaaataaaataaaaaattaagtcatgcccgtaatcccagcactttgagaggccaagatgggtggatcacctgaggtcaggagttcgagaccagcctgaccaacatggggaaaccccatctctactaaaaattcaaaattagctgggtgtgggggtgcatgcctgtaatcccagctactctggaggctgaggcaggagaatcgcttgaacccaggaggcagaggttgtggtgagcagagattgtgccattgcattccagcctgggcagcaagagcgaaacgccatctaaaaaaaaaaaaaaaaaattaagatagtaaaacaaatccaaatacattaaagattacaaaaaatgaaaatgaactaaacttcctagttgaaagacatattgtcagattggattttaaaatctggcaatgatatttccaggacacagtcctaaaatattaaacacagaaaagttgaaagtaaagggatggaagaacacagtcaaactaactagaagagagctgggttcacccttttatatcagagcagaatttcactgagaaaacactaacaggaagggggaaaggcacaacatagtgatgaagcacttaattctcaacaaatgtatgacacttctaaactattatgactgcaaaaaaaaaaaaaacctcagcatatataaaattttggaagagccatggctatcagctgacatgcacttaccatatttgcattgtcctactacaaactttacccatatgaccaaggtgctgtcttcatccccattttacagatggggaaatttccccatagagaaaaagatttgggccatgccttggtttcttcttgactctgcttcctgctgattgatcctcacacctcacctggagacctacttcacattatccatcaggatgagaactggtgtgcctttaccaaaggaccacagtcaccttcaaaacgtgtttagatagatctggatggagacttatgtggttgcagatgaaaaaaaagtccccatggtatatctgactccatgtcattcactgcatgaacactcacacacatgcacacgtacacaggcaaacacaatcctgttctggtccggcagtagtgccaacactcaaatcccaggtcctactctgaagcctttgaggaaaccattgtcattctggggtttatgggaatatttcttcttggtgccccttgttcctcacagaagctttttttctgtgctgtgggcttgctatcctagctttccaagctatcctagttttgcaaatttctctgatcaatcacatcaggttcttggatcatcccaaaattaaagaggtacgttttgctgcaagagacaaagacattcacctctcacacagtttgaattcctgggtagaaacagatttcaatgctggccagcctctgtagctcccagtgccccctcaattatgactcccgaggcattggagcaggatcctcaccttgcgcaaagataattaggtgtgctgaagaaagccagacactgctctttcttagctctgcatccttaaaaagttaccactactccttctctttgaatctttgacttgtcaatggtaaagtgcctatgattcttaaagggataaaaacgcaacctatataaagcacctggcatagtgcctggcacaggtgggtgtttaacaaatgttaactcctttctatcccactgtgggtgtccatatcctcttgggtaggctgcctctggtttccattgtgtcatcagagccatactaaatcgatgtgttggacatggatcccaagaactaatttctggaatgagttatgcctaccaacttccctgatacttacttctgtctctccatttatcaaatggaaatgtttgcatttggcctctgccagttggagtaaccaaaaggcttagaggttttggagaggtcctacactgccatctgtttgaccacatactgcctttcacgtgtaataagcattgtttcttacatttgtctaggaattagcagttcacaaagcacattcgcatataagggcttgttttgaattgatcttggcagcaattctatgagacaagtaaaaggtaggtcaagcattataatcctcattttaaatctgggaaaactgaatctcaaaaaggttgaaagacttgtctaggggacagtgtgtgggtaaatgagaagttaagatttgctgaactggcatttcctgactacatatctagtgtttatttatggagaaggcactacggtggccaagtggctcagagtcacacagctctgtgcctcagtttatttgtctgtaaaatgaagataataatatattctgaatactgttgtggaatttcattgagatagttcacataatggcatggatactgtagtacaccgcctagattcacaaccccacgactatccatgagaatggcccatagctcaagaggtcacattctttccccaggtgaagcccgcatccaatgactgctcagtgtgggtatataaaggcctggctcccttgccagtgccaccctacctcctggcgaatggactgaggcttgcattatgactgcattgcagctcaactgttctttccattcagtctttcctttacactcacacaggtgaggacccagccattaaatgcctcacatgatgacctctattgcatgctaggcttcgtgtgcacacacaaaaaccatcctctatcagtcaggccccttacttgcagaggcaaagaggccagtctgggttagatgtgcaccctgtttttacaacagaacgagacaaacaggtcctccttaggtgtaagttcatggccttggccccacccctgaaactcagccatctgagacagttttaggactgaggcaaccccagactttgggttgttgtttgctgggcacagcctccttttgccaatgttgcaatcctttgtaagagaccacaggttgatcacccgttcctgttactgagcacagagaggtttgtaggccagtctctccaggaattctgacgcactgcaaaatcccatggtctgaatgcttctaccttccctgtgaaagcccctggcctcagaaaaggaagctggtttaagtgaccaacatttggggtggagcttccgagggcccagccaccgtgttacatgcaacaatcaacagagatattctttggctagagttgtttttctgggtataggaccctataattaaaatcagctctccaacttcccttcctccaaaaagtatacaatgtaaggaggaaaatgcaaattgaaaagttgctagcccttcccgccagaatgccaccccaagcctcccctgcaggaagttctggagtccccaactctgccccaagcctgaggcccttgataaggtaaagggatgtgagtgtggaggccggagcccccctcgccctgtaggctgctccccttgcttttccctttgaatgttacagtttagttctgtgacttacttataattgcctgaattccccgcccacgctttctcttactttggggcttctcaccgttcctcttcctccatcttcctcctctgaccccactcccaagcctgaatggggtgttcctcttccgtgctcccacaaaaccctgtgcctctttcatcgttgcatatattatgctgtaatgtagttttctggaggtgtgaagactatgaatcctatgaagacaaatacacacctaccttgctgaccgttgtatcctcagaatctaatactgcacttggcacacagtggttgggagtaaatattcatgaggcaaacacacaggaaggactcttttgttatggttgtttgttgttgttgcaagtaacataaccccaccttgatctagctgactgacggctctaccaccttgtcttttgcagcacaagaggaataggaactgcacctcttccttcagtttcagcttgaataatatcaggaagattcgtatcggtctgagttgggtcacgtacccgacgtgctatagctgaggatggggtaagctgattggagtttgcaacactgttcacatagccaagatatggaaagaacctaaatgtcaactggtggatgaatggataaagaaattgtggtatatacatacactggaatattattcaaccttaaaaagaaggaaatcctaacatttgtgacaacatggatggacctggagggaattatgctgagtgaaataagacagacacaaaaagacatttcttgcaggagctcacttatatgtggaatctaaaatagtcaagcttaaagaagagagtagactactggttgtcaggagcaggagaaaagtggaaatgaagaggtgatagttaaagggtacaaagtttcagttatacaagataaataagttctggaggtttactattaatatatcacatagtacctataagtaacaatactgtattgtatacttaaaattgctaagagggtatatcttatatgttcttaccaataataataataatggtaataattaaggggcaggaggacacttcaaaaggtgatggatatgtttatggccttgatggtggtgatggtttcatgagagtatacttatccccaaactaattgagatgtaaatattaaatatgtacagctttttgtatgtcaatcgtacctcagtaaagtagtttaaaaatggttggactgagaaaaggaggagctgctcagcaacatgaggctgggtgctgggcagacaaaacctcacacatgcattactgaacccacggactcatgtctgtgagctttgtggctgtggatgcaccatgccaatgtagtcaaggattcttcaatgtgtaccttactggattagttccctctgtttatttgtattgactcctcagttcccttatgggttgcttgttggctcttgtggaattatttaagtaaggctttggttgcaggagtcagacatgcttaagctggttttggctgtaatggggaatttgtgagatgtgacacagtgacaggaagtgcagccagacgttgtgagaggcagtaactgggaataggaaagttatgagaagttaaggcagtagtaattgtttctctatcgaaggccataatgttatcattcctgcctctatctgtttgcttgttcttctctctcagcagaatggtcttctctgcttctctgtgcacctgcagaaggtgaccaccctaaggcttatggattcaggagtcctcagtttgagagcagttaccaaatgcctcgcccctgtgaactctagtcccagtttcttattcctggtactggcttagtttgaggcagctgcccaccgtaagtccagtgagccatggcctggggacaaggtcaggtacatgtgtaatcagctgggtctatgagttgtggtggtggcgatggaggtagctcccagaaaaatggattacaggttaagaagagtctatatatcttgaccacatttgatgtgacttggaagtttcaatgtgtgaccacttacaaagttatgatcaggtgtctcatttatttatggtgatgtatgagtccgtgtgtgagtgtgtgtgtgtctgtgtttgtgtgtgtgtgtgagagagagagagagaatgagaatatgagtggtggtttcccatttatttttctatgggccaaatcctgggctatgagctggagatataagagtaaacaaaatagacacggtgcttgctgtgacctgccctgggagacagatattacacggaggatcacataaatgcagagtctgagctgaggtcttaagggtgaggataagtaactagtcagtggagcaggggagggaagggtgttccatgcctgtgtcaaggtcctgaggtgagagaaagaggtgaatttgaggaaccaaaaggagttcagggaacaagaggggctgtttcacaagctgagtctggaagctgagcaggctgagcagattcttaggaactctgcaaaaacttaagggcttgtctatgaccgtaaacaactacggtcgtagataaacaagttggcaaacaactcaaggatttacagtcatcagaattgtaaaactgatcccatgtattttcaaacctcaaatcccttgctctgaccttgtgtgtctaagctagaaggaagcaggatgcacctctcccctggctggaatgaagggattcacccaagctctcagtcttctcacggcatccagggcccccctgcttgtgtgtggtctagatttccattcccatagtaggaattcctttgggagccttggggtctctcctgctagagggcttcacctgtgactgtctcaattcaagggaggggttctaataacattaaacctcaatatcttgctcttccattcctgatgcctccctttccttctacccttcccctacctccttctttcctatgccacaggctggcaggttagtgccagagcaagtggccagtcaccatcattggggttgtggatcctcagggttcttcagaagccccttcaccatgatcaagagtctccagtcactcagaattccacggttcccaaatgccagctctcccactactcccagcgttctccatctctgggatgttgggctccaggcttctcagatgcactgagtaccctaggctaagccactgatccatcagaacttcatagcctgagaggagagggagacaggcttgcaaaggagagttctgactagacactggggtgctacagatgcccgtaagttgtccctttaccctcgatgtccccagtgttgggaccacctgggaatgcccagccttgtgtgctgattgacttgtagtcccctggccctgactggaagcctagttttctctctcatgaccagctaggcccctagctccccagggaagaaatccaatctatttcctctgatagtaatggctaatacttaaataatgccaaccacatgccaagcactttacagttgttagcccagtcttcacaagcaccttgtgaggtgggcaagagtcttatcttactctcattttatagatgtggcccaggatcccacagctatagttcatggtgctgggatttgaacctctggccaccagagcccaccttaatgtgtcctcctcctgttgtcataacagaaaagtacaacaccatgatgacacatcaggctatcctggcaggttcccaggctgccccaatgcccaactttctaggtttacaaagttgacatttacgaagtttccaggtttacaaatctagtttctgattctttagtcagcaggaatttctctacaaaagctgcttcgaaaatttccagccaaaccttacacaccttggcattacatcttggtgagccaaggcggaagagaacaggaagtgaaggccccatgggaagtccctgcggtcgggagcacccaggcggggcggggggtggggggctttcctgtggccggctccctgcccctcccacccccattcaggccctgtgagttgaatgaagagaccctgggaatgagtccaggtctgcagggttagaggaaattgaaggcccttaccagatccctgttgagaagtttatgaattatgagcccttctgcaaatgagagggttcttccctgtcaggagggacagattgtaggtggcaagattggtggcagccagtaggctggtctgctccttcctctctatttcatatgtgtatgaaggcattacctgcagcaagggcctgtgtaaatgcatgtgatttacagagcattttatgtactgcgtgtcattcatgcttccggtgagccctaagtctaagatagggcagatagcatcaggtccattttgcagctgtcaaaatgaggtctgaagggcagaagtggtgtgcccacacacacacaactggttggctgcagacctggggactagacccgggacttcgtcctgcccaggggtctcttgccactgctccccatcaacttggatggctttaagcatttgtgagttgtctgctccctgatggcagaatgcagagacatgaagctacaagcaggttcgctcccaacggcaaaaaggaggaggggtgttcagaacatcaggtgcttctagagaaagcagggagagagtatctggccttgtggacaatgtcacggcagaggccaggtatagggcatgggggtaactggaagcgggatggaccctgttattccctaagacatggcttccacgtagtgctcaaacaaggcctttgcccttgctgttccctccacctggaatattcttccccttccttgacattgctcaggtctccactcttatgtcaccctctcagagagggcttccctggccactttccctaaaatagccacccactcctaggtccctcaaaagcatatcctgctttggattttccctatagcaatatgccctatgaagttattttatttgctaacttgtttcttgtctgttttcctttgttagagcgttggggaccttgtctggcttgttcccaatgcctggaagagtgcctggcacacaggattaagccaacacatatgttttgaatgaatgtgtgcacacatgcatgagctggcggcagtcggggttggggtaagcacgaaggcccagctcagttctctgcatgtgacctcccatcttacgcagataagaaccagtttggtttctgctagcctgagtcaccctcctggaaactgggcctgcttggcatcaagtcagccatcagccggcccatctcctcatgctggccaaccctctgtgagtgtgtgggaggggaggctgggctcctccttgtactctctgaggtgctctggaaggaggggcagctccaccctgggagggactgtggcccaggtactgcccgggtgctactttatgggcagcagctcagttgagttagagtctggaagacctcagaagacctcctgtcctatgaggccctccccatggctttaggtaagctccttccactctcattttttcacctgagaaatgagagaggaaaatgtctacaattggtgtttatcaaatgctttcaggctctggtgagcaagcgtccaggaaaatgtcaagcgcatggagctccaggcctgtctgggggatctgggcacggggaggcatccatgggagaccatgcaggcactctgaggcaggggctgcaagcctagtgcctgctggggcagcaggtgaacagagaggtgtaactgctgtgacagaagtcatggagtccttggagtgtgagggtcattttccactgttgatagaatagggaaattggtgaaatagccctgttaaatgagagaaagaacagtgtgagctcaatgagaaatactaatagaatgtggcactgagccacaaggtctgagggttgattgataaggaagggtggggactgtggagaattaagggcttggcacaggtcagttccaccagttgtcacaagagaatgcaggctcaggtggccagaacttctcgcttttccagaagagtccgatattctgatttcattatatatagtattctgattaaaccagacaataaagcaagcagataaaatatttaaagtataagctgccagtttgcaacctccggttaggatttgtgtggggcaaagaaaaaaactctcaggatcattggtatgtagactctaattttaagtttctaatttaaaattggcccctgaggctgggcgtggtggctcacacctgtaatcccagcattttgggaggccaaggtgggtggatctcttgaggtcaagagttcaaggcctgcctggccaacatggtgaaaccctgtctctattaaaaatacaaaaattagctgggcatggtggtgcatgtctgcaatcttagctacttgggtagctaaggcaggagaattgctggaacccgggaggtagaggttgcagtgaatggagatcacaccactgcactccagtctgggcaatagagagagacgctctctctaaaaaaaaatatgtaaagataaataaaatgaaataaaataggcctctaatgagcaggccattctcctttctgggtcttactttccttgcactcctttctgggtgttaagaggaggtctagaggaagctggacaactcttagcttgtagtaagcacagtggaagtatcagctcttaatgggtcatggacacgttacaagctaggcgccgtgctgagcactttacatggtttatcccactgaaccctctcaataaccctatgaggaagggctattattgctcacattttcagaagaggaaatggatatagagagattagataatttgcccatggccagacagctagtataagaggaggaggtggattgactgcagacattctgtcttcaaaccactacactatgctatggaggcacagagacttaatgaaatcatggagaggggaattgctttgtcaaccacaagcagttattccgggggcagcagatcctcccctgtcccccagtgggtacaatggtccctggtgggttgtgctacaatgttagcccatggtcttatgtgtttttcaaatgtgtaaagtaggatgctggaaccactcttagaaccagataccaatacattgtgaagaaataaatctctgtgcttaaaactggttcatcccaaaatattttgaactgacacacaataggtgctaaataaatgtgtgttaacttgaattggattgaattcgggaaaaaagtgcaataagcttagtgaagacaccatgttccctgggtagaggaaccacattctccatctaaggccaggagtatgggaggtatcaatgtttgcccagcacagaacagggtgccaagaagagaaaagttgacggggtgcatactctgactggaaactggaagggtgagaacagagggtaaaggatagagatggaaccatgtgcatacactttgtgttaccttggacaagtcattcatttctctggacctctgctttctctctacacaatggggtcccaccacttcccttacagctgacttgtatgaagaaggaggtggaggaggaggagaaggtgaagacaatgctgactcaaagggtaaattatttttaggatccaagtttgaaaacaattttaggctactagatatgaacaacatcttgattatgtagttgaaggaaattaaagatgaatggtttaattaaaaattaatcagaatgaaaacgattgattactaatatatctgcaatggtttattttcctgagtggcagactcactaaggtttttgaatactcctgtgtgattgctctatgtatgtatgtatgtatgtatgtatgcatgtatctatctatctgttgtctaataaaatggatcacatctctgctaataaaaacactacactggcagggtacaattataatcattaactgtgcctggaatttgcagcagcagccaccagaggtaccagtgccctttaagggttcataatttagaataatccaattatctgagtttttcagggactgaggggtttggcaaggtgtagaactttcagtaataaagtcaagaaagtcctggacaaaccaaggtagttggtcactctagtccataaccaggtaaagagctttccctgtaacctgtgtaaggttttagaatcatttctttccttattaccaaaaatcctccccaaattttcaagaaattatgaactaaatagttactctatgagataggagttcagcccaaaagaaacaccataagaacaaatataattcttgcttatgttaaccatgcaatgaagcagagagaaaaagtcagtggcctctttaggaggactgtagtgtgggaagatataactaaactgggtttcaatcctggcctggccagatctggagcaagtgagttaatctttctaagccttgagtagtttcttcttcttcttcttcttcttcctcccccttctcctcttcttcttcctcctccttctcctcttcttcttcttcttcttcttcttcctcttcttcttcttcctcctcctcctcctcctcttcttcttcctcttcctcttcctcttcctcttcttcctcttcctcttattcttcttcgtcgtcttcgtcttctttttattttcaaagtgaaagcaagtttattaagaaagtaaaggaataaaagaatggccactccatagacagagtagcctgaaccttgagttcttctataaagtcactatgaatttatactcattttgaaagtgggtgtcaatatgtctgtccactttgcacagctgttatgtggacaaaaggagatctgtgtgaaagtgtaacacagagcctaaactataacaggtaagcaacacagttgtccccttccccatggtgtctgttcttctccatttcctcctgtctgcagggggattataaaactaatcatcaaagccaagaaggcaagagcaagcatgtaccgctgaaaacacaagataactgcataagtaatgactttcagtgcagattcatagctaacccataaactgctggggcaaaaatcatcttggaaggctctgaacctcagaaaggattcacagtaagttaaccatgtagatctgagaggagagtagcttcttgtagataacagttggattatataccatgtcctgatccccttcatcatccaggagagcagaggtggtcaccctgatagcagcaagcctgggggctgcagcttggtgggtagaggtactcaggggtacagatgtctccaaacctgtcctgctgccttagggagcttctaataagttgatggatttggttaaaattaacttggctacttggcaggactgggtcagtgaggaccaacaaaaagaagacatcagattataccctgggggtttgtatttcttgtgtttctttctcttctttgtactaaaatatttacccatgactgggaaagagcaactggagtctttgtagcattatcttagcaaaaatttacaaagtttggaaaacaatattgcccatattgtgtggtgtgtcctgtgacactcaggattcaagtgttggccgaagccactaaatgtgagatgaagccattacaaggcagtgtgcacatctgtccacccaagctggatgccaacatttcacaaatagtgcttgcgtgacacaaatgcagttccaggaggcccaaatgaaaatgtttgtactgaaatttgttaaagcttcccgacaaactagatttatcagtaaggattgttttctgcaagggggatgaaacttgtggggtgagccatttgggctgaggaggagggaggttggagctgagaaatgtggagacaatttccctttagaaggactgaatctccctgcctctctggggtgcggcagccagcaggatccaatggtgtatatgtctccccagctccccattcagtgatatcatgtcagtagcttgaaattatccgtggtgggagtattatgtcatggaaattggcaaatggaaacttttattggagattcaattgttaaacttttaccagcacaacactgccctgccttcagagtcaatgaccctatccaagtttaatccatctgtccactgtctccaacacgatctttataaaacacacctgacaacattacccttttattcagttttttaaaagataagtttccagctcatcggggtggctttaaaggccatttctcctctggacctcacccaacttttcaaatcacttttcctacccctacctctaaatgctactcaaactccagccatcctgaataataagacttttgaaaagtagattatgggctgggcacagtggctcacacctgtaatcccagcactttgggaggccaagatgggtggatcacctgaggtcgggagttcgagaccagcctgactaacatagtgaaaccctgtctctactaaaaatacaaaattagttgggggtggtggcacaagcctgtaatcccagctactcaggaggttgaggcaggggaattgcttgaacctgggaggcggaggttgcggtgagcctagattgctccactgcactccagcctgggcaacaagagcgaaactccatctcaaaaaaataaataaataaataaagtagattacatcagatacctctggcctaggttgtttatgaccaactctcctgctgagaataactagaaaagctagacaaaacatatttccaaaagatctctttggaggcatcagagaatggccaaggctgtaaggaactgcctgagcccagagaggtggagcccagcactggtgccctttactcctggggacatgtgctggtttcaaaaacttcagctgagcttttgagcattcatggaacttggtgggggagatgaaatttgtaccttaaatcctgcctacagggagggtccctgataatccccacccaatttggaaatctgggtcagccttcacaggtactgaagccctcctctgaatgatctcaagtcctgctagggtagaggttacctgcttttgaaaggctcctggcctacctgtgcagcaggagcaaaagtgaaccatctcagggtacagataacaatcatccagagccttgaatgacctctactgtgcttaatatatagtattcagcagtcagtaaaaaggatttaggcacatgcaagatgacctgtgtatcagggagaaataggcaataaattgagatccagcagggatttgaatcatggatttgaatcaggggcagccttcgaaagaactatggagaatatactcagatttaaaacataagattggaatttttggcagagaactaacaactgtacaaaaaaggaaccaaatggaaatcctagaactgaaagatgcaattaaccgatgttgagaaatagccaacatctattgaacacttcccatgtggacagctgtgctaaacactttacaggcatcaacataagatgtgtccccttacagcagtgcagtgtccctcctaagacatggacagcctggtttccctatctctctgcttcatcaaaacccctttacgtggggcttagacactcctgttgtctctagtgtctagtagcacagggctcagcacatggaagccactagatacaatttgatgaccaggacctccgatgaaagccatgggtgctgattgggaaggcattgtcttttatgtgctatggtcttaaagcttcatccaggaagcagaactcggggggtgctgaggacccagaaccgagaataagattagtcagagatttcctgtgggcagaaatcataaggacgccaactgtttgggtgagataagacgaaaccaagagtggacttgtggccagaagcgtgaggaagagggagagagcttcccttgtcccctttcttcctctccctaagccacagtgattgacagccccccccctttggagtcagagcaggcttgagactggactgggaaaggagggtgggtcaggatacagagcaggaaggctgggagtgcagggcaggagcaaggggctggggcattcattgtgcctgatctctcccactttacctggggtaaagaagcatatgcaaaagccacggtgtgagtatttcccaagtgccagggtcagggcatgattcatcacgtgcagcatttcattcaatccttatagtaaccgatgatgtggcttctattattagctctatcagataatgaaactgagaccaagacaggctctgcacattgtgtggggtaatgacacagggggattcagacctagactccataactcctgccccagggaccacccccaccctcaccctgtgcatgtcgacaaaggacagactgggccacttctcaggacacagcggggaaatgacacagagcagggaggttccaggagccccgagcgtcttttctccaggagaatactctctgaattcagactggggtcagagaaacatttacccaggagccgcagtgtgggtggggctttttacttgaaacgctgtctgaaggcagtggccaggatggaactctccaccctaccttggcaagccacttctcttctgcaatctgtaaggacattgttgagagaattatggtcttccaattccggagggttgaagaaagacaaataggagagaacctatcatagtcaggtgctagctgccttctctttcagagagtgtgagaataaagtgatacacttgattattagcaaatactttggaaattttaaacgctaatattcaacacactctggaagaggcaaataagtagacaggttcatatacatcatctccttcagctagtcctcacaaaaacaaacaaatgaataaacaaaattcttctttggccctcataggaagacactgtttcttgaacgtgtttcaaaaaggatgggtgactcactcaaggtcacactgtttatgaggacagtacaggaatacagacatgccattttgcctgaaaaaatccatcacccagggaggtgacacaattttgcagaaatgttctatttcctctgaaggatacattctttaaacctttgggaaattcattcatagtcttcctcctttgaaggattaactctctggacacaaagtgtttgattctgatttgttggttggaagatgtgttggttgagagaaagattctgatttgttggttgaaaatagactcatcaagatcaactgctgtagtagtaaatattttgacattttgtctgtattcctgtgctgccctcacaagctgcatcaccttgagtgagtcattcatacttttttgtttgtttttgttttggagatggagtcttactctgttgcctaggctggagtgcggtggcgtgatcttggctcactgcgacctccatctcctgggttcaagtgatcctcctgcctcagcctcccgagtagctgggattacaggcacatgccaccatccctgctaatttttgcattttcagtagagacggagtttcaccatgttggtcaggttggtcttgaactcctgacctcaggtgatccgcccacctcagcctccccaagtgctgggattacaggtgtgagccaccgtgcccagcccagccatcatttttgaaacacgtttgagaaacagtgtcttcctttgagggccaaggagacattttttttgtttatttgtttgtttttgtgaggactagctgaagggggtgatgtatattaacctgcctacttatttgcctcttcccagagtgtgatgaatattagggtttaaagtttctgaagcatttgttaataaagcccggggctggaggtcagaagacctggatttctctgcatacttttgccatcagcaagctgtgtgaccttggacagatcccttttttgtctaaatctttctgagtcttcttgaaaacaatgccaggttgggacaggatgattgccaagctcccgtccagctctaaaacactgcaacgtatgcttctgcaccagcactgtccatcctgtagatcatgcagaaattctcttcaactttttcctacccataaaataggagcatgcttacctttttcctaatgttccaggccccgggtctagaatattgtaagtaaggaagttaatgtgtatcagagcccattatgggccagaagttctcctcttccttcctacacctgcttcctccctccctccctccctctttcccttccttccttccatccatttgtgaagaagacatgatcaccctcattctgagagtgaagagacagaggctcaactaatgaaatgatttgttcaaggtcacacgggtggcacaaggcaagtggcagaggttgaatttagacccattcctgtccaaatgctgagtttatgtcatcgtcccgagaccataactttaaagatgtaagatagtgggaaaagagttgatttcaaagcacctctcagaaggactcactttacatcaggggtcagcagactcaggccaaatccggtccattccccgcttttgcaaagaaagttgtagtggaacacagctaggcttattgatttatggattgccaacgtccttttgtgaaacagacagctgagctgagtaatcgtggcgcacaaaacctaaaatatttactatctcgtcctttacagaatgtttgccaatctatggtccggagtccaaggctgtccatttttcaaagaacacaaagtgacatgagactgtcccatgtgcagggagccctatcattttattatgaaaaaacggcctttctgctcaaatctgttttttaaaaagtcaacaaacagactctgggtacctgtcaggaacagtagggagtttggtttccattgtgctcttcttcccaggaactcaatgaaggggaaatagaaatcttaattttggggaaattgcacaggggaaaaaggggagggaatcagttacaacactccattgcgacacttagtggggttgaaagtgacaacagcaagggtttctctttttggaaatgcgaggagggtatttccgcttctcgcagtggggcagggtggcagacgcctagcttgggtgagtgactatttctttataaaccacaactctgggcccgcaatggcagtccactgccttgctgcagtcacagaatggaaatctgcagaggcctccgcagtcacctaatcactctcctcctcttcctgttccattcagagacgatctgccgaccctctgggagaaaatccagcaagatgcaagccttcaggtaaggctaccccaaggaggagaaggtgagggtggatcagctggagactggaaacatatcacagctgccaggggctgccaggccccagagggcctgagaactgggtttgggctggagaggatgtccattattcaagaaagaggctgttacatgcatgggcttcaggacttgtgtttcaaaatatcccagatgtggatagtgcgaccggagggctgtcttactttcccagagactcaggaacccagtgagtaatagatgcatgccaaggagtgggactgcgattcaggcctagttgaatgtgctgacagagaagcagagaggggcaccaggggcacagcccgaaggcccagactgatatgggcaaggcctgtctgtgctgacatgtcggagggtcccactctccagggaccttggtttccccgtctgtgacatctgtgacatgagagtcacgataactccttgtgtgccttacagggttgttgtgaaaattaaatgcacagataatagcgtaacagtattccgtgcattgtaaagagcctgaaaaccattatgatttgaaaatggaatcggctttgtgagaccatcactattgtaaagatgtgatgctgatagaaatgacaggactgcttgtgcatgccctctgcagtgtgacattccagcagtgaaatcatgttggggtgacttctcccccactctgacctttatgtttgtctgggccgaggctgcaagtcgggctctgtgggtgtatgagtgacaagtctctcccttccagatatggggactgtctgcttccctaggttgcctctccctgctctgatcagctagaagctccaggagatcctcctggaggccccagcaggtgatgtttatccctccagactgaggctaaatctagaaactaggataatcacaaacaggccaatgctgccatatgcaaagcactttggtttgcctggccacccctcgtcgagcatgtgggctcttcagagccacctgatgaggtgggtacagttagccacacttcacaggtgaagaggtgaggcacaggtcccaggtcaggctggccggagctctgtttattacgtctcacagctttgagtcctgctctcaaccagagaggccctttaccaagaagaaaggattgggacccagaatcaggtcactggctgaggtagagaggaagccgggttgttcccaagggtagctgctcctgcaggactctgagcaggtcaccagctaatggaggaaaggctctagggaaagacccttctggtctcagactcagagcgagttagctgcaaggtgttccgtctcttgaaacttctacctaggtgctatggtagccactagtctcaggtggctatttaaatttatacttaaatgaatgaaaatagaagaaaatttaaaatccagacccttggtcacactatccacatttaaagaggtcaatagccacatgtggttagtggccaccctattgggcagtgcagctacagaacatttttgcatcccagaaagttcttttggatgttgctgctctacagcatgctttgctgaaacagaagtgccttccctgggaatctcagatgggaagcaagtaaggaggggagtcaaatgtgggctcactgctcaccagctgtgagggttgggcctgcctcttaaccattgtcagcctcagtcttctcatccatgcatgccgtgggtatactaaaatactatacccctggaagagctggatgcaaatttgacaagttctgggggacacaggaaggtgccaagcacaaggctgggcacatggtggctgtgcactacagctgagtccttttccttttcagaatctgggatgttaaccagaagaccttctatctgaggaacaaccaactagttgctggatacttgcaaggaccaaatgtcaatttagaaggtgagtggttgccaggaaagccaatgtatgtgggcatcacgtcactttgcccgtctgtctgcagcagcatggcctgcctgcacaaaccctaggtgcaatgtcctaatccttgttgggtctttgtattcaagtttgaagctgggagggcctggctactgaagggcacatatgagggcagcctgaagagggtgtggagaggtagagtctaggtcagaggtcagtgcctataggcacagtggtcccagggccacagctgggaagggcaaataccagaaggcaaggttgaccattcccttcctcaagtgcctattaaggctccatgttcctatgttgttcaaaccctaactcaatcccaaattaatccaccatgtataaggttgagctatgtctcttattcctggacaccatactcagccatattctggtccacacattaaacaagctggatgaccttgaagagcttcacccactctgttcctcagctttcccttcagtgggatgatatcaactggacaacaggatgtgcgattcttttagttccagccttccaggatgttttcactcccctgtttgttgttgtaggatggtattacctccaccttcccaccttccctatgccctggttctgtctcctgtgcctcgctctgaaagtggatgagacctacaattcctgtcctggtagttctcctaatgaacacactgaagcacgaggaagctgagatttttgttgctacatgagagcatggaggcctcttagggagagaggaggttcagagactcctaggctcctgtggagccccactcatggccttgttcattttccctgcccctcagcaacactcctattgacctggagcacaggtatcctggggaaagtgagggaaatatggacatcacatggaacaacatccaggagactcaggcctctaggagtaactgggtagtgtgcatcctggggaaagtgagggaaatatggacatcacatggaacaacatccaggagactcaggcctctaggagtaactgggtagtgtgcatcctggggaaagtgagggaaatatggacatcacatggaacaacatccaggagactcaggcctctaggagtaactgggtagtgtgcatcctggggaaagtgagggaaatatggacatcacatggaacaacatccaggagactcaggcctctaggagtaactgggtagtgtgcttggtttaatcttctatttacctgcagaccaggaagatgagacctctctgcccttctgacctcgggattttagttttgtggggaccaggggagatagaaaaatacccggggtctcttcattattgctgcttcctcttctattaacctgaccctcccctctgttcttccccagaaaagatagatgtggtacccattgagcctcatgctctgttcttgggaatccatggagggaagatgtgcctgtcctgtgtcaagtctggtgatgagaccagactccagctggaggtaaaaacatgctttggatctcaaatcaccccaaaacccagtggcttgaaacaaccaaaattttttcttatgattctgtgggttgaccaggattagctgggtagttctgttccatgtggtggaacatgctggggtcactttggaagctgcattcagcagagtgcctggcttgcgctgggcatccaaggtggtccctcatcctccaggctctctttccatgtgatctctcagtgtttaagagttagttggagcttccttacagcatggcggctgacttccaaaagggattattccaaaaagagcctcaacatgcaggcgcttattatgacttctgcttgcatcatcctattggccaaagccagtcacgtggctaagtctagccccctgtgagaggagactgcataagagtgtgaacaccaggagacacggtcactgggggccaccactgtaaccatctaccacaggacctgaatctctgtgtgctactcccttgctcaagggcccccctacccacgcagacctgctgtcttctagcaaagcccatcctcaggacctttctcttccaatccttattgactcaaattgattagttggtgctccacccagagccctgtgctcctttatctcatgtaatgttaatgggtttcccagccctgggaaaacatggctttgtctcaggggcttgctggatgcaaccttaacctcaatgtgagtggccatactgtggcactgtcccatccctcaccagggacactgttctggagggtgactgcctgttctgtgaggagtggggatggctaggacattgcatggaacacaccaccaccccatcttctcagagctcaaaccctgacagaacaccagctccacaggccttggcttctgctgatggtgccgtgtatttaccagacttagtggtccaaggccagagtggccagatttcccaaagtcaaggtgtgacagtgggacagcctctttgtgtctttgctgtcctaagaaacctgggccaggccaggcgcagtggctcacgcctgtaatcccagcactttgagaggccaaggtgggcagatcacgaggtcaggagtttgagaccagcctggccaacatggtgaaaccctgtctctattaaaaatagaaaacattagacaggtgtggtggtgcatgcctgtaatcccagctactcaggaggctgaggcaggagaatcgcttgaacccaggaggtggaggttgcagtgagccgagattgtgccactgcactccagcctaggtgacagagcaagactccgtctcgggaaaattaattaataaataaataaacctaggtcccagagtcccacagaatggcagacaggagcacctgggggcttttagggtatggcatttcccctgtactaactctgggctgtccagagggccatttcatggcgtggagtggagagggaggcagcacaggacttcctaggcctcagctctcacctgcccatcttttgatttccaggcagttaacatcactgacctgagcgagaacagaaagcaggacaagcgcttcgccttcatccgctcagacagcggccccaccaccagttttgagtctgccgcctgccccggttggttcctctgcacagcgatggaagctgaccagcccgtcagcctcaccaatatgcctgacgaaggcgtcatggtcaccaaattctacttccaggaggacgagtagtactgcccaggcctgcctgttcccattcttgcatggcaaggactgcagggactgccagtccccctgccccagggctcccggctatgggggcactgaggaccagccattgaggggtggaccctcagaaggcgtcacaagaacctggtcacaggactctgcctcctcttcaactgaccagcctccatgctgcctccagaatggtctttctaatgtgtgaatcagagcacagcagcccctgcacaaagcccttccatgtcgcctctgcattcaggatcaaaccccgaccacctgcccaacctgctctcctcttgccactgcctcttcctccctcattccaccttcccatgccctggatccatcaggccacttgatgacccccaaccaagtggctcccacaccctgttttacaaaaaagaaaagaccagtccatgagggaggtttttaagggtttgtggaaaatgaaaattaggatttcatgatttttttttttcagtccccgtgaaggagagcccttcatttggagattatgttctttcggggagaggctgaggacttaaaatattcctgcatttgtgaaatgatggtgaaagtaagtggtagcttttcccttctttttcttctttttttgtgatgtcccaacttgtaaaaattaaaagttatggtactatgttagccccataattttttttttccttttaaaacacttccataatctggactcctctgtccaggcactgctgcccagcctccaagctccatctccactccagattttttacagctgcctgcagtactttacctcctatcagaagtttctcagctcccaaggctctgagcaaatgtggctcctgggggttctttcttcctctgctgaaggaataaattgctccttgacattgtagagcttctggcacttggagacttgtatgaaagatggctgtgcctctgcctgtctcccccaccgggctgggagctctgcagagcaggaaacatgactcgtatatgtctcaggtccctgcagggccaagcacctagcctcgctcttggcaggtactcagcgaatgaatgctgtatatgttgggtgcaaagttccctacttcctgtgacttcagctctgttttacaataaaatcttgaaaatgcctatattgttgactatgtccttggccttgacaggctttgggtatagagtgctgaggaaactgaaagaccaatgtgtctttcttaccccagaggctggcgcctggcctcttctctgagagttcttttcttccttcagcctcactctccctggataacatgagagcaaatctctctgcaaaaaagatatggggcagcactgtccacaacagcctctactggaaacaacccaagcacccatcacagaatgaattagtacatcatgtatctgcacacaacacagtgctccttggcaaagaaaatgaatgaattacagccagctgcacctcacaagacagataatcttacaaacatcatgtgggtacaagaatcacaaaagcatgcatagagtgtgattccatttctacaaagttcaaaacgggcaacatggggctgttgtgtggagggctgtggaaacaggtggtgcagagagaagcaaggccatgctctgtctgaaggcccagtgacacttggcccctgcgagagagagtggcaggcaggagcacctgggggattttagggtccagacaacattctatttcttggcatggatgcagttaggcggttttctgtatgtatattttatttcacaatacctagaaaataaaaagacttgccccccaacaaccagggtgtaaagaaaggagcatctgggaaattatgagattagtgaatggagtattgaatttgtccccataggtgggagtgcaagaccatgagtgaccacttatcaaacacacctcagtaaacagtcaggagagtgaggagtgtggtcctttcacctgcccaggttgtttctgttagattctgggcttggtctctggagtccaagaggcaggccccagtgaggtcatgcacttgctgtctgattttggccaagtcacctccctttgtggggactgttcctcatttgtttgaggggaatgttgatttggatggggattttccaaacagagctccttggacccttccctctaaggtctctggaaatgggaaaccctgcagaggggaggataaatgggccaggattcatcccttgaaccctgttcccaacagagccctctgtttttctcttctttacaacttggacctcccatgggactttgtttgaaagggagacttcattgctaaaagcaaactaaactaagtaggctaaaaggcaacaaactggagaaaatgtttaaggtcttctctagatctaagatcctatgacgttgaggaggtcatccaacatctctgagttttctctttcttgtatataaaatggaagtagctggcagggcagggcatgtgtcgttgatatatttttaatcctggtaaaaggaggaggttcaaggcagaaaactcatcaaagcttaatgacaacaatagcagctaacatttgtgaggctctaaggtaaaacccaaggctaagactcttcatgcaaactaggtcaagcagcaagctacaggttagaaacaggcaaggcagcaaaacagtcacatgggtgaactctgggactctgcagtcacactctgactctcctgcttgcactgggtgctcataagcaagctagttaacacctcagagccttggttttcccaccactaaatgcaaataataggcaatgctgagttattgcaaagttatttaatctttgcaatagccttctgtggtgagtggcatattcttattattattattagtcctagaagagtcagtgctcaaaggaatctgctttagagccttattgctccaagtgtggttcatgcatcagcaacatcagcatacttctggagttaaaatgcagattctcagatctcaggcttgacttactgacttagggtcatcatcttaaccagatctcccatgcacattaaatttgagaagcactgttttaaaatgcattagccgggtgcagtagttcatgcttgtaatctcagcactttgggaggccgaggcaggtggatcacatgaggtcaggagttcgagatcagcctgaccaacatggtgaaacctcatctctattaaaaatataaaattagctgggcatggtggcgcatacctgtaatcctagctactcaggaggctgaggcaggagaatcacttgaacctgggaggtggaggttgcagtgagccgagatcacaccattgcactccaacctgggcaacaagagcaaaactctgtctcaaaataaagaaagaaataagataaaataaaaagcataaatcacacaatgcataagttttggcatacacactagcataaagggattctcctacttataaacctagcccatctccttactctctatcacactagcccattgatgacaccaaaaactcccctcttaacactttagctgggcatggtggttcacgcctgtaatcccagcactttgggaggctgaggtgggcagagcacttgaggccaggagttcaagaccagcctgaccaacatggcaaaaccctgtctctactgaaaatgccaaaaaattagccaggcatggtggtacatgtctgtaatcccagctacttgggaggctgaggcatgagaatcactcaaacctggaaggtgacggttgcggtgagctgagatcatgccactgcatcccagcctgggtgatagtgagaccctgtctcaaacaaacaaaaaaacaaaacacttccttactttggtttaaagtgttccataaaatattcctaagaggaaaaactttaaatcatcatcatgctgctagaatgtcagctcaacccatgcagatatttttgtctgttttgttctacagtgtatctcaagtgccaaggccattgcttgcgatatactgggtgctaagtgaatatctggccagtgaataaatgaattggccactgatatatcaatatggattaatttattcgacaggtcagcaaatttgagaagactggggacttggatcaggaatattttgaaggaagcttagaagagggaaaaggcccagagtgaaggatttttcagatatttggaggttaagaaaaaagatatgaccacgaggtggcggtagcacacataggctttcgggttgatgctttaacaggtttacactggggaaggtcctttatagcaggaattggtcaaggaggctatagtgtggagatggggtcctactcagaggggaaggagggcaagaggactcctaggaaagaagagaattggaaagggggcttacatggccaggtgaagtcacccagcagcacagcagggaatctctgggtcagagagctcctatgggctgcagtggcttgaggcctttatggcttggggcttatccttggccagcagatattggatacagtttcatggagtatacagagcaggcaggttctaaatggattaccataggcttattggggctatgtttaaagcaagtggatgtgcaaacatttgagtttggcttggtggggtattccaggtctggtctcagcctgcggtgaggaaattaataatcaaggggccagcactttatatagcacaaggcaggggccatggattaggaaatccaggcctggggttcatgcttaagtgaggcttttgttcaactgggaggcggtgcacaggtgactgggaggtggaggggctgagatgggaaagaaaagcacagagagggaagacaagcaagcctcaagaggattgtggcttcttccgtcacttctgggcccgatctactacaacactacagaatcaaggacaactgtttgaaaattcaaggctgaattcaggtctttcattggtgagtcagagttttcctacagactcactggggggcccttggccaagcaacctctcctccctaggcctcagttttcataaaaggagggaattgaactagatatgtgtcttcatcaggctgacctgcaggagctttttaccaaaagtggcctacctcctccatccagaggttctgattcacttgatctgggtgtgggacaaggacatcatgatgccagggctgaggccctgtggaccacatagctcctaagtcagggaccctgaggtcaagtcctcccagctctcccacctggccctggtagtgtctgtcaatacaatggagggagatggtctttaacttcaaagaaaggccacttaccgcatcagcagtacattttgactacatgttaatttgggttgaaggtagaagattttctattttctcaatcacaggctggctaaaacacatttcaagcttcattctggggggaacataaattggccttcaacagggggtgtcaaattggggtaaaattcttgcaaatcttggggaaaccaaataagtttttgttttctcttcacataactatgaaatccctagccacaacagcaaatctcaacatgcttgatattcagcccagttctctccataaaagtttctggagacaatgaaactcatctattgggttcatagctttaaacctgagaaagcttaaaaacagggaagattagctttgacgtcttgcctctgggtctccttcatgtggagctaaaagagtagttcaggaaatatccaccaggggtcagcattttgtacacacctgactgctctggaaagtgtttttgtttttttttttttaaatagaaacggggtttcaccattttgcccaggctggtgtccaactcccagactcaagcaatccgcccgcctcagcctcccaaagttctagcattaccgtgtgagccaccacacccggcctggaaagaatcttgacaaggcaaataatcagtttggttcatgctctcaaattagtgaaggtctggtttttcaagactctctaggtgtttcactctaaggaaaaatttattttcattcacctatcaatcaagctgaggtggggcctgactcctgacaagtatccaaatgttgcctattgccaatgtctagtctccaaggggtgacacccgagaaattctaagtcttctgtgcctgctttaaagtccacttcctgtcatcctgttatctgttgcagaccttttacctgtatgattgactggtgtgtggaattaacacttccctcctcggccgggggaacacacccacatgttggaactcagcacaggaatcccaacggcgtgcctacaagggaaatgcgtacttttgtgtgttggtgggtagtggacagaactcgtaaaagagatagataaaatacccaggcactcactacagtggggaatggatctgttcaggggccagctatgcctgcattctttcccagggacagttgacacagtcagatgactcaggaaacttgatttgcttggagtcagagcagaggaaagatcttagtgaccagggacctcaagctgccccacctgagcgctccacctccactccaaggggcttcctgccaagagatcagtatgtctgtgtgtagagtcaagacacatcttccttaggccacaatggagtcacactgacatcttcgccttccctccttggcagtatttattataagtcacaggagtttagttttctttcaactcaggcctgtggttggagcacagggagctaggctcgggctagatcttgctaacctagtaggcaatggtaaggattctagtctgtcctaaagcataaataggccttggacactctgaaatttgtcctttcaccaccccatgctctacttctaagtgctctctctccccatctgcaccccctagttcctacaaaaatctcctcaaagcgaggctcttggacaatttgttccatgaagacatcgagcacggtccataccagccctcaataaccccctcttctagactccatgaggacctgtagcccagacccctgatctgcatggcgcctctggggtctttccagaggtgtatgttttaaccatcccctgagcaccttaaagtaaagattcagtgttttgctgtttgtgctccctagagcacctgggcgcttatcggaaactgatgaaaactcactgccaacatattctgaagtatattcattcatttatttaatttatttatttttttatttttccataggttaatggggtacaggaggtgtttggttacatgtagtaagctctttagtggagatttgtgagatcctggtggacccatcacccaagccgtatacactgtaccctatttgtagtcttttatctctcaccccccacccacccttccccccaagtccccaaagaccattgtatcattcttatgcctttgcatcctcatagcttagctcccacatatcagtgagaacatacaatgtttggttttccattcctgagttacttcacttagaataatagtctccaatctcatccaggtcactgcgaatgctgttaattaatttctttttatggcagagtagtattccaccttatagctatatctatctatatatatatatcatatatcatatatagatatcatatatatcacagtttctttatctactcattgattgatgagcatttgggttggttccacgattttgtgattgcaaattgtgctgctatgaacatgcgtgtgcaagtatctttttcgtgtaatgacttcttttcccagtagtgggattgctgaatcaaagggtagttctacttttagttctttatgaaatatattagtttaatatgcacttcccattttttcttctctcttagaatactgtaccccagagatacacctgacttatttcttcttccgcattgaggcctctgcacccatggctccttatcagagaggtcatttttgaccaccttatctaaaatagcatttgcctcctgaaagccacctgtacctcctttgcttactgtttctgtactttgctttatttttcttcctaaaaatggttactgggtgggcacggtggctcacgcctgtagtcccagcactttgggaggccaagacgggcagatcgcctgaggtcgggagttcgagaccagcctgaccaacatggagaaaccccatctctactaaaaatacaaacttagccgggcgtggtgttacatgcctgtaatccgagctactcgggaggctgaggcagaatcgcttgaacctgggaggcagaggttttggtgagccgagatggcgctattgcatccggcctgggcaagaagagcgacactctgccaaaaaaaaaaaaaaaaaagattaccttctgccatgctatgtgtttgtgtgcttatttaagatttttttcctactacattttaagctccgttaagataagggcatttccacccacaccagtgcctgcttattaattcaacaatcttattcattgagtacctactatcgttcatctccaggtgcaggagaccatccgcagagcactccctacagtgcttagccatgaatggaaaccagctgtcagtagtagtatttttacatagctaatttatattcccagttttgtcctttttttgtgtattgtggggcaaattaggaaaataataattccactcctgaggtagaataacagggccccagggtacaaattgtgtgtctctgtgttcacccatggtgtgtgaagaaagcctgtaagtccccacgctcctccttctctctgtgagagccacaaaaccgcatagaggcaggtgtggtggaattaactgggaagaatgaacaatgttcgaaatagtgattaaaggatcatagcagagccactgaatatgagatggcactgtcaacacgccccagcctcaccacccgacagggcaggatccccaggcctggcttgctgcttatgattgttctctatctgccagcccgcaatgcccacatttctgttgctattttctgtgaaggatctcacttctcctgacctcctgccacttcaagtgcatccagggctcacctttggctctccaaacactgaccaaagttctctgctaaacacagagcccatccactccagaagggcagagctttaaaattacagttatctttaatatcaaactcttcgacagaacttgtacccctttcagaccagggcgaatctcctgacgaaagtatgcctcccccatgccccttctgagaaactcaattcagaagattgtgctgcagggagcagaggggaagggggccagctccagacagagctgattttcagataggccatttgcaagtggaaagggacaagagtctctaatttgaaatcataactctcagggatgaggtccagctacatcatttaatagccaagtgattttgaaccagcttctgaagcttcctgaagctcatttcattcatttagaaaatcaaggctgggcacagtatctcatgcctataatcccagcactttgggaggctgaggtggaaggatcgctttaggccaggagttcaagacaagcctggccaacagagcaagaccccccatctctacaaaaaagttaaaaaaattagccagctgtggaggctgaagcaggaggatcacttgagccccggaggcctggctgcagtgagccatgattgtgccactgcactccagcctgggtgacagagcaagaccttatctctaaaataaacaaaaaataaagaaaaccaagatcataatacttctcagagttattgtcattattaaataacatgcaaagtgctctgggtaaaagctcactataaaactgcttgaataaggttataacccaagtatcaccagatgtctccagcccgtgggtcatctgaatgtcctggtcctgactcagctcaccgttaagccccacactacaccctgacatgccccatgtacagattttaaatgctcagttgcataaagtttgagaaatatatacattcatttaactaccaccccaatgaaaatgtaaaacatttccataactcctgaaaattcatttatgtccttctctaatcaattcctcccactcaagaggtatccactgttctaacttttatcccataggttggttgtgtcctgtttcaaacttcacataaatggaatcatacagtatgtactattttacttggcttcttcctctcaacataatgtttttgagattaatccatgttgttgtgagaaatcaacagattgttcctttctattgttgagtagtattccaacttatgaataaatcataacagattatccatggacttttgagatgttttcagtttttgtctatgatgcgtagagcagctattcttttataccattcttcttgtggatatttgttttcaactctcttgctttgagtaaatgcctagcagtgaaaggactaggtcaaaatgtaggtcaatttacaagaaattggcgacttgttctccaagttgttgcatggttttacactgctgtgagcaaagtataagagtaccagtggcggccaggcgcagtggctcgcgcctgtaatctcagcactttgggaggccaaggtgggtggatgtcaggagttccaaatgtccaggaactcctgatgtcaggagttccagaccagcctggccaacatggtgaaacactgtctccactaaaaatacaaaaattagctgggcgtggtggcggtggtagctgtagtcccagctacttgggaggctgaggcaggagaattgctgaaacccaggaggaggaggttgcagtcagctgagatcactccattgcattccagcctgggcgacagagtgagacttggcctcaaaaaaaaaaaaaaaaaaaaaaaaaaaaaggagtgccagtggctccagttccttgtcaacttgtcaatatttggtattgtcagtattttaaattctagccattcttatgaggatgaagtagtatctctttgaggtttgaatttgtactaaaaatattgagcatcttttcatgtgtttattggtcatctgtgatttttttaaattgtaaaatgtctgtttaaccctttcagccattattttatttgagtagtttgtcattttcttattcatttatagtttttaaacaaattatttttaatttttgtgagtacatagtaggtgtatatatttatggggtacatgagatattttgatatgggtatgcaatgcataataatcacatcagggtaaatagggtatccatcccctcaagcatttattctttgtgttacaataatccaattatactcttttagttatttaaaaatatacaattaaattattattggctatagtcaccctgttgtgctatcaagtactaggccttttttattcttctagctattttttgcacccattaaccatccctacttcttcctcactccctcactaccttttgcagcctctggtaaccatcattccactatctccacgagttcaattgttttcatttttagctcccacaagtaaatgaaaacatgcgaggttcgtctttctatccctgacttatttcacttaacataatgacctccagttccatccatattattgcaaatgccaggatctcattcttttttatggctgtatagtactccactgtgtatatgtacctcattttctttattcagtcatctgttgattgacaagttggttccaatctcggtgattgtgaagagtgctataataaacatgggagtgcagatatctcttcattatactgatttcctttcttttgggtatatacccagcagtgggattgctggatcatatggtagctctatttttggtttcttgaggagcctccaaattgttctccatagtggttgtactaatttacatccccaccaagagtgtttaaggattcccttttctccacattgttgccagcatttgttattgcctgtcttttggataaaagtcattttaacggggtgagataatagctcattgtagttttgatttgcatttctctgatgatgttgagcacattttcacatatctgttttccatttgtatgtcttcttttgagcaaggtctgttcagatcttttgtccatttttaattggattattagatttttttttttcctagagagttgtttgagttccttatatattctggttattaatttcttgtcagatggatagagtgtaaacattttcttccattctttggattgcctcttcactttattgattgtttcctttgctgtgcagaagctttttaacttaatgtggtcccatttgtccattttcctttggttgcctatgcttgtggggtattactcaagatatctttgcctggtccaatgccctgaagagtttccccaatgttttcttgtagtttcatagtttgaggtcttaggtttaagtctttaatccattttgatttgatttttgtgaacggtaagagacaggagtgaagtttcattcttctgcatacggatatccagttttcccagtaccatttttgaagagactgtccttttcccaatgtatgttctggcacgttcgtcaaaaatgagttcactgtaggtgtatggatttttttctaagttttctacactgttccattggtttatgtgtctgtttttatgcaagtaccgtgctgctttggttactgtagctctgtagtataatttgaagtcaggtaatgtgattcctccagttttgttctttttgcacagaagagctttgtctattctgggtcttttgtggttccacataaattttaggattactttttctgtttctgtgaagaatgtcattggtattttgatagggattgtattgaatctgaaggtggctttgggtagtatggacattttaacaatactgattctttcagtgtatgaacattttaacaatattgattcttccagtccatgaacatagaatatctttacatgtgcttgtatagtttccaaagttcttcttgttattgatttctagtcttattccatcgtggtcagagaaaatacttgatattattttaatttttaaaaatgttttaagacttattttgtggcctaaaatggtctatccttgagaatgattcatgtgctgagaagaatgtgtattcttcagctgttggatgaaatgttctgtaaatatctattaggtccattgtgtctatagagcagattaagtcttatgtttctttgttgattttctgtctggatgatctgtccaatgctgaaagtggggtgttgaagtttccagctagtactgtgttggggtctatcttcctctttagctctaatatttgctttatatatctgggtgctccagtgttggggatgtatatatttactcttgtcatatccttttgttaaagtagcccttttattcttatataatgacctttttgtcttttcttattgtgtttgtctcgaaatctattttgtctcatgtaggtagagctacacctgcttcctttttgtttccagtggcatggaaacaaaaaacaatcatctctttattttcagtttatgtttgtctttttaggtggaatgtgtttcttgtagggaacagatcattgggtcttatttttttttttaatccattcagccactctatgtcttttgattgaagagtttagtctatttacattcaatgttgttattgataagtaaggacttacccctaccattttgttatttgttttctggttgttttgtggtcttctcttccttctttccttcctttctgtcttcattttagtgaaggtgattttctcaggtggtatgttttaatttcctgctttcttattattcatgtatcctttgtaggttttttgatttgaggttaccacgaggcttgcaaataatattgtataactatatttatttatttatttactgagacagagtctcgtgctatcagccaggctggagtgcagtggcatgatcttggctcactggaataactcattattttaaactgatgacaattttacactgattgcatgaacaaacaagcaaaaagaaaattaataaaatctctacactataactttatccctcactttttaactttttggtgtttctgtttatatcttattgtactgtctatgtcttgaaaagttgttacaggccaggcgctgtggttcatgcctgtaatcccagcactttgggaggccgaggaatgcagatcacttgaacccaggagtttctgaccagcctgggcaacatggcgaaacaccatctctacagaaaatacaaaaatgagccaggcatggtgttgtgcacccatggtcccagttactcaggaggctgaggtgggaggatcacctaagccagggaggctgaggctgcagtgagccatgattgcactactgcaccctagcctgggtgacagagtgagaccttgtctcaaaaagaaaaaagttggtatagttattatttttgaacagttcttttcatctttctacctaagttatgagtagtttacacatcccaattacagtgttataatatttattttttgtgtacttactattaccagtaattatctgaattttgtaccttcagatgatttcttattgctcattaatgtccttttctttcagattgaagaacacactttagcatttcttgtaggacagttcttgtgtcgatgaagtctctcatattttatttgtctgggaaagtatttctccttcatgtttcaaagatatttttgctggatatactattctacggtaaatattttttttccttcggcactttaaatatgtcatgccactctctcctggcctgtgaagtttctactgaacagtctgctgctagatgtattggagctccattgtatgttatttgtttttcttatttactgctattaggattctttccttaatcttcgagagtttgattattaaatgccttcaggtagtcttcttcgggttaactccacttggtgttctacagtcctcttatacttgaaaattgatttatctctctagatttgggaagttcttgttatgatccctttgaatgaactttctacccctatctctctctccacctcctctttaaggccaataactcttacatttgcccttttgaggctattttctagatcccgtaggcattcttctttttttattcatttgtgtcctgtatctgtgcattttcaaatagcttgtcttcaacctaattctttcttctgcttgatcaaatctgctattaaaagactctgaggctgaatgcagtggctcatgcttgtaatcgagcactttgggaggctgaggcaggaggatcacatgaggccaggaattcgacaccagcctggccaatatggcaaaaccccgtctctactaaaaatactaaaattagttgggtgtgatggtgcaagtctgtaatcccagctactcaggagactgaggcctgagactcacttaagcccaggaggcagaggttgcaatgagctgagattgcaccactgcactccagccttggtaacagagagagattctgtctctgaaaaaaaaaaaaaaaagagagagacagagataaagagagactctgatgcattctttagtatgtcaactgcatttttcaattccagaattcctgcttgatcatgtttaattatttcaatctctttgttaaatttatctaataggattcggaatttctcctttgcgttgtcatggatttcattgagtttcctcaaacagctattttgaattctctgtctgaaaggtcacatatctctgtctctcaggattggtccctgattccttattttgtcccttattcggtaaggtcatgttttcctttatggttgtaatggcttgtgaatgttcatcagtgcatgggcactgaagagtcaggtacatattgtagtcttcatagtctgggcttgtttgtacccatccttcttgggaaaattttccaggtatttgaaaggatttgggtgttgcggtctaagtttttggtcactgcagtcatacatgcttcagggggcttgtcaagcttagtaacactgtggctcttgcagactcatagaggtatcacctttgtggtcttgaataagatccagaagaattccctagattgccaggcagagactcttattcttttcctttactttctcccaaataaacaaaatctttctctctgtgctgagtggcctaaagctggggatagtgggacacaagcacctctgtggccaccacaacttggaatgcactgggtcagacctgaaacccagcacggcactgggtcaaggcccactgtaaccactacctgtctaccatctctgttggctcaaggcagtagggctctacgatcaacaggtgttgcagccagccatgcttgcatccttcctttcagggcgatgagttgttgtctggaggaaatggtctgatgtcggaaaccttagaaatctaacttgtgctctagtctactgcagctgagctggcacacaggccacaagacttttccctcccctttccataagcaaaggagtctctccttatggccaccattgccacagggccttggggcatactgtcaggctactgccaatgtttactcaaggccaaagtgctcttcagtcagcttgtagtgaatgttgccaggcctgggactcactcgccttcaaggcagtgggctcccatctggcccagggcaggtccagaaatgccgtccaagtgccaaggcctggaatcagggacctcaagagtctgcctggtgcaagccttaatgtctctggggtcctaaataaacttgaaagctgcaagacaaagtcccctcctttattcttccctctgcttttctcaagctgaaggagtccctttccatagctacccagctgggaatgtgctgggtcatacttgaagccagcatggctctgagtctcactcaaggcccacagtgtatactacctgcctacagctgctgattattcagggctcaggggctcattactcggcaggttatgaatcctgccaggactaggtccttcccttcaaggcagtgatttctcttctggtccagggtatatctagaaatgtcatctgagagctagggcttggaatgtgtgcctcaggactctgcatagtgccctatcctactatggctgagctggtatccaggttgcaaaacaacatcctctttattataccttcatttctcctcaagcagaaggaaggagtatcttttggagctgtgagctgcactgcctgggattggaggaggggtaatgcaggccctcccttggccttcccatctggcctatcaccaggtcatgtgctctccaagtccactgactctgagcccagaacagcactaggacttgcctaggaattgcagtccttgtggcttagattgcctttcaagtttacttaggaccccagagacctttagttcatgacattaaggcttgccaaaacttaagttccttcctctgggatggacgattcccctctggctagggctggtctagatgctccctctgtgtgcatcagctaagttctgcttggtgttgctttccactgtgtcagggcatcgctgggttccaatacaaagtccggcaatcactgcactatccctcctccatgctcattgattcattgattctctccctgtgccacatggctgctgctgggggatgggggaggggtgacataggtaattcaaaaccgtcttttctaccctattcaatgccgctttcagtgatatgaagttaaaaccaggtactgtgatgctcacctgatttttggttctttttttttttttttgagacggagtttggctgttgtcgcccaggctggagtgcaatagcatgatctcggctcactgcaacctccgcctcccgagttcaagcgattctcctgcctcagcctcccgagtagctgggattacaggcatgcgccaccacgcccagctaattttgtatttttagtagagacgggttttctccatgttggtcagactggtctcgcactcccgacctcaggtgatccgcccgcctcggcctcccaatgtgctggtgagtcactgcacccgcccttgatgtttggttcttatgaaggtatttttttttttacatagatcgttgttaaatttggtgttcctgtggggagaatgattgttgaagtcttctgtatagccatcctcctctgcctcccaggcctaggagtgaaattctgggtcatacggaaactctacgtttcatgttttgaagaattcccaaactgttttccaaagtggctgcaccattttacaaacctaccaaaagtatatgagatttccaattttttgcaaccttgccaatacttgttattataggtactttttattatagccaatccagtaccttattgtgattctgacttgtgtttccctgattgctaatgaagttgagcatcttttcatgtgtttattggtaatttgtctaccttagagaaatgtctattcaggtcctttgcctattttaaaattgaattcttctttcaatgattgggctataagtattatttatatattagatacaagtcccagggttcatttttttaatcatatatatttctagttgctccagcactgtttgttgaaaaggcttttctttcttcatgaattatcttgacacctttgtcaaaagatatgtagatatatattaggacactttaattctgttacattgatctgtttttatatatttatgccattctaatttgaaggatttcctcacatttcctgtgatttcttgtttgacctatgagttatttggaagtacattgctttatttccaaacatttgaatattttcttacataggatattattatgggttgctaatttagttccgcggtagtcaggatcttatgatttcttccattgaaatttagagattcttctatagttcatgaatcataagtcttggtgaatactccatgagccgctgaaaagaatatgtattttgccattggtggtgtaatattatatgatgtcaatttggtcaagttgaacaattatgttgttcaaatctgtatccttaataattgtttgtatatttgttttattaattattgagaaatgggttttatcacgtccaactaagtgggttttctgcttccatttttgcttgacatatttggaaattctgttgttacattcctatacatttaggattgttatgtttcttcttcttcctcttcctcttgttcttcttctagttcttcttttcttcttccttctctcttttgagacagagtctcactctgtcacccaagctggaatgcaatggcaggatcttggctcactgtaacctcctcctcctgggttcaagcaattctcctgcctcagcctcctgagtagctgtgattacaggcgtgtgccactgcacgcagctgatttttgtatttttagtagagacagggtttcaccatgttggtcaggctggtcttgaactcctgaccccaggtgatccactcgctttggcctcccaaaatgctggaattacaggcatgagccaccgtgcccggcttgttatgtcttcttgataaattgatccttttgtcattttaatatgaccttttttatttctggtaatttgcttgtattaaagcctactttgtctaaaattcatattatatagtatattttccctatacttttactttcaactagtctgggtttttatatttaacgtgtgtcttgtaaacacagtatagttgggtcttgttttcttagcctatttgacaggtctatcttttatttagggtatttagtgtaattattgatacattttctatcttgctatttgttttatgtgtcctccctcttcttaattttttcttacttccctgacctctcttgggtaagctatttttcagtgataatttttatatcttctactggattttagtctgaattaatattataaaatatcatacacaacataaaaatcttacaatgtacttccatttttcttccccttctgtgctttgtgcttttcttgttatacatcttgcttctataaatgccacaaatctcccaaaatcttactatttttgctttagtcaatgaacttttaaataacttaatacaaacgtgaaaaagtattttatatttatccatatatttatcattcccactgctcttcattgcttcactgtagattataatttttatttaatatcattccctttatcttgaataatttatttacttttcatataatactgtcggattttatttatttgaagatgtcttacttcctatttacaaattttttaggggataaagtcactgtaagttgctagcttttttccttttagcactttaaagatgatattccattctggctcggcctggtggcttacgcctgtaatcccagcactttgggaggccgaggccgggggatcacttgaggccaggagtccgagagcagcctaacagcatggcgaaaccctgtctctatcaaaaatatgaaaattagccaggcatggtggcgtgcacctgtaatcgtagctacttgggaggctgaggcaaggtaatcacttgaacctgggaggcagaggttgtagtgagccgagcttgcaccactgcactccagcctgggagacagagcaagactccatctcaaacaaacaaacaaacaaaacaacattttgtcctctggcctacatggtttctgatgaaaaattatccgtcattcctgtatgcaatgtacatttttttatttggttgcttttaagagttttatctttatctctgttaagtcagtaactgtgaaagggtctgagtttttattctgcttgcaagctaactagataacccatcacaatttcatagattctaatagaagatggtggaagacaatttattactcacagcagcagtaatacacagactccttgagccccacttttttttttcttttttttttgagacagagtctcgctgtgtcgcccaggctggagtgcaaaggcgcgatctcggctcaatgcaagctccacttcccgggttcaaacaattctcctgcctcagcctccagagtagctgggattacaggcgcccgccaccacgcccggccttgagccccactttctacagggacttgtgatgagctccatatgttacctgaacacatagtgaagcacattacgaaaagggaccctggtcgggcgcggcggctcacgcctgtcatcccagcactttgggaggccgaggcgggcggatcacgaggtcaggagattgagaccatcctggctaacacggtgaaaccccgtctctactaaaaatacaaaaaattagccaggcatggtggcgtgcacctgtaatcgtagctacttgggaggctgaggcaagggaatcacttgaacctgggaggcagaggttgcagtgagccgagatggtgccactgcactccagcctgggtgacagagcgagactccgtcttaaaaaaaaaaaaaaaaaaaagggaccctaatattaggaggccctgaacttacacaggggctgttggcaaacctgcccaggcttccccctggagggcaaaagttgggatgtctcttcattctggggtaataaagatacagatatcgccttcattgatgtggatttatttatattccttttggcactttatttaaaaaatggttatatttctgctgaaatgcctggtttctttacccgttatatctatattttgctgaaagtgttttttaaccatatttatcatagtttttctttttaattccttgtcttttgatcccaatatcttggtcacctgtgggtctatttcgattgatttttttctcttgactatggctcacattttcctgcttttttgaatgtctaataattttttgtcatatgatgaacattgtgaatgatacattgtagatgctctgcattctattttcctttgaagagtgtcaagttttgttctaacagtaagttaaattattgaaaactcaccttggttttgtggagatttggttttgtgctttgtttggatgaatttcttttggttttgtccctaattctagggtatatcccttaatgctgggatgcagtctttcctgctaaggggtggtcattctagggtttcagtggaaagcacaatagaaccaagtccctctcagatggtggaactttcccagagacggtaactaactgctcagatctctgctcactattgatctccttcaggttatctagattcttcctccttgcattgttcattcaggaatctgccaagagtttaaaggagtttgcatgtagttgttgggcttctgttctttgtggctccctccttcaggatttcccccctcaaagacatcccactcagcctcccaagtttacaatttacaagtgtacctcacactactgcttatattccctgctagctgcaagctcttggagttttcagttcattgttttaaccagtgcttggcatatatacagtaggtgaatactgaagtgaatatttgtagagtgaagaaatgaactaataagttataggattattaaacctagcatcagatccccatctaaaaagattaagcagtagtgttgcacattgatttagagcaagggtccccaatcccctgttcatggcctgttaggaccatgttgggggtgggggattgagagcaaagcttcatctgcatttacaggcactccccattgcttgtattaccacctgagctccacctcctgtcagatcagctgcggcattagattctcatgggagtgcaaacactatcgtgaactgtgtgtgcgaaggatctatgttgtgcattccttatgagaatctagtgcttgatgatgtgtcgccgtctcctatcacccctagatgggattgtctagtttcaggaaaacaagcttagtgctcccactgattctacattatggtgagttataaaatcatttcattatatattacaatgtaataataacagaaataaagtgcacacaataaatgtaaggtgcttgaatcatcctgaaacaccatccactcccacctcccctatctgtggaagaattgccttccacagaaaccagtccctccctggtgccaaaaaggttgcagactgctgatttagagcatggtctttgggtcttgcctgattgcctgtccgtgcgtccttgatcaggttactcagcctctctgtgcctcagtttcctcatgaggtgtaaagcttcctaactcatagggttgccgtgaggattaaatgttttaggacagcttattgcctagcactcaataaatattaggtgttatcatggttgttgctgcttgtagagagcctggtcagcttcattttagcagcatcaaatcaagaaatggacctctctaggttgccaattcctaggggagctaaaatgttcactagatattgtgaataaatgtgaactttcaagagccaattcttcaagatggatcctgagtggctaactcggcctaaatctgttttattttattttatttttccgtttttacatgtcaaataactggactgtattggtctaaattcaaaatagagccaagtggtcacttgctgactaaaggtcacatatgctgagctctctggaaaccagcaccttcttgtttctgggattttcagagctcacctgaaccaaccaatcagagctcacctgccttggccaatcagggctcagctgtatcacccagtcaggactcagatgtattgatcgatcagaagttggccttgtaaagcaatcagaactaagcaaatttcaaaccttcatttgcacaggaaacctgtgtgggaccatttgctatgaaacccgagccttccctttgttctttggaagggcacctttgttttacaataaaggttgtgcctctccagtttacaaactgcttactggaagattccttctggagaacttttattcacaatatacaggaaatatggaatcatttaactcaaaatgtcattatacggtgccttacatagttacagaaatagaaaccagatagtgccatcaagggtgatattgaaaaataatagcgtctcgccaatgacaacctgttctgagcttatgtttgctaaaatagattgagtgtaaaatcacagctatttgcttctgtgccaccaatccccaaaccaactagtgaatgttcaccgtaagccaacagttacagacaggtgaaatttggaaatcaaataatgcaactttttcttgtgcccagtgaatggtaaatgaacaaggggtttgtagggactccagacagtccctgtcaaggctcacgcgtatctggggcgggctcagtttccggttcaggtactggaaaaataaccggagggctttgcagagcctgcgcacctggtagcgcacaggccagacgacggcgccgtggcgggcgcangnngaggtacccggcctgcccgcggcccatgccgggccatncagcggtcagaccagtcccacagcttcgcccccgccacccccaaccccggcccggcctcagctcgcccctccccgccctggccgccgcccgcccgcctgcgctcccggaaaccggagtccctcctgcgagcgcgcagagccgggactggcccagtcccccgcgcgcaagcgaggccccgcagctctcgccgcccccagccgggccctgcggcggccgttgggcgcgcggcgcgaatgtgccggagcaggagccccggggaaatgggtaagggaccacggggaggcctgggctgtcgggggcaccgctgctgtccgtccctcgacggtgaccgtgtgccgtgagcgctctcgccacgccggcgatcacctgcgacggctgtcgctgagggttagggtcctggagccgagagagggttgagagcgagcaggggaccctgaggatccagcctaaccgagcggcggagactggtgacggcaaggggacgctgtctccactgaaggagtcagcctgggctctctcgccgcgggccttccagccgcgctgttggatcctggctccaagccccgctggctggcgagcaggaggagcccttaaagccatccaggtgtcagaatcaggcgacactgagggctttgctcctaatctgtcatggccctgtgctcagtggtttctggtgctcatgaccaggccaggctgtggccccggcttggtgggagctgcccccccgggactgcactgggctagaggaccaggcagctcttctctacccccttgggtgctggccctcctcctaggtgtgtctagcaagaaagtatgagagatttctgggaaggtaaaaagtgtctgcacagctgacaaactcatatccctctaggatttctttttggctctagaattgtctagctcatcttttctgtaggatgatggagctaagaatgtgagtgagttctttgctggatttttccacgctgcaggatggacttgctgctctggtcaatgcactcgccagacctctgtgtccatggtccgcatgtctaggtcaggggaccagtatcaaagtgaagactgggcaagtaagccccacctgcccttgaacctcaggcttggcccctcccgaggcccagagctgattgaatgttaattagcaactaattggatgtccatgagactctctacataaagaacacaccaaggtcaggtttagacagtgtgtagtgccaagtgattcattcttttcttccagacgtgatatttcctgtatgtgaagcatataaagaagagtcattcattcactcatctagcagatatttactgagtgtcaactacgaatcaggcatgcaggcactgcgaatactactgctcttatttgcatatgggttggaaagagaaaataagcaagtaagctgttgaatgacattatttcagagagcaataaatgctgaaaacacaaaactgaaaaattcccaaaaagagggatatggggcatgacagtgaaacgtataagagaaattgggccttaactagaaagtgtagcaaacagactttctaaattaggtgggaaaatggtctcatgttcaggtcctcaaaatctaggggcacagaatgaggtgccctctgttcctatcagcagggagttataagctgcttataaaggatcagtgagaaatgaactagtggtgagtagcccctctctaagagtatgtttcttattgggaagcttaaatctaagacagagattaagattcccagaaaacatggtctattgactcactcactcatttgtatatttattcaacaaatatttattgaaggcctgtatgtcccaggcactattccaggttttaaggatacatcagtgaacaagacaatcctgcatctcacagagcttatttcttgtgggagaaacagacaataaacaacatagcaattttaatgtcgtgtcagatgaaggatctgaagaaaagcaaggcagcttaaggggttaaagttgataggggctgctgtgttcaacagagtagtcaggacaggctgtgcttagatgaaatttgagcagagacgtgaatgtatgtgggacatagccatgtgactgcctgggggaagaacattccaggcagagggaacagcaagtgcaaaggccctgaagccagagcgaggcatgaaaatgctgggcatgctggacgaacagggaggaggtcagtgtggctctggggtggggagcaggcatctcagagacttgtcttaaaggaggctggggtagggctcagccttgaccaaaggcacccaggaaagcagatggtgtccctcactgctgtggcaggaagatttacaatctccaacttatggacaggcctggtagtttatgccaagtagggcaagaagtgatcaacagagatggagagcatgtcttttgctaggagaggtatcatttgcttttcttactcacactctgcatccttcaaaacattatgggcagcctaactaacatggtgaaatcccgtctcagctaaaaatacaaaaattagccaggagtgttggcgctttcctgtaatcccagctactcgggaggctaaggcatgagaatcgcttgaacccaggaggcagaagttgcaggagcggagactgtgccactgcactccagcctgggcgacagagtgagaccttgcctcgaaaataaaataaaatataataatcatcataataataacattatggggccacacaatgagaattaagtgggcagcagaccctgaggttttcaaatttagtattaggttggtgcaaaagcaattgtgacgtttgtcattacttttaatggcaaaaaccacaattgcttttgcaccaacctaataaatgcccagggaatgaaagatgagaaaaaacctgccttccgggaaaattccaataatctatttttattttcatccttaaaactattagatgatctcattaacaggtttttcttaaaaaaaaaaaaaaaaaaccagcccaagagcatataaatcattagcatttattgaacacatactatatgccaggccctactttgggtaacttgtgtgcagtaacacaaataattcccgcagcaagtctatgcagtttatactattatgatcccacttcacagatgggaaaactgaggcccagagcaagtaagaaagttggccaaggttacatgggtagtaagtgaagaatcagaatttgccatcagctggtgccatttttgagccaagtgctctcatactatgctgtaacaatgtcagagagccaaccttgggcccaaattttgaagatattctgtccaccaaaatggacttctgactgccctaacttttggagaagctcctagttggcaaatgaaattggtccctttataaaatagtcgtggctggccgggcgtggtagcctgtaatcccagcacttagggagactgaggctggcagatcactcaaggtcaggagttcgagaccagcctggccaacatggtgaaaccccatctctacttaaaaagaaagaaagaaagaaagaaagaaagaaaaatacaaaacttagccaggcatggtggctcacgcctgtattcccagctacttgggaggctgaggcatgagaatcacttgaaccacgaaggtggaggttgcagtgagacaagattttgccactgcatcccagcctgggtgacagagcaagactcttgtctcaaaaagaaataaataaataaaataaaatagttgtggccatgtggcatattccacaaatactggtctcagaccatggtgaggatgcgggtgcagggtgaggactacatagggtgcggtaggtcagtggatcagatccagttagccggggctcagccttgtgcccaggaggctaaagcaggaggattacatgagaccaggagggcaggttttgtccatagtgcatgacaacagatggttagagagaagacagctgctgggtttgagcacattctacttctctccttctttaaaaaagatgtttttaagatagtactggccgggcacagcggctcatgcctgtaatcccagcactttgggaggccaaggcaggcagatcacctgaggttaagagttcaagaccagcctgaccaacatggagaaaccctgtctctaccaaaaatacaaaattagccaggcgtggtggcacatgcctgtaatcccagctactcggaaggctgaggcagaagaatcgcttgaacccaggaggtggaggttgcggtgagccgagattgcaccattgcactccagcctgagcaacaagagtgaaactccatctcaaaaaaaaaaaaaaaaaaaaagatagaacttacataggttaacactctttaaaaatatttttaaaggcaatatttacatgtattcaaaaatctttttaaaatattaatgcaaacagcccttaaggtacacagtgaaaaatctctttccctctcctgtcctgtcatctccaattctcctcggaggcaatttcttgagaatactttcagagcgacatattctatttgtaaacaagcatatatgtatgtataccttccttgtcttcttctttttttaaaacataaatagtaggaaataatacttaggtatgcactttttaaacttaatatacttaatcattctgcttcaagacatatagacaggtttcatctttctttcttttttttttgagacggagtcttgctctgttgccaggctggagtgcagtggcatgatctcggctcactgttacctccgcctcctgggtcaagtgattctgctgcttcagtctcctgagtagctgggactacaggcatgcaccaccacaaccagctaatttttgtatttttggtacagacggggtttcaccatgttggccacgatggtctcgatctcttgacctcgtgatccacccgtctcggcctcccaaagtgctaggattacaggcatgagccaccatgcccggctttgctttttttttttttggaaacaaggtctcactctgtcacccaggccggagtacagtggtacagtcatggctcactgcagcccgacctcctgggttcaagtgatcctccagcctcagtgccctgccctgcccaccctctgcccagtagctgggaccacaagcaggcgccaccacgccaggctgaattttgtaatttttgtagagatgggagtgtcactgtgttgcccaggctggtctcaaactgctagcctcaagcaatcctcccacctcagccagcctcccaaagtgctgggattatagtcgtcagccaccacacccgccttcatcgtttttaagtacgtatatgctgctgtatctcattgaatgagctaccatatttatctagccagtgcactgtgggtttataagctatttcccccatctctatttgtttgctgtgatagacaataacacattaagcatacctgtacctatataatctcagttctgtgactgtttcagcaggaggaattcataaatgtggtttaaaagttactgccagtctgctttccgaaggcatgcatgtctttgtacttaggagagtgctgctttcccctcggctccaccaacttgatgtatcatcaactttttattcttcccaatttgacagatgagaaaaatgccatcatgctatagtttaaataggtatttctttctagtgagttgtgttacaggacttacaagctatttgtatttctgtggactgttcatatacttggcctatgttttcaattgggtttttgttgttgttactgagttatcatttcctcttcatctctcattcctagtcccagtgatttcccctcacacttaccctctaaccctaccctcatgagcaacagctactctgacatatttatgataggtttatccttagatttggatgtatttaagaaagatatatgatgttgatttatatatgcatgtatttttaaccctacataaattgcactatggagctgggcacagtggcttatgcctgtaatcccagccttttgggatgctaaggtgggaagattgcctgaggccagggtttcaagaccagcctgggcaacagagcaagactcttgtctccaaaaaaaaaaaaaaaaaaaaaaaggtaataataaaaaaaattagccaggtgtggtggtgcactcctattttcctagctacttgggaggctgaggctggaagatcacttgagcccaggagtttgaggctgcagtgagttattatagcatcactgtactagagcttcagcaacagaatgagaccctgtctttatggggtcacaattgcttcgtgctataaatccttaaatttttcttgctttttaaaaccagcactattttttttttttttttgagacagagtctcgctctgtcaacgatcttggctcactgcatcccccgcctcctgggttcaagtgagcacgctcagctaatttttgtacttttagtagagacggggtttcaccatgttggctagggtggtctcaaactcctgacctccagtgatccacccgcctcgggcccccaaagtgctgggatcacagttgtgagccaccatccctggctaaccagcactatgttttttttttttttttttttgagagtgagtctcactctgtctcccaggctggagtgcagtggtgtgatctcgactcactgcaacctccgcccccccaaggttcaagcaattctcctgcctcagctactcgagtagctgtgattacaggtgcctgccactgtgcctggctgatttttgtatttttagtagagatggggtttcaccatcttggccaagctggtgttgaacgcctgacctcgtgatccaccctccttggcctcccaaagtgctgggattataggcataagccaccgcacccagccaccagcactattttttaaaagatctatttgactgcagtgtgtactcttggtttgttgcttctaattgctgcattgtactctgtagctggagttagggagttattgtaatagtcaattcctactggattggtctagaaaggttgtatggagaattggcattatggggtgagcctcgaaggatgaagaggactggggaaggaaatggagctgtccaagaggacgtatgaacatgccaagaacatttagggaaggacccgttgcctgctgaggccataggtcagggtgtggttgtgtgtggtcataggagaggctggagaggtctcagataacagcgttggacattccctaaagcaatggaagagagaggcagttaggggcattgttagagaatgggggacgagggtgccaggtgaagattttctaggacaggagtgatctctcagtggagaattaggcaggcaattgctgcagtcctccagaaaagcgaggacgcgctctgtgagctggtggagcccaggggcctgcaggggaggaggatccagcaggactgggtaccaaagccatgaggggagagggacctgggctggtgccaaggttgctaacttgggaagctggtggatgtgatgccagtctagacaggtcctgggaggggcaggcacgggcatgggatgggaaggatgcttacaggcatgtgagcaggctgcgaagtctgatgctctgctgtacatccagctagaagattcctgctggtaattaagacgctgggctagagagggaattgtgagcctttagtgagtaggtgggaggttaacatgtgggactgggtgaggtcctcacagaagaatgtgagggcgagagatgcccatcaggaacagagcatggggcaggtttacagggaggagctgacaataatatgtggtgcccttttgaactctggcctttcctggcttgacaacctctggaaattatcctcttggcatggactctgtgctgctgtggagcctgggcaggggagggatgggaggtgggtatatacaataaggcccaacgagtggactctgcctttctggagctctcagtgcggccttggaagatgcatagatgtattgagtcagagaggagggaaatggccccaggaagcttaggtgtgcgggctctcctcctggggtatgagctccgaggccccagcgctcttcctgctaggagctgccaaaccagccgtcccttttgtcttctgaagatgacaatggatagagtgtgggtcagctcctgctgctgcagagggcactgcgaagctcacggctttgttgctatgggcagggttaagcatgagcctccccaggggaacacgtgaccctttacaaggcccaggaaatgtcctgctctgagtttgtcttcctccttcactttgtgagagcatacctgttctctgtttaatgacagagctttgcttttctgcaaatcatacccgcttgaattcgtattcagtgattggtggccaatcagggctaatgagcattataaggaagactttcagctctttctccaaaggagaaaatgctgcaaaggtcagatccagctgcacaaagtgtctgctctttacatatccctactataatttttgagataagagttttgatatttatttatatttattatattatcaaataatatttaatatttttctgtgaatacatatacttaacaacataaagtagatattttctactttactgtgttcctaaatcacaggtttgctacactctatcttattctagtgcatattgaagtaaatgcttaactattaatgtttagtatgtgtaccacatatccatgtaggcaaacacagcctcagatttgtgggttcatggagaaggtaatcttggggttcatggagaaggtaatcttgggttaatcttgttaggatatgctttatcctaaccctaggtaggggaggaaataacccttttcctcttccttcttaggtttagggactgggacctgcaaattaaactgacaaaagccagattaacagaagaaaaaggttttactcacatgtacatgggagccaacaaaagtagtagctggcttgttagatagttaaagttcaaggccatgtacctaactcagtaggggaaagggagggggcagaaacagtaactttattatttttgctgatgacaaacataaagtatatttattttaaaaagttgaatacatatgaaacaagcatgaagaaattgaaatcatgtatactgttgccaggcacagatagctactgtcaatcaatgctttgatgttttattgcctaaatacacaaacacaaacaagttttttaaaaactgggaccataggccgggcgcagtggctcacgcctgtaatcctagcactttgggaggacgaggtaggtggatcgcctgaggtcaggagttcgagaccagcctgaccaatatggtgaaaccccatctctactaaaaatgaaaaaattagccgagcgtggtggcttgtgcctgtagtcccagctacttgggaggctgaggcaggagaattgcttgaatctgggaggcagaagttgcagtgagccgagatcgcgccactgcactccaggctgggcgacagagcaacactccatttcaaaaaaaaccaaacaaacaaaacaaaacaaacaaaaaaaaaaaacttgggaccatagtgaaattataaatagttttcttatttaacaaaattctatgagcatctttccatttcattagatactctttaaaaacaaaatggctaaaggttgcctaggttcaccatatgggtatatggttacccagtaatctatccatttatctcattctctattgtggatattgaggttatgagcatttttgccattataagtaactgcatgcacatgtgtttcagcagatgttttgtgggtgccttctggtgccaagggggctgggggagagaggatgaataactacagtgcccaactcactgctcatgtgaaaaggacagacctacagcaagtgggcttatctaaaaaagagctgggaaggagcccaagagaaggaccttgagagagagagtctgagccgagcttttgtgctggggcagaggagagccagggagctgtgacctgggtggccctgtccctggccgtctgtccacagacactgggtgtgcttcatttgactggccacgggcgggcaaggacagcctcccaaggtcactgcgttggtacgggattgggcaaacaagtgcagagatggaggcttgtcattcacttttataatcacttcctgcccttctccagaacacccagggcagcaccagcgcacacatgtgctcagaggttggtgatgtcagcactgggctgggctgttctccctttcctcttttccctgcctctaggagacttctccctcccactctaaggtcacaggcggcaaggagaggcacctttggcccctgccacgtgcccagtcattggaagccctggcccagccctacctacgtgctctgatcctgggagcccacagctgagctggccagggggactgtaaacatccaaccaggcagaggaatggttggagaggcaggtgttctgtctgcccttctccagggccgaggcttgtggaggtcagacagctgggagggaagagggccttttctggagaaaggagcatgtggccgcctcactctcagccttctctaaagtatggagactttatggagactaatttgaagcccatttagatgcttcagtcctcctttctcaccctgccccaggacaatatttcagctccattagcacaagggttttcctgaacttccagttgggagacgtgagtcaggcttaccgtgtctagctctgctcgtttggaaagaagccctgctccccacctgggttttcatttctgcagcatgcagtggtaacggggtacagcagaaagtgcattgggaaggttccacaggcctaattccaatcccagtcttaccatttcctgcctgtgcaagcctgagtgactgtggaccctccgtctcctcatctggtctgtagcctggagatgataaagcccctaaccctgacctcagacccccaggaactagagatgatgcatggagaggacccggtaagtgtcaacacattggggtcctcaggaaagtgtcatggggtttatgtcaggtgccatttctttcattggtggcctctctcctctctcccctcgcctcccaggaggggctgtatgctgaaatccccagggcccctctcctggaaggtgggctccactccctggtctgtgctctgtgtggagaagccacctgtgctgagcagcttcttctgcaggcaaacaggaagcatcttaccttgagggaggcaggagagctgcctggctgtgctgtgtgtctgctgtgttgtgtgtcctctgtgccgtggggaggaggaaaggctggggagggaactcccaacacacacacacacacacacacacacacacacacacacacacacacaccccgtacatatgcaagacccactgcgtggaagcaacggggagaggcaggtcccattccctttagtacagtcttgaagagaggctgagcaacctttattcattcatcaaatggctgtggagcaattgtgagccaggcactccgctgtaaagcacatgggccagtccttgccctggagaagttcatggtcaaggggaggatgggaacccataactaagccaagcggcaggcctggacttggggaagggggaagatcactggtgcctccctttcagcctcaggaaaccatggattaccaggaagtctggacgggacggggcagagcccgaacttgaggaggtgacacttcacctcttggtctcctggcttctgcctccgcatctgctgccaaccccacttgtccataacctctggccatgttcaatatagatcactttcgcttctaatctcctccacttttcagcagcaatcaaccaagccaaccacttcctccgtctgaagtaacctcctcttgtcttctgtgacaacatggctctccccttgcttctctcacctttgtgacagtcccttttcagtctcctttgcagacctgtcccctcccatcccaggtaggcaccaccttctctctccaagctcagatgggctccaggtgcgtttttcagttgcctacttgaaatatctcacaggtagttcaaatccaatatttaaaaattaaactctgggccgggcatggtggctcagcctgtaatcccaacactttgggagcccaaggtgggcaggtcacctgaggtcgagagttcaagaccagcctgaccaacatggagaaaccccgtctctactaaaaatacaaaatgcgtggtggtgcatgcctgtaaacccagctacttgggaggctgaggcaggagaatcgcttgaacctaggaggcggaggttgctgtgagccaagatagcaccattgcacttcaacctgggcaacaagagcgaaactccatctcaaaataaataaataaataaataaataaataataaataaataaataaaagttaaactctggattttctcccctgagcctcatctcccagttctttcctatttcaggaaatgccattattactgcccatctggttgcttaagtcagaaatctggaagttgcccatgacttcccctcccatcttgtcccctcgaatataatgaaagagcaggttctataatcatcccccatatgcattcccagccctatgcctctcttctttgccgtgactgccccagccaagccactctcccccattgcctggactctcacagagcctcctgactggtctccttgaacttacgtagcctctaccatctcttctccatacagcagacaggtccatctattctccatatagcagatggatgatcttaaaagtaaatacacaaatactctttgacctgtcatttctctgctttaaaaatgcaccctgggggtcaggcatggtggctcacgcctgtaatctcagcactttgggaggccaaggtgggcggatcacctgagggcaggagttcaagacccagcctggccaacatggtgaaaccccatctgtactaaaaatacaaaaacgagctgggtgtggtggcacacattagtaatcccagctactcgggaggctgaggcagtagaatcgcttgaactcaggaggtggaggttgcagtgaaccaagatctcgccattgcacttcagcctgggagacagagcaagactccatcttaaaaacacacaaacaaacaaggccaggcgctgtggcacatgcctgtaatcccagcactttgggagaccaaggtgggcggaccatggggtcaggagatcgagactatcctggctaacacggtgaaaccccgtctctactaaaaatacaaaaaattagccagacatggtggcgggcccctgtagtcccagctactctgaaggctgaggcaggagaatcgcttgaactcaggaggtggaggttgcagtgagccgagatcgcaccactgcattccagcctggacgacagagtgaggctccatctcaaaaaacaaacaaacaaaaatgcaccctgggctggatatggtggctcatgcttgtaatcccagcactttgggaggccgaggcaagtggatcacttgaggtcaggagtttgagaccagcctggccaacgtgatgaaatcctgtctctactaaaaatacaaaaattagccagatgtggtggcagatacctgtaatcccagctccttgggaggcagaggcaagagaattgcttgaacctgggaggcagaggttgcagtgagctgagatcataccactgcaccccagcctgggtgacagagtgagactgtctcaaaaaaaaaaatgcaccctgtcttgccactggggtgcctgtgggatctggccctgcccctcctggccccatcttttcccacaccccctgggaccctgggactgcgctgcaccacactggcttgctttctattccctggaaatgtggagacatttcccacctcagggaaggaattagaagccgaaaatgcccttccatactggaccctcctcaccaggacatggtgcagcttcagagaccttcccgaattcccacggcagtgtgctcacccttgctgctctcttatttctctctgcttcttcccaggcattcttcacaatttatgataaagtttgattcataagtccgattgtttattttctttctctgtcagtagactggaagctccctgagaacaggagttgttctgcagtagacaggcctatgcaaacctaccccaaagtctgaggaagttgagaagttgaagaaagaggctgagaaagctaggggactttccaacagaagccatgtaggtgtctcaggcggcaatgagatgagatggtggatccccgcattagcacccaaacccagggctcatataccatagggtaggagtggttcagatgggatttataagacaattgaagtgtgatatcatcaaggttgtttgacctacgagtagcacttacggacttacagtaagtatctgctcttacacaggaaacaatagataaactggaaattgtagaggccctgccttggaactggggtcactcagttaagtcaatgtggcaggttagcttccaagatggagttgcttcagcttccacaggggtcatgtgttttattcctgataggtcagcggcttgtagcatagagcctgcacagagcaggtgctgactttgagccttggccatgttccggagacacccctagcggctggggcccagagtggagggtttgcatttaggtcttggtgacttcaggtttctgacttacccagcttgatggagagagagagttgtaaaacctgaaatatatgaggaagaagagcttggagaagagaaggaaccaggtttgccttataaacattgagtttgaagtgctggtgagataagcatgtccccaacatttgccagccctgggaagtggagagtggaggaccccatctgatatgtccaaatacatgaaagttaagactaaagctcacaaactgtcatataaaatgtgtcctgccgggtgcggtggctcacgcctgtaatctagcactatgggaggccgaggcgggcggatcacctgaggttgggagttcgagaccagcctcgccaacatggagaaaccccgtctctactaaaaatacaaaattagtcgggcgtggtggcgcatgcctgtaatcccagctacttgggagtctgaggcaggagaatcacttgaacctgggaggtggaggttgtggtgagcctagatggcatcactgtactccagcctgggcaacaagagcgaaacttggtctcaaaaaaaaaaaaagtgtctattctcctaattctcctacctcccactttcatcatggcctggagctccaggtttgaaggaggattcttagccgcctctgaatgttgctgccacagcacagcccaccccagcctttggcccacgccacagctccacctccctttctcttccccaccctgctctgtatcacacgtgcatgtgggtgggtgacctgcccaaaggtttgagctctctctacctgctcccgtctctgctatcaggactcttgccagcgcttcacccagtctcaggctgcatagggcagcggtgctgtgtgcccacatggggaggaggccatttgggccccagaagtggagagtctcgggatctggggcacgcagagtgtggtggagaagcagggtgcacgggctccatgttggtatgttcctgtggactctgtaccctgcagggaggggtgcggctgtaggtgagctagagcccgaccctctcaactctgggtcagggtggctggtccccactgctgtgtggacatgcaagtgagggagtctctgggtcagctggaatcatgaagacgagagttcagggagggtgggagtggtggagcctcagcagagaagttgacggtcattgatgttgaggaagtagattgtgtggagggaggagaatggcatggtgtttgcgctccccaccagcctcacttacacttgtggacactgcggccggtgtcctgaggacgtgtgttgggaattcagccacggggaatggaggtcccttggttcatatagtcacaggctctgtattctaaccccagctttgtaattttccagctgtgcaaccctgggcagtggcttagcatctctgagcttgcctccagatccggatctgtatgatggggttattaatgcttcataaagtaggtgtgaggagggattgaggtactattgggagaaactttgtaactaaaaggcaattgtatcatttgcattattaccagtgacatgagacatagtcacacaaaaattgaaatgtcatttgttttaaaaccagaaattgcccaacttagggccctcctgtctctcactgggtgccctgcaggggaccaagagccagagcaagactgagaacctggggcagaagcgcagggaggaaggaggtggggcctgcttaccaaccaggcctcggccccttcccctttcaatcccaggcccctgcatggcagggagaggccagttccaccatggcaggttctttctaggctggtgtgcagggtgggggcctccaaggagcaggggcatggggaaaggggctgcaggcgctgggcctaggaagagaggctcttatcttgtgggcaggaagtgtgaggtgttgagcagctagggaaccctggggaggcggcggggagcaggaggggtgtgtgttgtggtgaggaggagcggaagtcggaagctccagccgtcacagccacattcactgggcaagccgactgtgagccaggaagtgctcttggggagcccaggccaagccatccattcttgggtcctttggaggtgagctaagtgggtctgcctaggttggggctggtggaacctgtgggagcagggaatgtggagagtcacatgtgggtccttgtggcaggggctggggcaggtgggcaggggagaggcgagggctctggcagtgccgtgtgcacctgccatgagcctgggctaggctaggcccctccttcccccttcctgctctgtgtcccgtccccctcctccctcagcctacccctcctcatctgacccttctctgattccctgccctggccccacggacctctgttgtttcccttccctggctccccgcagagcctctggaggtctgcaatagtgaagggtgaaggaagctccttgctaatcctcttgtgagtgtcactgcgtccccagtgactgctctggctgagtacccagtgggggcttttgtggccaaaggtcccaagtgattctcgaccctagactctggagagagggagtctggaaggcctgggtttggggtgggggtggctctgggtgtggttgctgcaggagctcagagtcaacttggccatcagggggctcccagcttcatcttgccttccaggaccatcctggagaagctcgaggagaggtaaggggaccctccttactggtttagctctggcttaggcctgttgtcctgatgggcaacaggaaccactgaactctcaaagtgtgcctgtgtaggaaactaaggcccactgtagtcattattgttatagtgaaggtagctgcatggagggaaagtcccctgacactgccattccccccttattccagggcctaaaattccacagttgaagtcactcctctgctagaatgcagggaagggtggcctgtcattagctgatgataaatactcctccgttcattggaccttggaccagctttaaaaagtggtccccaagcaggcctgtctcccagctgcctaggactctagagcatcccgtggccccctcctcctacagacaaggaaccgcctagcatggggatcagaacacaggctgctgagctctttgttggggaagggggagagacccacagaaggggtgagggatgtggggtgagaggacccagggaggagaggcccagcctggccccagccccctaggggtctttgtcctccccaggcagcagctgtactgggtcccctttgtcattctgtccctacccccgtgatctctcccctggatactctctgcctacctcagaccgccatcctctgctcccttcctgagcctctgctggcctcaccacaggccttcagtagcactgtcttctctctctctctctctctctgtgtgtgtgtgtgtgcgtgcaaatttgcatgatggctctttctgtgtgggcaggatgtggggccttctcgagtcatttctctcacggtgcttcagaccccaggttcagacagaggcctctgtcctgcagctccaggccagggagttccactcatggttcctgcctgcagcaacatctgtaattcggcagcttctcgggctgcagagggacaggacaggtcacctcctaagtccttggaccggccagaagccttcataccttttccataggagggaaaacatttccagggtaaaaggagggagcgtttgcttgctgagtctggaagctcaaaaagggaaacagagacaggcaccctccggatgaaggttcagggctgactccttgaggaggctgagagctgagcctgaccaggagggctatttgtttgtttttgttaattttggcttctctaaatggacagcaaaacaacaaaattaaactgagcaggacacggtatttcctgagcacccaccaagggccaggcccagcactcagacccattccaactttacaacaaacctgtgaagtatagctttattgggtcttggttccttattttacagaaaaggaaccaggtggagtttttcacccagagccacatggcttgtcagctgtagagttaggatgggattctgctctgcattcttcactatgaccctgaagtgggcaaaggagggtggtcagtgcagggcacccaaggccatcaccttcctactcagggcaggctcataccccagcctctgtgcccggtctccccgttcttcagccagggtacaaggctgcaatgccaggctgagggtgaaaaacaaactcactgttagaaagcaccgtccgggtgccaggtgtcagctgggttccttcctgcccccttgggtcaaaaagaaattgccttgaagccgggggtggggcaggtgggagggactctgccttctagtccctcagccattgctttctgtgtgtttcacctcccacaagagggacataaggcttagcccttgcagtattctccatgagaaacatacaccccctccccaccgtggtgaagattctctgaaatgtagtcagctgtgctcaagaagagtggctggttggcagcagagtggagcagtgctctctcttccccacctcggctccctcccctctgaaccctccttaaactttcagagccacctcagagctcagaaaaactgaagggccactttaatgtagaggtaacagaactcaactgatgtgacaggtggcgattcctttgctgcgaattcctttccttctgctttcgttctggttgggataacagacaggagatttcaagagagattttgctaaacaccaggggtggaaaaacacaagtaaaccaagaaaattttagatgcgtaagacctgggctctgctgcccagtttctggcctgcctctgcctagagggtgccatcctacctcagggatcaaaggctagttccatcctccacccttctgagatcagaccgccctcacctgggtgaccggtaggactgcctttttggccttaggaggtgacttcaccttttaggtcatcctacctttccattcaggcaagagcaattaaaaaacagaaggaagacatcttttaaacacacagttacacagtgccccctgcacaaatggagagcacaaacaagacaattgaatgggtcctcctttctgttcgggttgctgcctgggagccaagacccacagggacattttggctgctgacctggtaggaacctacctctgggggagcactgcccttggagcactggacttcctggagaggggaggatgaggtgattggtcatgggcagactggcccccgtggggaagccttcatattataatgatgctaattctcttctccaagcctcggtcttccccgtcttctggcctggttgttgtggagggagagttctgaggatccatcccatcagtgtgtctctccatttgtctgtccattcatctagccatcccctctcttattttcacaaatgttctacaacgccgactctcagtcaaggaggcgctgtacaggagtttgagtgactcaagtgaattcaggaatgtccaagagaattgatcagtggggcaggaggagagaatgatgcttaagagagctgtaacctgggttcgcacaccagctcaagtcacaggggggcctgaacctcttacgtcaacgctaacctttaagtttctaatccacttgaactaaacccctcaagtcaatgctgatctttaaatttcaaatccagttgaactaaagtatgcccccagaccttgtgggtcggagtggttgacaaatcagttacataatgtgactatgccattcaatattttcatactgagacacagtggcgaacaggaaacataaagaacctgccatcttggtgcttaccttctaggcaaactagaaccacgcgggtaaacacactggcaactacacaccgggataaacgctcagaaagtaaaagcgaggggtggagtatagtcacattgagtttaattggtttaaaaagtcatagccggccaggtgctgtggctcatgcctataatcccagcgctttgggaggccaaggtaggtggatcacctgaggtcaggagtttgagaccagcctgatcaatatggtgaaaccccatctctactaaaaatacaaaacttagcaaggcatgatggcgggtgcctgtagtcccagctacttgggaggctgagacaggagaatcgcttgaacctgggagtcagaagttgcagtgagctaagatcatgccactgcactctagcctgggtgacagagcaagataccgtctaaaaaaaaatgtcgcagccagtcaaactacatgccttgtccccactgaatacctgatctgtctccacccttcctgtctccattgccttgggctcccctccactgaccagttcctcacccccacccctcccaggctcctcaggtgctgcaggccccagagatctgctctcttctctttgctcggaaagctgctgcagcctctggtatttattttttttcctctgaaaaaacccagcaaggaacgctggtttttttctgggaaggcaagtccaatcctcacttgtatctagtatcagcattagcgtgtacctagagggctgctttatgtacatatacatatctatttgcaagtacatatgtgcaaagagagacaagtggggtttcctctcatcttatgaaaaattcaggatgtcctttctagcaggcccagccccgcattcccactcccattcccatattggcacgggaacgtttcttgccaagtgagttgactgatggtgagagaaggtgggttggcgttatcctggcaaaatgctctggggctcatagggccatgaggctggcactcattcaggtacaatgtgtggagttgggtgaatgagaacaggagaagggatcagggattttgcatggcaggagaactatttgggcccaaagaccaggactttacagagacgtggagggtggctttggggtctgggaagggaggcagttgagtagagctagggatgtcctatgttctggtacctgtaaaccaggtgcttctccccagctttcccctctatctctaaataaacatgtcttcctagtcatttattataccccatgggctggtgtcttgaggaggcgcagtgggatgtggtggggtgagtcacctccttgctcacactcggttgctctccaccaggcaggtttggggagggagatttggggtccagggtgttttccctagtatagacaatagatcctgaggctcctcatcccttctgccttagaagtagaaccgtctcaggcctcttgcccagagagcactgagggtgacaatgggcagctgcatggggagcagagagtggtatggacttaaggagtaaaccatacaaatcctctgcctgttacctggaggtagtggtgggaggtggagaggcagaacctagaatgatgagtgaaggctggatccataggagaagaatgaaaggcaagactgttaatggaaagggattccaatccagaccccaagagagggttcttggatctcgtgcaagaaagaattcaaggtgaatccataaaatgagggcaagtttattagcaaagtaaaagaataaaagaatggttactccataggcagagcagcgcttgggctgctggattaaggatacccgtatcttgagccgacctcttatctcatcctgtgacttagaatgcctagcttcccgggaatgcagcccagtaggtctcagccttattttacccagcccctattcaagatggagccactctggttcaaacatctctgatgagaccaaatctggtccatttgattcagagcatcaagtacaagattaaacataagaaagggcctctcctctcggaaagtcagcctgttggggaggctgccttaactaacaggtggaagggccctgaaggccggtcagggaccattccgggtgggctggaacatcagaatcctgagggtgtcatccagcaagtctagattcttgttattctaaaacaggaatgcaagggttgggtcagagggaggggtaaaaacccagaaagagatttcttttggaggcacttttagaaaaaggatactttcaaggtgaataagaaactgaaatgcatactggccctccttccttctctcaggtgccctccagaaaaaaggcgtggggcaaagcaatgttttctaggtgaccttgaataacagctggaccccctgaccttcgtgagagagcgctgagggttaccatttactgagtgtctaacagtgggccaagcctgggctgaaggccgcgcgaatcacctccgttaaccctagctccccactgcagtggggctcccagatgctaaggaactttccaggcttatccactcagttgtatgtggcaggacgagggtttgagctgcagtccatgtggctattgattcagcttatgttctctagtgctgggcagggaggagctgacccccatgggtttgttatgtgtgctggttagggccctgcatgccagtcaagctcctgtcctacagcctgcctgtgggaggatctcagtgtgaggtctggagccctggacgaggccacctgggctcactctcttcatactggagcagggaaagggcagagagagctgcagaccggaaggtggatggtctggggtcggagtccggcccctgtcaccagctgtgagtcattaagccagactcaggctaaggcttcctcatctgttaaacagcgacacgcaggggactgctcatctttcaggtgcgaggttgggggagtggtgggtggggacaggcatggttaactgcatgtggaaggggctgttgttcttgggtatctggaagtcacacgtggttataaactgggagcatgtgtgtgtttgttaatagtcttgctccccaaaatattctaatatagctcacaagcacgcacgtaagccttcaagatagaaatctgtgagtgaagaaaatgaggcaaagggaaaataagaaaagacagctgctgggtgcagcggctcacacctataatcccaccactttgggaggccaaggtgggcagatcacttgaggtcaggagttcgagactagcctggctaacatggtgaaaccccatctctactagaaatacaaaaaaaaaaaaaaattagcagagcatggtggtagacgcctataattctagctactcgggaggctgaggcaggagaatcgcttgaacccaggaggcagaggttgcagtgagccaagactgtgccgctacactccaacccgggtgacagagcgagactctgtctcaaaaaaaaaaaaaaaagacagctgccaggggagtgcttacgacatgccataaggacctgtgtacttgaccctgcacttccactttgtggagagccagcaccatgagacaaacaagttacaagcttcacagtgtgctttggatcaaaacaagccagctattctgaggaagcagggctgctctgagagccgtgtaagcggtgggctgcatgcaggggatggaaatgcatgcttctagaaaacaccctgcgaggttcctgggctcatctgataagggcccacccagagtgttagtgcaggctgtgcacacagcagctctgggcagatgtgaggcagttccaggcagacatggctgccacatcccagcctcttcctccctagaaggcagagatctcctccccatgcagcaggcagtctgctgggtggtaggcagcagggctgaagcatcctcccttcatgagggcttgggctgagttaagcagagagccccttgctgcttccacctgggccaaattccaagctgccaacagcttacaaggacaaagaagcaggctgtgagccagcctggtgaacagggtaaggccccaaggataggagccttggaaagtggaagtaaggcaggctgtggccttcatgtcgtgggtgcctgcttcttccatgagtctgttgcattctcctcacctcgtctgtgtctgtttggctcccacatgctttggtttacatgtcctttgtggcttgcagctgcttccttgatacctagaggcatttccgccttcagttcctgctgccaaccacctcggtctccacactctccaatccaaatgcccaagagaaggatctgatttggccagtttgttcttttcagctaagccacatgggctaccttcagccaacagatgggtgtctttggggcaggtgctgccctggtgcaagtttagagattgtgggatcagatggaatatgtggtacactccttactcccagcagggctgtggagggcagtgctaaggagcagcaggcatagatggggaagacactccaaacacatctaacacactacacacgtgcctccagaggctgacagcccttccctaacctgcacttgctttgggcatttccagggtagatatggattcccagtttctccagcggccagtgctccccctagtccacacagtgagaccgtgaaagcagatgctccggggcactcctgggcagcttttgctcagtggatgatgggtgactacagactccctgaccacccccagcccatggaaattctcaacctgtacttgggagacagcctggagccccacccaggagagtgcccaagggaaacgtgcagccatgaggatccaccggagcctttcgaggagcaaacctgggccactgaccctcctgaacctaccagacaaaatgttcctccctggggctccggtgtggagctcacacacctggggagctgggtccatcaggacgggctggagccttgccaggagcaaacccgggccactgaccctcctgaatctaccagacaagatgctcctccctggggctccggtgtggagctcacacacctggggagcccctctgcccagagggagcacaggcagaacacagcatcaccagggtcaccagtgaacagccatctaccggggagcccaaagcagaaccggagcacgtccacacaggtagtgttctgggcaggcatcctgcaggcccagatgtgtgtcctagacctggaggaggagctggagaagacggaagggctcaaggctgggctgaaatgctgtctccccacgccccctgtggacctccccggggacacgggcctgcactccagcccacctgagaatgaagactcaggggaagacagcagtgagcctgagggagagggccaggcatggctgagagagggaaccccagactcttccccacagtggggagctgaggaggagagcatgttcttcagcaaccccctcttcctggcgagtccttgctcagagaacagtgcttctggagagtgcttttcctggggggcttcagactcccatgcaggtgtgaggactggacctgagagcccagcgactctggagcctcccctcccagaagacacagtgctgtgggagctggaaagtgagccagatttgggggacggcgctgctatcagtgggcattgtacccctccattccctgtgcccatctataaaccacactccatctgctgggcctcagtggctgccgctgagggggctcctgcagcacctcctggtcacggggagagtgaggtaagcccagtcttgggaaccaaccggggctgtgctgggaacacagaagggagggtcttcctcgggggtcaccaggcccagaacattcttttctgacgctaagagctttggggataacctgcatcagtatatagcagggtaatagagcagaaaatcaggaccagtgttgtcttcagaatgataggacattttatcaatgccatgatgtcagctgatgtcagctgataattaagtccataaatgtctccatctcaccagctccaaggggccatgcctagatacgtttggagaacaaacagctcctccaattgcagcatgttccaggccattctcagattcttcccctcccatctccaagacattcccaactgtaacagggcagcgctcagcctgcaagggtgacctttgcccctaacagagagatgcctatttcaaaagtccagtcctctctcttcttgacagatttcagcatgttgttacttttagctcaccatctgtcattattcccctgtccagtgtcaatagatcaggcccatatgacaatggcagagattcttaatatcaactaaggatggggacatgctctgtgagacaatagggagcacagttttcccagggaggcctctccttaagagataaggagactcaatatggtagagtgtggctgtaattttctaatatctcaattccctgagaacaatgaagagctattacccagagcagctctattaccagagcagctcttggagcccaagatcagagaagctcctgggtactgatgggagtcctctccaccatgggccagggcccccagtgtggggcagttagggctgtgcctgtggaggtccattttctcaggactttctttttttttttttttttttgagacggagtcttgctatgttgcccaggctggagtgcagtggtgccatcttggctgaccctccacctcccaggttcaagcgattcacctgcctcaggctcccaggtagctgggattacaggtgtgtgccaccccacccagctaatttttgtatttttagtagagataggtttcaccatgttggccaggctggtcttgaactcctgacctcaggtgttccaaacacctgggcgtcccagagtgctgggattaagtgagccactgcgcccgccatggactttcttgttctaagcactaacttctcagagggaagcctgggaacgctataagttgcaggttggctcctgtctgggaaggcagagcccacccagcccagtgcctggggctatcaccctccctaaaacacagcccctccttgggctggcaccacctgaggcagggccatcagggcagactgtgaagggaggaggcttcatgggatttgagaaaggccctgggagcaattttcctctagtcacctctcctctccttctctcctctgtctctctctcgacttctcagggagataggcttggtcctgctccatctgcagcaccgtgtgtggacgaagcattgacctgggaatcaggatgtgtcggatctgatcttggccctgctgcacatcctgtgcaaccttgggcaagtcacttcccctttctgggccttactttctccatctttggaggaggaatatgagcccattcatttccagggcctagcaccaacaatcctaggatgtggggcttctcacatcaggactccccttctgaactgaggctccagcctgggtgggaggaggatggaggggcttctgcctactcatggcatccttcccctcccctcctttccccttctccctgcctggcctctcccccatccacctctctgtgtatccagggctcatgggaatgcctttgcctctctcaacaggcctctctcagccctgagggctggcagagaggaggtcctttttggccccaggtgactcttaactcccaggacagaggtgagccctaataagggggtttgggaaattgggtcctgggaggatttggaatttggagtggggacaaagatcattcttggatccatggttgccattaatgggtcccattatattgtgtttaagccagacagacttggggttaaatcctgcctctttaaaattaaatgaaggaaacgtacaaaaggaccagcatttcttaccgctgggtcttaatggtttagcaaaggtcctgagcccttagttgcctggaggcttgagtcctgggagcccgctgtctgctgcctctgcaagtgggagaggtcactgcccgagggaggacagggcatgctgccaggctccaggggaggagccccagggagggagcctctggaggtggtgcccaggccgttctcctgcctcctgccctgtgcccgcctcacttcatgttcttcctcagatgagagggagggtggacacccccaggaatctcttccctgcaccttggccccctgcccctggaggagcccagcttcttctccagagcctagcagcccagaatctgagagcagaggccctggtcccaggcccagccctgcatcgtcccaggagggcagcccgcagcttcaacaccacagctcaggcattttgcccaagtggacactagatgcttcacagtcttcactcttggagacggatggggaacagccaagttccttgaagaaaaaggaggcaggggaggccccaaaaccaggcgaggaagtaaagagtgaaggaacagccaggcctgcagagactggagacgtccagcctgacattcacctgacttctgcagaacagtaagtctcagactaactggctctcatgctcctaattatggatgcatttaagaatattctagtctggatggagggtgagaaatgcacattggaattaaacatacccatatttattaagcaaggattatatgagtgggtaccaggaagagttttgagaaagaccgtaagattcagaagcatcagaaacaaaacagcagatagttatacacgtggaggcgagatctgagtgtgctggtgcagggcttcagaagaagcatccacagctggagaccaggagaggaggaaggggaggaggtgtccagggaacctgagcaagggcgtgtgcctgcccagaaaaacgggagccatgctggcaggccagggaagtgcaaggtcagagcttgtaatgtggggattatggactgctttgaatttgaggaggtatctgggaggcattcaccaaagaacctgggcctggggcactggctcggatctcatcaagtggaggtttgatggggaccaagggaatggatcttggggcccaacataggattgtgtaaccccagaactgtgaccagaagtaggaataggccaactgagaaaccaacctagatgtccacttgtcccagaatgctgcctcaagactatatgcccctgggatctccacactgaaaaaggcattttgttttctaattggctgaatgtgagtcatgttaatgggactagcaggaaccagcagtggttcatgtcatggacctaatggtgcagtccatgcaggttagctgtggcaagggttccccgagctcagcgccttgaatggtggggcccggaggagctggacccaggcccttactcagggaagagacagagtcacagccagactgacttagcctggcctgggaccaggagaaccccgagaggaaggtattcatgcaaggtctccaggtctggggccctgcgcttcctcaggtaaagcacagccatgttccgagtttatctcacctcaggtggcaggtgcatccctgtgaggcccctagcgttgttttctccaatgcaaggcacgtgggattgtctccctcacctgtcctgtggtcctcctatacctccttgtcccttccccacctcccagctctggctctagcctccactcctagatctggagcctagaaggctgtaagggggctgagaacaggaagctaggtgggctctagtaatggcagcagctggggtagttcaggaggtggtcctcagcctctcccttcccccacctagcagcctggatgacaaggagactgagtggtgacctatgacccagtgtgaacaggtccgggtgacccccagccgactcagaacctcccagtccagcactaagactctcagatgtcactcaatccaatctaaacctgactcttctgcttcccccacaacgtcacaatcaggtattctagttatttaagcattcattatccaagtgacacaggaagttgaaccagtaagcaggagtcatcataatatgaaaacgttccctgataaacagacgaataacattaggtttcacttaagcaccctctccacctaacacagacgggtcagggtctttgctggtgacttctcactgcctcttgaggctcatgaacactacataatgcaggagaagcacaacagaagctaacagaaaagtgtaagtacaaatcctgtcaaaaaacatgatttcataaggtctgtgaaagtgatgttgaaagacctcacaagtcacgtggaaaaccactgacaaatcgggaaccaaaagagattgtccagtgaacaatggaagaggagaaaataaaaataaagaataaattgtcacatctaaagagaattactcgaaaaatcaactgacgaagccctaaaatatgcttttaaaaatgacctagtcaattagtgttgttactaaaataatacttagatgagggagcactttgaaaaaaaaaagtatgcaaatataaattatcataaaattgtaccctttatttttttgttttgttttgggacagagttttgctcttgctgcccaggctgaagtgcaatgttgcgatcttggctcactgcaacctctgcctcccgggttcaagtgactttcctgccttagccttccgagtagctgggattacaggcgtgtgccaccatgcctggctaatttttgtacttttagtagagagggggcttcaccatgttgtccaggctggtctcgaactcttgatcagacttgtcttgaactctcgaatccactcgcctcagtctgtcaaagtgctgggattataggcctgagccgctgtgcctgacctcactttattattttattttattttatttatttatttttttgagatggagtctcactctgtggcccaggctggaatgcactggcgtgatctcggctcactgcaaactctgcctcccaagttcaggccattctcctgcctcagcctccctagtagctgggactacaggcgcccgccactgcgcccggctaattttttgtatttttagtagagacggggtttccccgtggtcttgatctcctgacctcgtgatctgcccgccttggcctcctaaagtgctgggattataggcgtgagccaccacgccctgcctattttatctttttaacttgaattttcttttctttcttttttataatttttatttccataggttattggggaacaagcagtgtttggttgcatgaataagttcttgaatggtgatttgtgaggttttggtgcacccatcaccagagcagtatacactgcaccctatttgtagtcttttatcctttaaccgcctttcaccctttacccctgagtctccaaagtccactgtgtcattcttatgcctttgcatcctcatagcttagttcccacttatgagtgagaacataggatgtttgcgtttccattcctgagttacttcacttagaataatagtttccaatctcatccaggttgctgtgagtgccattaattcattcctttttatggctaagtagtattgaatcatatatatatatattcaataatatatatgcatattcaatcatatatgtgattcaattatatataattgaatatataatagtatatatatatatatacacacacacatacacaccacagtttctttatgcactcattgattgatcggcatgtgggttggttccatgcttttgtgattgcaaattgtgctgctataagcataagcatgtgtatgcaagtatatttttcttataatgacttattttcctctgggtagatacccagtagtgggattgctggatcaaatggcagttctacttttagttctttaaggaatctccacactgttttccatagtgattgtatgagtttatattcccaccagcagtgtagaagcgttccctattgacctcatccatgccaacgtctattttttgattttttgattatggacattcttgcaggagtcaggtgttattgcagtgtggttttgatttgcatttccctcatcattagtgatgttgagcattttttcatatatttgttggccatttgtatatcttcttttgagaattgtctattcatgtccttagcccacttcttgatgggattatttgtttttttcttgttgatttgtttgagttcattgtagattctggatattagtcctttgtcagatgtatagattgtggagattttttcccactctgtgggttttctatttactctgctgactgttccttttgtcatgcaaaagctcttcagtttaattaagtcctggcaatttatctttgtttttattgcatttgcttttggttcttggtcatgaaatccttacctaagccaatgtctagaagggtttttccaatgttatcttctagaatttttatagttcctggtcttagatttaagtccttaatacatctcgagttgttttttgtgtaaggtgagagatgaggatccagtgtcattctccttcttgtggttagccaattatcccaacaccatttgttgaaaaagtgtgtcctccttgtggctagccaattatcccaacaccattttttgaaaagtgtgtcctttccccactttatgtttttgtttgctttgttgaagatcagttggctgtaaattgtacactttaaatgagtgaattgggcggtatgtgaattctatttcaaaacagctgttattattattatttttttgagacaggatctcacactgttgcccagcctggagtgtgaggtacaatcatgaatcactgaagcctcagcctcccaggctcaagtgatcttcccacttcagcctcccaagtaactgggaccacaggcgtgtatcactacacccagctaatttttacttatttttattttttatggagatgtggtctcaccatgttgcccaggcagaccacaaggctggtctccaactcttgagctcaagcaatcctcccacctcggcctcccaaagtgctgggattataggcatgagccactgcacccagcctgttactgtttttaatggcctttatgatcttactgtgaaaatcaaggatgaatgcaagatgtcttatccagccagaaaacttgtgctgggaaaattaaattttaggcattgtgtttactataagatttaaataaacttatttgtacatttaccaagataaagctccaagtaaaccttttcattatttactatgaaagtatgttctcattttagttagatttagttacttctattttgggttgggtgaactttaatttttggcatgaagaaacttcccttttcagaggctggaacttctctggctaccaagcctctgaacctctccacggggcagcctagtttccagatgcataaggaagatggttctttggtttctggcactgattgacattctgtcaccatcacccaaagaccttgtgatgggcatggggttaaccctcccattaaccctgacccagctgtgttagatagtgagggtgtttaagtgaattctaatgttatatatctgtttatcagggattgttttcttttttttcttttagacggcatcttgctctgttgcccaggctggtgtgcagtgtcacaatatcagctcactggaatttccgcctcctgggttcaagtgattctcctgccttagcctcctgagtagctgggactacaggcatgtgccaccctgcctaatttttgtatttttagtagagacagcgtttcgccatgatggccaggctggcttcgaactcctggcctcaagtgatccacttgccttggcctcccaaagcagtaggattacaggctgagtactgcgcccaggcccctggaatgttttcatattatgatgtcttctgcttaccagttcaacttcctaattgtatcacttgaataatgaatgtttaaataactggaataccccacacttgattgtaatgttgtcggggaagcagaagagtcaggtttagattggattgagtgacatctgagagtcttagtgctggactgggaggttctgagtcggctgggggtcacccaggcctgttcacactaggtcataggtcaccactcagtctccttgtcatccaggctgctaggtgggggaagggagaggctgaggaccacctcctgaactaccccagctgctgccattactagagcccacctagcttcctgttctcagctcatccttacaggtttcttggctccagatctaggagtggaggctagagccagagctgggaggtggggaagggacaaggaggtacaggaggaccacaggacaggtgagggagacaatcccacgtgccttgcattggagaaaacaacgctaggggcctcacagggatgcacctgccacctgaggtgagataaactcggaacatggctgtgctttacctgagaaagcgcaggaccccagacctggagaccttgcatgaataccttcctctcggggttctcctggtcccaggccaggctaagtcagtctggctgtgactctgtctcttccctgagtaagggcctgggtccagctcctccgggccccaccattcaaggcgctgagctcggggaactcttgccacaactgacctgcaagaacacttgacccagagctcctgcatgtctatctcaagtgagaatctgaggacaccgatgaactcttcttggcttcctgggagccctatgccccaagcacagtccccagaggaaggccagagaccaccagctggagacaagctagctaatggcgtcaggaacaacaaggtagcctggaacttggcctcacgcctctatcgcctggagggcttccggaagtctgaagtggctgcctacctgcagaagaagtaaggggctttgagcctggggaaggctggaggctgaggcagccagggaggagctgctgaagggctccctccactggccaccctccccttcccgtccctgccctgttcccttcccatctcccctcctaacttttcccccataccctcactgtatctgctgcttactctcagtcatggtcctcatgctctccacacccttggtccttggtccccactgccttgccaaccagactccacaggtctctcccagtgtctcccagtgtacactgaatagggtagcagggcataccagaccctggctgcccccttgctctgtcaggacccaaggcccagcgtgcctgcacccttcccttgctcacccccaccgcataatgtgtgcaggccctgggggccccagtgcatctgcagccccagcccaggcccctggtgcagactccatgccccttttccctctgcagcaatgactttagcagggctgtggctgaggagtacctgtccttcttccagtttggaggccagagtctggaccgagccctccggtaatgtctttgggccctctctggggaggctgtggaggatggcatggggcagtggcaccagcctgaggctgggatctgattggccctaagctcccgggctctctccttgaccctggccctcctttgcaggagcttcctccaggccttggtgctcagtggggagactcaggaacgggagcgaatcctctaccagttctccagacgcttccaccattgcaatccggggatcttcccctcagtaggtagggaggggctggccctgacagcaaagcagggaaactttggggtgcccatgtctgcttgggagttcagtaggtgacagtgaactggtgggagtgtgttgggggctgtggagaatggaagcattccaggggttattcggttaccccacgcagtgtgggcagaggaaacaggagccctggttccaatgagctttctctccacttacctatctctggggtagattctgtacacaccttgacatgtgcaatcatgctgcttaacacggacctgcatggacaggtaagacggtggagagagtccctgtgggaactgaggctgtaacaaggggtgcggggaggagaagaccagaggcctgagaccgggcagggaacacccctgagggatgtgggcctggggagctggaaagggttccatggttgctggctgggaggttattctattgggatggggtgtgtgctcgagtcatcccacttctccgtggctacagaacattgggaagagcatgagctgccaggaattcataaccaacctgaatgggctgagggatggcgggaacttccccaaggagctgctgaaggtatgtgccacggggtcttcttatgagcctcatgtaggacctggagccttggttctttgttccaagggagatgctgagcttgggactggctttgccaaaatatccttgagagaacaggacttgtttattgaagggctagtaaaagtgtattccctggcgggcagcatcagaagcatcttggaatttgttatccatgcaaatctgcaggctccctgtgctggacttattgaatcagactctctgagactgggacccctaaaatattttcttaagttttcaagtcattcttaccccttcaaagtctgagaagggcaaagctacacatggtgaaagtctggagctcagacttgggagcctggtgttcctgggtttgaattctagtcttgggcaatttgccccctcttggccaactcaagttcttcctgagagtattaaccacttaccatgccattatcaagatgaaatgaaatcttccaagtgctcagcacggtgcttggcacatagcatgtgtgtcataagcaattaaaatcatttgctgtttcatcacagtcacgcatcacttaacgatgaaggtgtgttctgagaaatgcatcgttgggcattttcactattgtgtgaacattatagagtgaacctacacaaacctagatgtacagctcactgcacaccagggctatatgggatagtctattgctcctgggctacaaacctgtatggcatgctgctgtacttaatactgcaagcaattctaacacagtgctgtatttgtatatctaaacatagaaaaggtacaataaacacatgatagaaaagattaaaaatgatacatctgtataggacagctccatcacaaccttacaggaccactatcatgtatgcagttcatccttgactgaaccatcatgatgctgttatatggtacatggctgtacttcatgaacatttactgaacacctactatgtgccagactttttgctaggcaccgcaagagctatagaagcaagcgagataacatctacgttaatatgtcaaacttttagtgcatcattcattcatttactgcacatttattgtggggattggtcagccagtttcttctccatcagatccctcccagtagaatgccatgtaggtaattcatttctcctccatgagaactagttaaggcctcagtaagcatgggcaggacagggacttgtctgccctggtcatcatcttttttttttttttgagatggagtctcatcctgcactgtcgcgggagtgcagtggtgtgatcttggctcactgcaacctccgcctcccgggttcaagcaattctcttgcctcagcctcctgagtagctgggattacaggtgtgcaccaccacgcccagataattttttgtatttttagtagagacagggtttcatcatgttggccaggctggtctcgaactcctgacttcaagtgatccacccgcctcggcctcccaaagtgcagggattagaggtgtgagccactgtgcctggcaggtcatctttatgtctctagcacccagcatagtgcttgttgctgggaaatactccagaaatactttgttgcacggatggatggatggatggatggatggatggatggatggatggatgcttgcttactcaaggaggaagggcacctatgttgtgggtggaggaggcaggctgtacacatgcccctatcctacctctgccagacaaagagactttaggctccacagccctgaggctcccctgcccacctgtgtgcttctgttccaggccctctactggtctatccgcagcgagaagctcgagtgggccgtgtgagtgagactccctttcccctctccctctcacccctctcccctgtctttggactgtcctccctctgtcacccacccgagagttagagaaactcagatagtgctccccttggagtgaggcaaagccagaggcagggctctggggagagagcatagaggagcccaagtaataccggagggccagaggtagtggggcgtggggtatggcagaattttcaggaattgatgggttcactgtgaaggaggactccttgtggggggtcctggggtgtggcttcccaggaaaagagaggttgctaaggctctgggaggcaatggatacctcccagttctctttgcatagtcagcacttccagcccgattctctgatgttcagggatgaagaagacacagccagacctgagaaggcccagccgtccctgccagctggcaagatgagcaagcccttccttcagctggctcaggatcccacagtgcccacctacaagcagggcatcctggctcggaaaatgcatcaagatgcagacggcaagaagagtgagtgtctgctgcccacaaacagggtggcgtgctgggagcagccctgctcagggacctgtgccgatgcatgcacaggtgtgcagagagacagcccgcgttgaggacaggcagccagcccatgttccttcctcagtgcgtactgaacagtgaccatgtgctggatgctgtgtgaggcactagagggtaggtaggagaacccagacaaaacaggcctagttattcctgggccccagagtccctgtagtaaggtagagattagacaagtgtgtcaatgtctgcgaaaaaaatgtagcaagagctgagtgtctaggggctgaatcaagtgaggagaaaaaggtttttggttttgttttggaagcgggatgtggctacagggagaggtaaggcttctggtaagtgatggtatctgcgctgaactttggaggagaagagggtctggaatttggaagctgggcagagggcatcccccacagagaaaacagcaagccgagtttgctcagaacatggggtgtgtgaaagggaggtacacttgaggcaaaattgccagggcctgcatttgggccttattccacaggcagctgaaggcttttgattatggcaccaacatgtccagagtggtgatctcagcagactaatgtgcaagcacagattgaataggctggggcgaccaggatgggaactagcattggctgtgaagccgccggggccctagggctgccttttgtccaaggagcttagaatggatcttaccacacaagaccagggtggagaggtagggggaaaagagggcaggtggtgctcagagtggggtacacagggaagggcaccccaaagctgggctctgcgcccttgagcccctctagatgggtatgcaaggtcaagatcatcctgcagggactagaaagctgtctgggaggagctgtgtttgtgcctgggtgtttgccactacttggggtagtgggtgtgtgtttggagttggagagaagatgatatgtatgaatatctatatttggatgtgagtggttctatggttttgtttccagcgggcattgcctgtgtgtggagagactctatatgtttgtttacgattgtatgtgttttcttgtgttggcatgttctgcatttgtgtgcatcctggtgagagactggaggtggtgtgagggacagggggcatatgcacacttgcgtgtgtctgagtgtgtctggatgctggtgcccccacctacaacatttgtgttctgttcctggaacagcgccatggggcaagcgtggctggaagatgttccacaccttactgcgagggatggttctctacttcctgaaggtaggaaaggagccaacacccctgtcagaatgggagactgagagaggcccagaacagtctggagggtgggcagctgatgataacctcttctctgagcccctgtgactggtagcagggagaagaccactgtctggagggggagagcttggtggggcagatggtggatgagcccgtgggggtgcaccactcgctggccacccccgccacgcattacaccaagaagccgcacgtcttccagctgcgcacggctgactggcgcctctacctcttccaggcaccgtaagtccctggggtgggagactgtggcaaggccttgccctgccctagttctctctcccctgaccctgctgacacctgaggcttgtgggccccagggggtcctggtgggaatggccgtatgatcagaaattcttagaaagcggcagcaggaagaggagctggggaccagggatgaagcccaggcatcgcctacttcctccccatccttggccaactttgccagcacagtatgccttttccttgtcagtgggataaagcctcccagttcagaacacaggattccgggaagttgctaatgattgaccatatctggcatttgttatgaaatctgtcaccttctcagattgtcctctttattttttattgtttatttttgagacagagtctcgctctgtcgtcctggctggagtgcagtgactctcacctcggctcactgcaaccgccgcctcccgggttcaagcgattctcatgcctgagcctcccgagtagctgggattaaaggcgggcgccaccgcgcctggctaatttgtgtatttttagtagagacggggtttcaccctgttgaccaggctggtctcgaactcctgacctcaggtgatccgcctgccaaggcgttgccaccgcaccgggcctccaaattttcctctttattgataagaaatgccacggtcagaggtcgggtgcccggctagtggcagggctgtaactatgggaggctgagttctgagcagctggccagctgtgcaagcagccacaggagggggcgggaggagggtgacaggacggactctgtgtccccggggaccaacgacctcctttgccccagcactgccaaggagatgagctcctggatcgcgcgcatcaacttggctgcggccacgcactccgcgccgcccttccccgccgctgtgggctcccagcgcagattcgtgcggcccatcctgcccgtgggccccgcccagagctccctggtacggcctccgggaaggggtggggtccggcggaactgggaatgtgcacctggagccccaggactaactcggggaggctggaggcgggctgcgcacttggcctgggaaccgaggcggccaggggggcggcgcgcccgggcccggaaagcggcggaggggacgcccgggacagcgcccctcaccgcccgctgctcgcaggaggagcagcatcgatcccacgagaactgcctggacgctgccgcggacgacctgctggatctacagaggaacctgccggagcggcggggccgtggccgcgagctggaggagcaccgcctgcggaaggagtacctggagtacgaggtgagcggccgagcccacctccccgccgctgcgcagcgccctctccgccctctcgtggccgcctcggtccctgcagccgtcactgccctgaccgcgccggggcggggagaggcgcttgcgtgcgggcggggcccgcgtgcgccgtctgcaaaggggcgggggctcccacatggacacccgcgtgcacgggcgtgcacaaagagtgtgtgtccccacgcacttaggcctgtcgcctctcgtcctgggggcacatagcagctgcttgtctggaaacacccatagcagatgttattttacagttttcttttctcctaagagtatatttggcttttcccaagttgaagggaaaactgtatttcagctcaactgttccttctaatacctaccaaatattaataggtagtatggatggagcttgtcttccttgcatggattgtctcattcaattaacagctctgggtaggtcctgttatcctcattttacagatgaggaaactgaggcacagagaaattaaactactcttccaaatctggtaaatttacatgctgctctaaatgccccgtttatggtcttaactaagaaatgaccgtgtttttttgtttttgtttttgtttttgagacaaagtctcgctctgtcgcccaggctggagtgcagtggctcgatctcagctccctgcaacctccgcctcccaggttcaagcgattctcctgcctcagcctcccgagtagctgggattacaggtgtgagccaccacacctggataagttttgtatttttagtagagacaggggttcaccatgttggcaaagctggacttgaactcctggcctcaagtggtctgcctgcctcagccttccaaagtgctgggattacaggtgtgatccactgccccggccagtaatgactttgttgactctacagcccatgttgaaatgttttatcccttagtctcccccaaccctcacccatccacccacactccccaattctgctttggtgtgacgtcagttcatctgggatcctaacactgggtgcctgcttcagggatcctgggtgcctgcttagggtgagggcccactgggcaggaagggtaggtgaatgcaatgtgaaaatagagggaatcagaggccacccagaggcagagaccaggaagtgggagtcaacatcgcctcctgcctgtccccgctgtgcccgcatgcagccctctgcctgtctttcaaggtcccaggctatcccttggcttgttggttgtatccatggctgtgaactccccacttctcagaggcctcagggtgtggctgtgaggacccaacctcttcctcccactgaccagctgggacctttaacaagtcaccagccctcccttccgcaatgatttgtcccctcccagggctggcatgaggatccaatgggatggagggtgaggaagcactttgtaaactggaaaccatatcccaaggatgctagctgcaggggcctcaggagtacagtgttaagtagatgagggtagttagcatcatgctccacagatgccaattgttaaaatgctatttagacccaattagggctgtacagatgtgagctgtttgtgtgtagggctgcaaagatctcaggcatagtgggtgacacatcttttagtgcctcaaagatggaacatggcatagagatgttagttacagcactccaaggggttggttattattagaacagggctgggctgatatgtgtcattataatactatccagaggtgtgctctgcagtctgcttatccaagcattatactgacactcacggttggtccagccctctttctgtcgaggtctgtatcgccatagcttcatgtacctgtgagctgtccctcacgattctagcctcctcccaacctggagccaggatggtgctaaggtggtggggcctgtgtgttgcagaaaacccgctacgagacctacgtgcagctgctggtggcccgcctgcactgcccctctgatgctctggacctgtgggaggagcagctggggagggaagctggaggcactcgggagcccaagctcagcctgaagaagtcccactcgagcccgtccctgcaccaggatgaggctcccaccacggccaaggtgaagcgcaacatctcagagcgcagaacctaccggaagatcatccctaagcggaaccgcaatcagctgtgaagccagcaccacctcagagacactgttccctgctccagggtagacctgagatgaacctccctggaggagacttatttcaatgagtccaccatgacggatgaggcacctcctttccctgctgaaggacaaaccttgtttccctgtggccctcattcttgtgctccctgaagctttcctaatattgctgtgctccccaccacccccatggcagtccctccgcagccccagtccctggccacgcccaagggaagagggaggtgaggacttgactttcctcccagagctcagcccatgtcaccctccaggccccagaatccagagtggcctcatttcctagacttgctgagaactcagcacttgtttgagaaccagtgcttatgtggtgtgcccttggcttctgggggagagcttggggcagcagaggcccctgggcagcccagccaggggagccacagccccaaggatggtcttgctctgggaattaggtgaccttcctggggaggccccaggagagtgaatcagggactcttgagaaattcctaaccagcctcctgtgacccagggagcagggtcgctaaggtcctgcccactgaggggacagccttctgggcagggacctcggggggcttcaagggctctgcacggctgtggggccctgtgcctttgtctccttgtgtctcctttcccccgaagtagatgaaacagtctcacatacccaactgctcatcaacagagcagagctgatggcatgagtgagggctgggcggggtggggcctccagagctttgcagggaaccctggaaccctaggaacaaggagcctttgttccaacagagcagagaaggaggttctctatgttcagaccactggagaggatagagaggtaaaaggtggcgacagtttcccttaggggtctgcctggcaggagccacagctcaggagagttgtgagggatgggacggaggctggcgaccaggcgaggcctaggccaggctcgggagacttttctgtgctcctttctacacatgccttaaaccttccttcctgtggggtgcctggaccccttccccatctctggcagctcagagggtctctgctgctctcccctgggaaatcccctcatcctgccctctggctgcctcccagctgggcttgttctctgagggaggttccggagactcatggacttggggctctgcctgtaggaaggaggctgggccggagggaccagccaccattgtctctgttcagccaagtgtgcaagtaggctgcccgccaagagggggcctctgctacccgctgctgcctgccggctgacacactgcctccccagccttcctgctaggccaccctcctcccttcccatgcttgtaaccagctctggggcttgcacctccacaaagtaaggttggcccttggaggccatgtttgggtctccggccagggcctagggctaggccatgcacccaatgggtgcacaataaataacaggtcaacaaagagggaggtgtgtcagtgtgtgaggaagggaggtcaggcagctaggaccacctgcagtgtggcaggcttcatccctctttgctccaagtgtgtatgtgtgtctgtgcatgtgtgtagtgtctgtgtctgtgtgttcatgcatatgcaggagtcacacggtcataggccatcaaagctggaggagacctcagaatcattcattcacctacttgctcatttattcattcattcattttgcagataatatgggacgctttctatgtgccagtaccaggggattcacaaatgaattaaacatgtccctgactccatgagttgacaatcttgcccactggtttcctgctctcagtttacagaggcacttttatcttgctggggaagtgtgctgaaaagacacattcccagcccacacccagggatgctgattcagtcagcctgggtcagagggatagataaatatgtttaaagctccttgggtaattctgatgtgtaagtagcagttagctgcagtagagtccaattgcctcatttgattgaagtggaatcccagcatcaagtggacatgacttttggcccaagactgatgcttacaaactaagtggagtaggttatttgacctcactgaacatgcatccttttttttttttttttttttttttttttttggagacggagtttcgctcttgtaacccaggctggagtgcaatggtgtgatcttggctgactgcaacctccactgaatcaagcgattctcctgcctcagcctcccaagtagctaggattacaggcgtgtgccaccacgcccggctattttttgtatttttagtagagatggggtttcgtcatgttggctaggctggtctcgaactcctgacctcaggtagtctgcctgcctcggccccccaaagtgctgggattacaggcgtgaaccaccacacctggcctatgcatccttatttctaaaaccatgataaaaggtgaaagtctgaatgcatgtgtgtgtgacactttgatgctcctttgctcatgtagaaccggcacctctctttcacctgagcacgtggaatcttcagagccagatgatggtggctgcctggcctgccatagtcaatgctgcccaggcacctctgcctggagggtctgggttgtgggctgcagttatgacatgtgaccacttggaggcaggcttgcatctttctagcttctggctgctcaggtgtcctgctgtggagctgagctgtgctccctgaaaggcaggaagttattatgtgtgcccctgtgccatcaccgaaccaggacct

SEQ ID NO: 28224 - DNA, 1368 bp, Homo Sapiens
atgagtttcctcatcgactccagcatcatgattacctcccagatactattttttggatttgggtggcttttcttcatgcgccaattgtttaaagactatgagatacgtcagtatgttgtacaggtgatcttctccgtgacgtttgcattttcttgcaccatgtttgagctcatcatctttgaaatcttaggagtattgaatagcagctcccgttattttcactggaaaatgaacctgtgtgtaattctgctgatcctggttttcatggtgcctttttacattggctattttattgtgagcaatatccgactactgcataaacaacgactgcttttttcctgtctcttatggctgacctttatgtatttcttctggaaactaggagatccctttcccattctcagcccaaaacatgggatcttatccatagaacagctcatcagccgggttggtgtgattggagtgactctcatggctcttctttctggatttggtgctgtcaactgcccatacacttacatgtcttacttcctcaggaatgtgactgacacggatattctagccctggaacggcgactgctgcaaaccatggatatgatcataagcaaaaagaaaaggatggcaatggcacggagaacaatgttccagaagggggaagtgcataacaaaccatcaggtttctggggaatgataaaaagtgttaccacttcagcatcaggaagtgaaaatcttactcttattcaacaggaagtggatgctttggaagaattaagcaggcagctttttctggaaacagctgatctatatgctaccaaggagagaatagaatactccaaaaccttcaaggggaaatattttaattttcttggttactttttctctatttactgtgtttggaaaattttcatggctaccatcaatattgtttttgatcgagttgggaaaacggatcctgtcacaagaggcattgagatcactgtgaattatctgggaatccaatttgatgtgaagttttggtcccaacacatttccttcattcttgttggaataatcatcgtcacatccatcagaggattgctgatcactcttaccaagttcttttatgccatctctagcagtaagtcctccaatgtcattgtcctgctattagcacagataatgggcatgtactttgtctcctctgtgctgctgatccgaatgagtatgcctttagaataccgcaccataatcactgaagtccttggagaactgcagttcaacttctatcaccgttggtttgatgtgatcttcctggtcagcgctctctctagcatactcttcctctatttggctcacaaacaggcaccagagaagcaaatggcaccttag

SEQ ID NO: 28225 - DNA, 1005 bp, Homo Sapiens
atgctcctgcgtgggctcatgaagagctactttgggggcctgctgtgtgtgtgctggagccctgacggccgctacgtggtgacgggtggcgaagatgacctggtcaccgtgtggtccttcaccgagggccgcgtggtggctcgaggccatggccacaagtcctgggtcaacgctgtggcctttgacccctacaccacaagggcagaggaggcggcgacagcagccggtgctgatggggagcggagcggcgaagaggaggaggaggagcccgaggctgcgggcacaggctcggccgggggcgccccgctctctccactgcccaaggctggctccattacttaccgctttggctcggcgggccaggacacgcagttctgcctgtgggacctcactgaagacgtgctctacccgcacccgcccctggcccgcacccgcaccctccctggcacacctggcaccacgccaccggccgccagcagctcgaggggtggcgagcctggcccaggccccctgcctcgctcgctgtcccgctccaacagtctcccgcacccagctggcgggggcaaggcgggcggcccgggtgtggcggcagagcctggcacaccattcagcattggccgcttcgccacgctcacactgcaggagcggcgggaccggggggcagagaaggagcacaagcgctaccacagcctgggcaacatcagccggggtggcagtggcggcagtggcagtggtggggagaagcccagcggccctgttccccgcagccgcctggaccccgccaaggtgctgggcactgcgctgtgcccgcgcatccacgaggtgcccctgctggagccccttgtgtgcaagaagatcgcccaggagcggctcacagtcctcctgttcctggaggactgcatcatcactgcctgccaggagggcctcatctgcacctgggcccggccgggcaaggcgggcatctcctcccaaccaggcaactccccgagtggcacagtggtgtag

SEQ ID NO: 28226 - DNA, 966 bp, Homo Sapiens
atgaagccaggattcagtccccgtgggggtggctttggcggccgagggggctttggtgaccgtggtggtcgtggaggccgagggggctttggcgggggccgaggtcgaggcggaggctttagaggtcgtggacgaggaggaggtggaggcggcggcggcggtggaggaggaggaagaggtggtggaggcttccattctggtggcaaccggggtcgtggtcggggaggaaaaagaggaaaccagtcggggaagaatgtgatggtggagccgcatcggcatgagggtgtcttcatttgtcgaggaaaggaagatgcactggtcaccaagaacctggtccctggggaatcagtttatggagagaagagagtctcgatttcggaaggagatgacaaaattgagtaccgagcctggaaccccttccgctccaagctagcagcagcaatcctgggtggtgtggaccagatccacatcaaaccgggggctaaggttctctacctcggggctgcctcgggcaccacggtctcccatgtctctgacatcgttggtccggatggtctagtctatgcagtcgagttctcccaccgctctggccgtgacctcattaacttggccaagaagaggaccaacatcattcctgtgatcgaggatgctcgacacccacacaaataccgcatgctcatcgcaatggtggatgtgatctttgctgatgtggcccagccagaccagacccggattgtggccctgaatgcccacaccttcctgcgtaatggaggacactttgtgatttccattaaggccaactgcattgactccacagcctcagccgaggccgtgtttgcctccgaagtgaaaaagatgcaacaggagaacatgaagccgcaggagcagttgacccttgagccatatgaaagagaccatgccgtggtcgtgggagtgtacaggccaccccccaaggtgaagaactag

SEQ ID NO: 28227 - DNA, 1575 bp, Homo Sapiens
atgtacgccctcttcctcctggccagcctcctgggcgcggctctagccggcccggtccttggactgaaagaatgcaccaggggctcggcagtgtggtgccagaatgtgaagacggcgtccgactgcggggcagtgaagcactgcctgcagaccgtttggaacaagccaacagtgaaatcccttccctgcgacatatgcaaagacgttgtcaccgcagctggtgatatgctgaaggacaatgccactgaggaggagatccttgtttacttggagaagacctgtgactggcttccgaaaccgaacatgtctgcttcatgcaaggagatagtggactcctacctccctgtcatcctggacatcattaaaggagaaatgagccgtcctggggaggtgtgctctgctctcaacctctgcgagtctctccagaagcacctagcagagctgaatcaccagaagcagctggagtccaataagatcccagagctggacatgactgaggtggtggcccccttcatggccaacatccctctcctcctctaccctcaggacggcccccgcagcaagccccagccaaaggataatggggacgtttgccaggactgcattcagatggtgactgacatccagactgctgtacggaccaactccacctttgtccaggccttggtggaacatgtcaaggaggagtgtgaccgcctgggccctggcatggccgacatatgcaagaactatatcagccagtattctgaaattgctatccagatgatgatgcacatgcaacccaaggagatctgtgcgctggttgggttctgtgatgaggtgaaagagatgcccatgcagactctggtccccgccaaagtggcctccaagaatgtcatccctgccctggaactggtggagcccattaagaagcacgaggtcccagcaaagtctgatgtttactgtgaggtgtgtgaattcctggtgaaggaggtgaccaagctgattgacaacaacaagactgagaaagaaatactcgacgcttttgacaaaatgtgctcgaagctgccgaagtccctgtcggaagagtgccaggaggtggtggacacgtacggcagctccatcctgtccatcctgctggaggaggtcagccctgagctggtgtgcagcatgctgcacctctgctctggcacgcggctgcctgcactgaccgttcacgtgactcagccaaaggacggtggcttctgcgaagtgtgcaagaagctggtgggttatttggatcgcaacctggagaaaaacagcaccaagcaggagatcctggctgctcttgagaaaggctgcagcttcctgccagacccttaccagaagcagtgtgatcagtttgtggcagagtacgagcccgtgctgatcgagatcctggtggaggtgatggatccttccttcgtgtgcttgaaaattggagcctgcccctcggcccataagcccttgttgggaactgagaagtgtatatggggcccaagctactggtgccagaacacagagacagcagcccagtgcaatgctgtcgagcattgcaaacgccatgtgtggaactag

SEQ ID NO: 28228 - DNA, 1977 bp, Homo Sapiens
atggaccgcggcacgctccctctggctgttgccctgctgctggccagctgcagcctcagccccacaagtcttgcagaaacagtccattgtgaccttcagcctgtgggccccgagagggacgaggtgacatataccactagccaggtctcgaagggctgcgtggctcaggcccccaatgccatccttgaagtccatgtcctcttcctggagttcccaacgggcccgtcacagctggagctgactctccaggcatccaagcaaaatggcacctggccccgagaggtgcttctggtcctcagtgtaaacagcagtgtcttcctgcatctccaggccctgggaatcccactgcacttggcctacaattccagcctggtcaccttccaagagcccccgggggtcaacaccacagagctgccatccttccccaagacccagatccttgagtgggcagctgagaggggccccatcacctctgctgctgagctgaatgacccccagagcatcctcctccgactgggccaagcccaggggtcactgtccttctgcatgctggaagccagccaggacatgggccgcacgctcgagtggcggccgcgtactccagccttggtccggggctgccacttggaaggcgtggccggccacaaggaggcgcacatcctgagggtcctgccgggccactcggccgggccccggacggtgacggtgaaggtggaactgagctgcgcacccggggatctcgatgccgtcctcatcctgcagggtcccccctacgtgtcctggctcatcgacgccaaccacaacatgcagatctggaccactggagaatactccttcaagatctttccagagaaaaacattcgtggcttcaagctcccagacacacctcaaggcctcctgggggaggcccggatgctcaatgccagcattgtggcatccttcgtggagctaccgctggccagcattgtctcacttcatgcctccagctgcggtggtaggctgcagacctcacccgcaccgatccagaccactcctcccaaggacacttgtagcccggagctgctcatgtccttgatccagacaaagtgtgccgacgacgccatgaccctggtactaaagaaagagcttgttgcgcatttgaagtgcaccatcacgggcctgaccttctgggaccccagctgtgaggcagaggacaggggtgacaagtttgtcttgcgcagtgcttactccagctgtggcatgcaggtgtcagcaagtatgatcagcaatgaggcggtggtcaatatcctgtcgagctcatcaccacagcggaaaaaggtgcactgcctcaacatggacagcctctctttccagctgggcctctacctcagcccacacttcctccaggcctccaacaccatcgagccggggcagcagagctttgtgcaggtcagagtgtccccatccgtctccgagttcctgctccagttagacagctgccacctggacttggggcctgagggaggcaccgtggaactcatccagggccgggcggccaagggcaactgtgtgagcctgctgtccccaagccccgagggtgacccgcgcttcagcttcctcctccacttctacacagtacccatacccaaaaccggcaccctcagctgcacggtagccctgcgtcccaagaccgggtctcaagaccaggaagtccataggactgtcttcatgcgcttgaacatcatcagccctgacctgtctggttgcacaagcaaaggcctcgtcctgcccgccgtgctgggcatcacctttggtgccttcctcatcggggccctgctcactgctgcactctggtacatctactcgcacacgcgttcccccagcaagcgggagcccgtggtggcggtggctgccccggcctcctcggagagcagcagcaccaaccacagcatcgggagcacccagagcaccccctgctccaccagcagcatggcatag

SEQ ID NO: 28229 - DNA, 918 bp, Homo Sapiens
atgtggcccctggtagcggcgctgttgctgggctcggcgtgctgcggatcagctcagctactatttaataaaacaaaatctgtagaattcacgttttgtaatgacactgtcgtcattccatgctttgttactaatatggaggcacaaaacactactgaagtatacgtaaagtggaaatttaaaggaagagatatttacacctttgatggagctctaaacaagtccactgtccccactgactttagtagtgcaaaaattgaagtctcacaattactaaaaggagatgcctctttgaagatggataagagtgatgctgtctcacacacaggaaactacacttgtgaagtaacagaattaaccagagaaggtgaaacgatcatcgagctaaaatatcgtgttgtttcatggttttctccaaatgaaaatattcttattgttattttcccaatttttgctatactcctgttctggggacagtttggtattaaaacacttaaatatagatccggtggtatggatgagaaaacaattgctttacttgttgctggactagtgatcactgtcattgtcattgttggagccattcttttcgtcccaggtgaatattcattaaagaatgctactggccttggtttaattgtgacttctacagggatattaatattacttcactactatgtgtttagtacagcgattggattaacctccttcgtcattgccatattggttattcaggtgatagcctatatcctcgctgtggttggactgagtctctgtattgcggcgtgtataccaatgcatggccctcttctgatttcaggtttgagtatcttagctctagcacaattacttggactagtttatatgaaatttgtggcttccaatcagaagactatacaacctcctaggaataactag

SEQ ID NO: 28230 - DNA, 1116 bp, Homo Sapiens
atgattgaagatagtgggaaaagaggaaataccatggcagaaagaagacagctgtttgcagagatgagggctcaagatctggatcgcatccgactctccacctacagaacagcatgcaagcttaggtttgttcagaagaaatgcaatttgcacctggtggacatatggaatgtcatagaagcattgcgggaaaatgctctgaacaacctggacccaaacactgaactcaacgtgtcccgcttagaggctgtgctctccactattttttaccagctcaacaaacggatgccaaccactcaccaaatccatgtggagcagtccatcagcctcctccttaacttcctgcttgcagcgtttgatccggaaggccatggtaaaatttcagtatttgctgtcaaaatggctttagccacattgtgtggagggaagatcatggacaaattaagatatattttctcaatgatttctgactccagtggggtgatggtttatggacgatatgaccaattccttcgggaagttctcaaactacccacggcagtttttgaaggtccttcatttggttacacagaacagtcagccagatcctgtttctcccaacagaaaaaagtcacgttaaatggtttcttggacacgcttatgtcagatcctcccccgcagtgtctggtctggttgcctcttctgcatcgactagcaaatgtggaaaatgtcttccatccggttgagtgttcctactgccacagtgagagtatgatgggatttcgctaccgatgccaacagtgtcacaattaccagctctgtcaggactgcttctggaggggacatgccggtggttctcatagcaaccagcaccaaatgaaagagtacacgtcatggaaatcacctgctaagaagctgactaatgcattaagcaagtccctgagctgtgcttccagccgtgaacctttgcaccccatgttcccagatcagcctgagaagccactcaacttggctcacatcgtgcctcccagacctgtaaccagcatgaacgacaccctgttctcccactctgttccctcctcaggaagtccttttattaccaggagctcggacggtgcttttggtggatgcgtctag

SEQ ID NO: 28231 - DNA, 1860 bp, Homo Sapiens
atgtcttatcaggggaagaaaaatattccacgcatcacgagcgatcgtcttctgatcaaaggaggtaaaattgttaatgatgaccagtcgttctatgcagacatatacatggaagatgggttgatcaagcaaataggagaaaatctgattgtgccaggaggagtgaagaccatcgaggcccactcccggatggtgatccccggaggaattgacgtccacactcgtttccagatgcctgatcagggaatgacgtctgctgatgatttcttccaaggaaccaaggcggccctggctgggggaaccactatgatcattgaccacgttgttcctgagcctgggacaagcctgctcgctgcctttgaccagtggagggaatgggccgacagcaagtcctgctgtgactactctctgcatgtggacatcagcgagtggcataagggcatccaggaggagatggaagcgcttgtgaaggatcacggggtaaattccttcctcgtgtacatggctttcaaagatcgcttccagctaacggattgccagatttatgaagtactgagtgtgatccgggatattggcgccatagcccaagtccacgcagaaaatggcgacatcattgcagaggagcagcagaggatcctggatctgggcatcacgggccccgagggacatgtgctgagccgacctgaggaggtcgaggccgaagccgtgaatcgtgccatcaccatcgccaaccagaccaactgcccgctgtatatcaccaaggtgatgagcaaaagctctgctgaggtcatcgcccaggcacggaagaagggaactgtggtgtatggcgagcccatcactgccagcttgggaacggacggctcccattactggagcaagaactgggccaaggctgctgcctttgtcacctccccacccttgagccctgatccaaccactccagactttctcaactccttgctgtcctgtggagacctccaggtcacgggcagtgcccattgcacgtttaacactgcccagaaggctgtaggaaaggacaacttcaccctgattccggagggcaccaatggcactgaggagcggatgtccgtcatctgggacaaggctgtggtcactgggaagatggatgagaaccagtttgtggctgtgaccagcaccaatgcagccaaagtcttcaacctttaccccggggcgatgtggagcgcgggccgcggcggggctgcctggccggtgctgttggggctgctgctggcgctgttagtgccgggcggtggtgccgccaagaccggtgcggagctcgtgacctgcgggtcggtgctgaagctgctcaatacgcaccaccgcgtgcggctgcactcgcacgacatcaaatacggatccggcagcggccagcaatcggtgaccggcgtagaggcgtcggacgacgccaatagctactggcggatccgcggcggctcggagggcgggtgcccgcgcgggtccccggtgcgctgcgggcaggcggtgaggctcacgcatgtgcttacgggcaagaacctgcacacgcaccacttcccgtcgccgctgtccaacaaccaggaggtgagtgcctttggggaagacggcgagggcgacgacctggacctatggacagtgcgctgctctggacagcactgggagcgtgaggctgctgtgcgcttccagcatgtgggcacctctgtgttcctgtcagtcacgggtgagcagtatggaagccccatccgtgggcagcatgaggtccacggcatgcccagtgccaacacgcacaatacgtggaaggccatggaaggcatcttcatcaagcctagtgtggagccctctgcaggtcacgatgaactctag

SEQ ID NO: 28232 - DNA, 1617 bp, Homo Sapiens
atgaccaccccaggaaaagagaactttcgcctgaaaagttacaagaacaaatctctgaatcccgatgagatgcgcaggaggagggaggaagaaggactgcagttacgaaagcagaaaagagaagagcagttattcaagcggagaaatgttgctacagcagaagaagaaacagaagaagaagttatgtcagatggaggctttcatgaggctcagattaataacatggagatggcaccaggtggtgtcatcacttctgacatgattgaaatgatattttccaaaagcccagagcaacagctttcagcaacacagaaattcaggaagctgctttcaaaagaacctaaccctcctattgatgaagttatcagcacaccaggagtagtggccaggtttgtggagttcctcaaacgaaaagagaattgtacactgcagtttgaatcagcttgggtactgacaaatattgcttcaggaaattctcttcagacccgaattgtgattcaggcaggagctgtgcccatcttcatagagttgctcagctcagagtttgaagatgtccaggaacaggcagtctgggctcttggcaacattgctggagatagtaccatgtgcagggactatgtcttagactgcaatatccttccccctcttttgcagttattttcaaagcaaaaccgcctgaccatgacccggaatgcagtatgggctttgtctaatctctgtagagggaaaagtccacctccagaatttgcaaaggtttctccatgtctgaatgtgctttcctggttgctgtttgtcagtgacactgatgtactggctgatgcctgctgggccctctcatatctatcagatggacccaatgataaaattcaagcggtcatcgatgcgggagtatgtaggagacttgtggaactgctgatgcataatgattataaagtggtttctcctgctttgcgagctgtgggaaacattgtcacaggggatgatattcagacacaggtaattctgaattgctcagctctgcagagtttattgcatttgctgagtagcccaaaggaatctatcaaaaaggaagcatgttggacgatatctaatattacagctggaaatagggcacagatccagactgtgatagatgccaacattttcccagccctcattagtattttacaaactgctgaatttcggacaagaaaagaagcagcttgggccatcacaaatgcaacttctggaggatcagctgaacagatcaagtacctagtagaactgggttgtatcaagccgctctgtgatctcctcacggtcatggactctaagattgtacaggttgccctaaatggcttggaaaatatcctgaggcttggagaacaggaagccaaaaggaatggcactggcattaacccttactgtgctttgattgaagaagcttatggtctggataaaattgagttcttacagagtcatgaaaaccaggagatctaccaaaaggcctttgatcttattgagcattacttcgggaccgaagatgaagacagcagcattgcaccccaggttgaccttaaccagcagcagtacatcttccaacagtgtgaggctcctatggaaggtttccagctttag

SEQ ID NO: 28233 - DNA, 357 bp, Homo Sapiens
atggaggactttgctaccaggacctacggcaccagtggcctggacaacagacctctgtttggggagacgtccgccaaggatcgaatcatcaatttagttgttggcagcttaacatccttattgattctagtaacgctgataagtgcttttgttttccctcaactacctccaaaaccgttgaatatattctttgctgtctgcatctctttgagtagtattactgcctgcatacttatctactggtatcgacaaggagacttagaaccgaaatttagaaagctaatttactatatcatattttctatcatcatgttgtgtatatgtgcaaacctgtacttccatgatgtgggaaggtag

SEQ ID NO: 28234 - DNA, 1935 bp, Homo Sapiens
atggagagggggctgccgctcctctgcgccgtgctcgccctcgtcctcgccccggccggcgcttttcgcaacgataaatgtggcgatactataaaaattgaaagccccgggtaccttacatctcctggttatcctcattcttatcacccaagtgaaaaatgcgaatggctgattcaggctccggacccataccagagaattatgatcaacttcaaccctcacttcgatttggaggacagagactgcaagtatgactacgtggaagtcttcgatggagaaaatgaaaatggacattttaggggaaagttctgtggaaagatagcccctcctcctgttgtgtcttcagggccatttctttttatcaaatttgtctctgactacgaaacacatggtgcaggattttccatacgttatgaaattttcaagagaggtcctgaatgttcccagaactacacaacacctagtggagtgataaagtcccccggattccctgaaaaatatcccaacagccttgaatgcacttatattgtctttgcgccaaagatgtcagagattatcctggaatttgaaagctttgacctggagcctgactcaaatcctccaggggggatgttctgtcgctacgaccggctagaaatctgggatggattccctgatgttggccctcacattgggcgttactgtggacagaaaacaccaggtcgaatccgatcctcatcgggcattctctccatggttttttacaccgacagcgcgatagcaaaagaaggtttctcagcaaactacagtgtcttgcagagcagtgtctcagaagatttcaaatgtatggaagctctgggcatggaatcaggagaaattcattctgaccagatcacagcttcttcccagtatagcaccaactggtctgcagagcgctcccgcctgaactaccctgagaatgggtggactcccggagaggattcctaccgagagtggatacaggtagacttgggccttctgcgctttgtcacggctgtcgggacacagggcgccatttcaaaagaaaccaagaagaaatattatgtcaagacttacaagatcgacgttagctccaacggggaagactggatcaccataaaagaaggaaacaaacctgttctctttcagggaaacaccaaccccacagatgttgtggttgcagtattccccaaaccactgataactcgatttgtccgaatcaagcctgcaacttgggaaactggcatatctatgagatttgaagtatacggttgcaagataacagattatccttgctctggaatgttgggtatggtgtctggacttatttctgactcccagatcacatcatccaaccaaggggacagaaactggatgcctgaaaacatccgcctggtaaccagtcgctctggctgggcacttccacccgcacctcattcctacatcaatgagtggctccaaatagacctgggggaggagaagatcgtgaggggcatcatcattcagggtgggaagcaccgagagaacaaggtgttcatgaggaagttcaagatcgggtacagcaacaacggctcggactggaagatgatcatggatgacagcaaacgcaaggcgaagtcttttgagggcaacaacaactatgatacacctgagctgcggacttttccagctctctccacgcgattcatcaggatctaccccgagagagccactcatggcggactggggctcagaatggagctgctgggctgtgaagtggaagcccctacagctggaccgaccactcccaacgggaacttggtggatgaatgtgatgacgaccaggccaactgccacagtggaacaggtgatgacttccagctcacaggtggcaccactgtgctggccacagaaaagcccacggtcatagacagcaccatacaatcaggtatcaaatag

SEQ ID NO: 28235 - DNA, 1497 bp, Homo Sapiens
atggcggaggacagcgagtctgcggccagccagcagagcctggaactggacgaccaggacacgtgcgggatagacggggacaatgaggaggagacggagcacgccaaaggaagtcctggagggtatttgggagccaaaaagaaaaagaagaaacagaagagaaaaaaggagaaaccaaattccggaggcaccaagtcagactcggcatctgattcccaggagattaaaattcagcagccttcgaaaaatcccagtgttccaatgcagaagttgcaggatatccagagagcaatggagctgctatccgcatgccagggcccagccaggaacattgatgaggctgcaaagcacagataccagttttgggacacacaaccggtaccaaaactagatgaagtcataacatctcatggtgcaattgaaccagataaagacaacgtacgccaagaaccgtattctttgccacagggttttatgtgggacactttagacttgagtgatgccgaagtgctcaaggagttatacacgttgttaaatgagaattacgtagaagatgatgacaatatgttccgatttgactattcacccgagttcctgttgtgggctctgcgtccaccaggctggctcctgcagtggcactgtggggtcagagtgtcttcaaataaaaaactggtcgggttcataagtgccatcccagcaaacattcggatttatgacagtgtgaagaagatggtagaaatcaactttctttgtgttcataagaagttgagatcgaaacgggtagccccagtgctaatccgagagatcactagaagagtgaacctggaagggatcttccaggctgtgtacaccgcgggagtggttcttcctaagcccatagccacatgcagatactggcatcgatcactaaaccccaaaaaattggtagaagtgaaattttctcacttgagtagaaatatgactttacagagaacaatgaagctatacagacttccagatgttacaaagacttcaggtttgagaccaatggaaccaaaagatatcaaatcagttcgagaattaatcaacacttacctgaagcagtttcatctggctccagtgatggatgaagaggaagtagcccactggttcctcccccgggagcacattattgacacgtttgtagtggagagccccaacggtaaactgactgatttcctgagcttctatacgctcccctccacggtgatgcaccaccctgctcacaagagcctcaaagccgcctactcattctacaacatccacacagagacgcccctgctggacctcatgagcgacgcgctcatcctggctaaatcgaaaggatttgatgtattcaatgcactggatttgatggaaaataagacattcttggaaaaactcaagtttggtataggagatggcaatttgcagtattacctgtacaattggaggtgtccaggtacagattctgaaaaggttggactagtactacaatag

SEQ ID NO: 28236 - DNA, 1506 bp, Homo Sapiens
atgatgagaaataaggacaaaagccaagaggaggacagttcgctacacagcaatgcatcgagtcactcagcctctgaagaagcttcgggttcagactcaggcagtcagtcggaaagtgagcagggaagtgatccaggaagtggacatggcagcgagtcgaacagcagctctgaatcttctgagagtcagtcggaatctgagagcgaatcagcaggttccaaatcccagccagtcctcccagaagccaaagagaagccagcctctaagaaggaacggatagctgatgtgaagaagatgtgggaagaatatcctgatgtttatggggtcaggcggtcaaaccgaagcagacaagaaccatcgcgatttaatattaaggaagaggcaagtagcgggtctgagagtgggagcccaaaaagaagaggccagaggcagctgaaaaaacaagaaaaatggaaacaggaaccctcagaagatgaacaggaacaaggcaccagtgcagagagtgagccagaacaaaaaaaagtaaaagccagaagacctgtccccagaagaacagtgcccaaacctcgtgttaaaaagcagccgaagactcagcgtggaaagagaaaaaagcaagattcttctgatgaggatgatgatgatgacgaagctcccaaaaggcagactcgtcgaagagcggctaaaaacgttagttacaaagaagatgatgactttgagactgactcagatgatctcattgaaatgactggagaaggagttgatgaacagcaagataatagtgaaactattgaaaaggtcttagattcaagactgggaaagaaaggagccactggagcatctactactgtatatgcgattgaagctaatggcgaccctagtggtgactttgacactgaaaaggatgaaggtgaaatccagtacctcatcaagtggaagggttggtcttacatccacagcacatgggagagtgaagaatccttacagcaacagaaagtgaagggcctaaaaaaactagagaacttcaagaaaaaagaggacgaaatcaaacaatggttagggaaagtttctcctgaagatgtagaatatttcaattgccaacaggagctggcttcagagttgaataaacagtatcagatagtagaaagagtaatagctgtgaagacaagtaaatctacattgggtcaaacagattttccagctcatagtcggaagccggcaccctcaaatgagcccgaatatctatgtaaatggatgggactcccctattcagagtgtagctgggaagatgaagccctcattggaaagaaattccagaattgcattgacagcttccacagtaggaacaactcaaaaaccatcccaacaagagaatgcaaggccctgaagcagagaccacgatttgtagctttaaagaaacaacctgcatatttaggaggggagaatctggaacttcgagattatcagctagaaggtctaaactggctagctcattcctggtgcaagtag

SEQ ID NO: 28237 - DNA, 1584 bp, Homo Sapiens
atgagtgacactttgacagcggatgtcattggtcgaagagttgaagttaatggagaacatgcaacagtacgttttgctggtgttgtccctcccgtggcaggaccctggttaggagtagaatgggacaatcccgagagaggaaagcatgatgggagccacgaagggactgtgtattttaaatgcaggcacccgacaggaggatcctttattcgtccgaacaaggtaaattttggaacagactttcttactgcaattaagaaccgctatgtgttagaagatggaccagaggaagatagaaaagagcaaattgttacaattggaaataaacctgtggagactatcggttttgactctattatgaaacagcaaagtcagctgagcaagttgcaagaagtttctctgaggaactgtgcagtaagttgtgctggtgaaaaaggaggagttgctgaagcatgtcctaatatcagaaaggtagatttgtcaaaaaacctgttgtcatcatgggatgaagtgatacacattgctgatcagctcagacacctggaagtccttaatgtcagtgaaaataaactaaaatttccctccggttcagtattaactggaacgctttctgtactgaaggttttagtcctcaatcaaacaggaataacgtgggctgaggtgctgcggtgtgtcgcggggtgcccaggcctggaggaactctaccttgagtctaacaacattttcatttccgaaaggccaacagatgttctccagacagtcaagttattagatctttcctctaatcaattaattgatgaaaatcagctgtatctgatagcccacctgcccaggttagaacaattaatcctctctgacactggaatttcttctctacattttccggatgctggaattgggtgcaaaacgtccatgttcccatccttgaagtacctggtagtaaacgacaatcagatatcacaatggtcgtttttcaatgagctagagaagttaccaagtctacgggctttgtcctgcctaagaaaccccctgaccaaagaggacaaagaagcagagacggcgcgactactcattatcgccagcattggccagctgaagacgctgaacaaatgtgagattctccccgaggagaggcggagagctgagcttgactaccgaaaagcttttggaaatgagtggaaacaggctggtggacataaggatccggaaaaaaacagactcagcgaagaattcctcacagcccatcccagataccagttcctctgcctgaaatatggtgcacctgaagattgggaactcaaaacacagcaaccacttatgctgaaaaaccagctactaacactgaagataaaataccctcatcaacttgatcagaaagtcctggagaaacaactgccgggctccatgacaattcaaaaggtgaagggattgctgtcacgtcttctcaaagttcctgtgtcagaccttctgttgtcctatgaaagtcccaaaaagccgggcagagaaatcgagctggaaaatgacctaaagtcattacagttttattctgtggaaaatggagattgtctattagtgcgatggtag

SEQ ID NO: 28238 - DNA, 1821 bp, Homo Sapiens
atgaaattatatcagacacctctggagctcaaattaaaacacagcactgtccatgtggatgaactgtgtcctctcattgtccccaatctgggagttgctgtcattcatgactatgcagattgggttaaagaagcatcaggagacttaccagaagcacaaattgtgaagcactggagcctgacatggacactatgtgaagccctatggggccacctgaaggagcttgacagccagctaaatgaaccccgtgaatacattcaaattctggagcgaagaagagctttctcccgctggctatcctgtactgccacacctcagattgaagaggaagtctccttaacccaaaaaaacagccctgtggaggctgtattcagctacctcacaggcaaaaggatcagtgaggcctgctctctggcccagcagtcaggggatcatcgtcttgctcttcttttatctcagtttgtgggtagccagtcagtccgggagctgctcaccatgcagttggtggactggcatcagctccaagcagactccttcatccaggatgagagactgcgcatctttgctctgttggctggaaaaccggtgtggcagctctcagaaaagaagcaaataaacgtgtgctcccagttggattggaaacgctccctggctatccatctttggtatttgcttccaccaacagcctccatttctagggcgctcagcatgtatgaagaagcatttcagaatacctctgacagtgacagatatgcctgctccccacttccttcgtatctggagggttctggctgtgtgatagcggaggagcaaaactcacagacaccacttcgagatgtctgctttcaccttctaaaactctacagtgacagacattatgatctcaaccagctgctggagcctcgaagcataacagcagatcctttggactaccgcctaagctggcacttgtgggaagtgctgagggctcttaactacacccatctctcagcgcagtgtgaaggtgtgctacaggccagttacgctggccagcttgaaagtgaggggctctgggagtgggccatctttgtcctcctgcacattgacaactcaggcatacgtgagaaggctgttcgagagctgcttacccggcactgccagctgttggagacccctgaatcttgggctaaagagactttccttacccagaagctccgtgtacctgccaaatggatccacgaggccaaagctgtgcgagcacacatggaatctgacaagcacttagaggccctttgcttatttaaggctgagcactggaaccgctgccacaagctcatcatccgacacttagcttctgatgccatcattaatgagaactatgactacctgaaggggttcttggaagacctggcacctccagagcgcagcagcctaattcaggattgggaaacatctgggcttgtttacctggactatattagagtcattgaaatgctccgccatatacagcaggtggattgctcaggtaatgacctggagcagttacacatcaaagtgacttcactgtgcagtcggatagagcagattcagtgttacagtgctaaagatcgcctggctcagtcagacatggccaaacgtgtagccaacctgctgcgcgtggtgctgagtctgcatcatcctcctgatagaacctccgactcaacaccagaccctcagcgagtccctttgcgcctcttggctccccacattggccggcttcccatgcctgaggactatgccatggacgaactgcgcagccttacccagtcctatctgcgagaactggctgttgggagcctgtag

SEQ ID NO: 28239 - DNA, 2601 bp, Homo Sapiens
atggctggccgcgtccctagcctgctagttctccttgtttttccaagcagctgtttggctttccgaagcccactttctgtctttaagaggtttaaagaaactaccagaccattttccaatgaatgtcttggtaccaccagacccgtagttcctattgattcatcagattttgcattggatattcgcatgcctggggttacacctaaacagtccgatacatacttctgcatgtctatgcgaataccagtggatgaggaagccttcgtgattgacttcaagcctcgagccagcatggatactgtccatcacatgttactttttggatgcaatatgccttcatccactggaagttactggttttgtgatgaaggaacctgtacagataaagccaatattctgtatgcctgggcgagaaatgctccccctacccggctccccaaaggtgttggattcagagttggaggagagactggaagtaaatactttgtactacaggtacactatggggatattagtgcttttagagataataacaaggactgttctggtgtgtccttacacctcacacgtctgccacagcctttaattgctggcatgtaccttatgatgtctgttgacactgttatcccagcaggagaaaaagtggtgaattctgacatttcatgccattataaaaattatccaatgcatgtctttgcctatagagttcacactcaccatttaggtaaggtagtaagtggatacagagtaagaaatggacagtggacactgattggacggcagagccctcagctgccacaggctttctaccctgtggggcatccagttgatgtaagttttggtgacctactggctgcaagatgtgtattcactggtgaaggaaggacagaagccacacacattggtggcacgtctagtgatgaaatgtgcaacttatacattatgtattacatggaagccaagcatgcagtttctttcatgacctgtacccagaatgtagctccagatatgttcagaaccataccaccagaggccaacattccaattcccgtgaagtctgatatggttatgatgcatgaacatcataaagaaacagaatataaagataagattcctttactacagcagccaaaacgagaagaagaagaagtgttagaccaggatttccacatggaagaggcactggattggcctggagtatacttgttaccaggccaggtttctggggtggctctagaccctaagaataacctggtgattttccacagaggtgaccatgtctgggatggaaactcgtttgacagcaagtttgtttaccagcaaataggactcggaccaattgaagaagacactattcttgtcatagatccaaataatgctgcagtactccagtccagtggaaaaaatctgttttacttgccacatggcttgagtatagataaagatgggaattattgggtcacagacgtggctctccatcaggtgttcaaactggatccaaacaataaagaaggccctgtattaatcctgggaaggagcatgcaaccaggcagtgaccagaatcacttctgtcaacccactgatgtggctgtggatccaggcactggagccatttatgtatcagatggttactgcaacagcaggattgtgcagttttcaccaagtggaaagttcatcacacagtggggagaagagtcttcagggagcagtcctctgccaggccagttcactgttcctcacagcttggctcttgtgcctcttttgggccaattatgtgtggcagaccgggaaaatggtcggatccagtgttttaaaactgacaccaaagaatttgtgagagagattaagcattcatcatttggaagaaatgtatttgcaatttcatatataccaggcttgctctttgcagtgaatgggaagcctcattttggggaccaagaacctgtacaaggatttgtgatgaacttttccaatggggaaattatcgacatcttcaagccagtgcgcaagcactttgatatgcctcatgatattgttgcatctgaagatgggactgtgtacattggagatgctcataccaacaccgtgtggaagttcaccttgactgagaaattggaacatcgatcagttaaaaaggctggcattgaggtccaggaaatcaaagaagccgaggcagttgttgaaaccaaaatggagaacaaacccacctcctcagaattgcagaagatgcaagagaaacagaaactgatcaaagagccaggctcgggagtgcctgttgttctcattacaacccttctggttattccggtggttgtcctgctggccattgccatatttattcggtggaaaaaatcaagggcctttggagattctgaacacaaactcgagacgagttcaggaagagtactgggaagatttagaggaaagggaagtggaggcttaaaccttggtaatttctttgcaagccgtaagggctacagtcgaaaagggtttgaccggcttagcactgagggcagtgaccaagagaaagaggatgatggaagtgaatcagaagaggagtattcagcacctctgcctgcgctcgcaccttcctcctcctag

SEQ ID NO: 28240 - DNA, 1473 bp, Homo Sapiens
atgcatcactgtaagcgataccgctcccctgaaccagacccgtacctgagctaccgatggaagaggaggaggtcctacagtcgggaacatgaagggagactgcgatacccgtcccgaagggagcctcccccacgaagatctcggtccagaagccatgaccgcctgccctaccagaggaggtaccgggagcgccgtgacagcgatacataccggtgtgaagagcggagcccatcctttggagaggactactatggaccttcacgttctcgtcatcgtcggcgatcgcgggagagggggccataccggacccgcaagcatgcccaccactgccacaaacgccgcaccaggtcttgtagcagcgcctcctcgagaagccaacagagcagtaagcgcagcagccggagtgtggaagatgacaaggagggtcacctggtgtgccggatcggcgattggctccaagagcgatatgagattgtggggaacctgggtgaaggcacctttggcaaggtggtggagtgcttggaccatgccagagggaagtctcaggttgccctgaagatcatccgcaacgtgggcaagtaccgggaggctgcccggctagaaatcaacgtgctcaaaaaaatcaaggagaaggacaaagaaaacaagttcctgtgtgtcttgatgtctgactggttcaacttccacggtcacatgtgcatcgcctttgagctcctgggcaagaacacctttgagttcctgaaggagaataacttccagccttaccccctaccacatgtccggcacatggcctaccagctctgccacgcccttagatttctgcatgagaatcagctgacccatacagacttgaaaccagagaacatcctgtttgtgaattctgagtttgaaaccctctacaatgagcacaagagctgtgaggagaagtcagtgaagaacaccagcatccgagtggctgactttggcagtgccacatttgaccatgagcaccacaccaccattgtggccacccgtcactatcgcccgcctgaggtgatccttgagctgggctgggcacagccctgtgacgtctggagcattggctgcattctctttgagtactaccggggcttcacactcttccagacccacgaaaaccgagagcacctggtgatgatggagaagatcctagggcccatcccatcacacatgatccaccgtaccaggaagcagaaatatttctacaaagggggcctagtttgggatgagaacagctctgacggccggtatgtgaaggagaactgcaaacctctgaagagttacatgctccaagactccctggagcacgtgcagctgtttgacctgatgaggaggatgttagaatttgaccctgcccagcgcatcacactggccgaggccctgctgcaccccttctttgctggcctgacccctgaggagcggtccttccacaccagccgcaacccaagcagattg

SEQ ID NO: 28241 - DNA, 1323 bp, Homo Sapiens
atggggccgcccggctccccatggcagtgggtgacgctgctgctggggctgctgctccctcctgccgcccccttctggctcctcaatgtgctcttccccccgcacaccacgcccaaggctgagctcagtaaccacacacggcccgtcatcctcgtgcccggctgcctggggaatcagctagaagccaagctggacaaaccagatgtggtgaactggatgtgctaccgcaagacagaggacttcttcaccatctggctggatctcaacatgttcctaccccttggggtagactgctggatcgataacaccagggttgtctacaaccggagctctgggctcgtgtccaacgcccctggtgtccagatccgcgtccctggctttggcaagacctactctgtggagtacctggacagcagcaagctggcagggtacctgcacacactggtgcagaacctggtcaacaatggctacgtgcgggacgagactgtgcgcgccgccccctatgactggcggctggagcccggccagcaggaggagtactaccgcaagctcgcagggctggtggaggagatgcacgctgcctatgggaagcctgtcttcctcattggccacagcctcggctgtctacacttgctctatttcctgctgcgccagccccaggcctggaaggaccgctttattgatggcttcatctctcttggggctccctggggtggctccatcaagcccatgctggtcttggcctcaggtgacaaccagggcatccccatcatgtccagcatcaagctgaaagaggagcagcgcataaccaccacctccccctggatgtttccctctcgcatggcgtggcctgaggaccacgtgttcatttccacacccagcttcaactacacaggccgtgacttccaacgcttctttgcagacctgcactttgaggaaggctggtacatgtggctgcagtcacgtgacctcctggcaggactcccagcacctggtgtggaagtatactgtctttacggcgtgggcctgcccacgccccgcacctacatctacgaccacggcttcccctacacggaccctgtgggtgtgctctatgaggatggtgatgacacggtggcgacccgcagcaccgagctctgtggcctgtggcagggccgccagccacagcctgtgcacctgctgcccctgcacgggatacagcatctcaacatggtcttcagcaacctgaccctggagcacatcaatgccatcctgctgggtgcctaccgccagggtccccctgcatccccgactgccagcccagagcccccgcctcctgaatag

SEQ ID NO: 28242 - DNA, 124074 bp, Homo Sapiens
gatcacaaaataaattttaaatttttgaccccatttaaagctttttgttgtagagaagtagggcgaggtaagcacaaaagacttccaggaggcaaagtagatggcactggggtcaaattttgtgacagaagccgaatcacgtccaggaacgaccaaaacttccaaaggagcaaaagctagtccttttgcgggggcgcaggcagaagcggcggcagaagcggcggcagaagcggcaggcggaagcggcaggcggaagcggcaggcggaagcggaaggcgtccatctttaccgtgttcagacccggatgagtcctagtccccgccacacacaggtcgtgggttctcctttgagagtgaccactggttcctagagcttttcctaaactggagacggatcctgccctgggggtctcagtcaccgcgaggactcgagggtaactgccagaggtcccaggtggcccgaggtgatgccgggcgcagggaggggctggggcggagagagggctggggtttggggccgtgtcggggatgagtggtgaggggtgcccagaagggggaggcagaggttggtgtggccacggtggaaggagccacaaacgtggacatgtaaaggaggaccaaaaggtttttttttgtaaagatcaatatttaggacagaaatcacaacctttctataaaacaaaacaactgtataatttaaaaattgaattgtgagctaaacgcatatgaggggttacgggttttcaaaattcagagattaggagcaaaaccaaaaacttgtagcccgcttccctgtgagcctcttctccagcccagcccggctgcaggactctggggctgccttgaggacggggtgctatttctcaggtttcgtctgcaaaggggtaagtcaccccaaaccagagcactcagtggtggacttacagccaatcctgagcttctcaagacactagagtgcaccccagcctgcctgcccccgaggcctggcaccagccagtgcggcaaaccagcaggcagggcactgaatgtcgtctgagctgcagggcccttcctggggctgggggtccaggccagagcctctgtgctgtgtgtgtgtccttactgtccacgcccgagcctcatttatatggagaacacatttcttctcagaaaagcaaacctcaagcagttgaactggagaatgaggacagaagggcttatgcagagccgggatattttttacacaaaatcagaggagggcgaccttcaaactattatttgtttttctcctttggcctggaactaatcagcttagcatggatgcctgggtgtcccggtgagatagcgaacccatctcatttgggtgtttaccttttataaaagaaaaaaaaatccatttcttatgagtacattgttatttattctagaacttccctcataaaccgtcagttcatgctatgtaatcctataaagtagtttatttttaaaaatcgttgaaaggataagcagaagatcgcctcttcctggcatgtgtcaaattgctttatatgtagctattctagagcaaaaatgctgactgtccgttgaatattgtcacttgccaagcagagagctgcgcacccctttcacccatctgtgggtcagtatgcagtgtatttggggatatgacacagtttcttatcgcttcccatcacctgtcctgtgtgaattgaggcggaagtaatctcttgaggatgacctgtctgtgtttaaattgaagatgaatattgccatggacaaatctgatttgatcattgaagggacaagcctctgttttagaattcattgtgttgtcactcagttttgctgtgattgcctccttggtgcctcctctttctgcgacaaaaccgagggaaaaaataggtggggggaactgtgctgcaggtacttttaagtggattcaatttacctctgtttaagtagtagagaaatatgtttgggccctggagagaaaaatgccctggataatttgcttataaaccaggcgcatgcctggagtgaccagtgagtgtggcagcagccaggaggggccaccctgttgtccctgcctcagggcaggctctcccaccccagctccttggtggttcaggtgaccttgtgcatccctcatgtcaagcccttgcccaggcaagcaggggtggggctggagccctgggattcacacagggcacgccgtgcaccatgaggtcagtgacatcataacagaagcctggcttctcagacccatccagccccaggaatcctgaaagtgggcagaccttcagggcactgggacaatttggagggaagggaggggctatctcaaggaaccctgcagtgcatgtacctctcagggagaaacgggtgacagtggaagcgccctggtctggggatcaaggtacctgggcttaaagctttgctcccatatacctcagtcagcctcctcctctgcaaaacaaagacagtaaagcctggccacccaccccttgcttggtcttcagggtgtcaagatggaactcacactttgagtcttggctgggatggcgtttgggctggataaaggaagtacagtgaaagtagaagtggtagtcagaccgatgtgcagctgggtttgctctgctgggcagtgagaagcaagtgctgagtgactgccacccagaggaacatggctgtcaggccctgtgacccagcacctctccaccctggatgtaaactgctgagaatcaaggggtggggctcccaggaatgaggccatggcagatgaggaggtctggagtgtctagcctagtgcaagctatttgtttcccagacaaatagctcagtggagcagaatagagagcccagaagtagacccatataaatatagtcaactgatgtttgccaaaagtacaaaggcaataaaatggacaaaagatagtgttttcaacaaatggcgctcgatgttcacatgaaaaaataaaagcatgtaaacacaaatcataaacccttcacaacagctaactctaaatagatcacagaaactacaaacgacaaaatttctagaaagtgacattagagaaaacctagatggcttgggtttggtgatgactttttaggtacaacaccaaaggcaacatctatgaaggaaacaataggctggacttcattaaaattaaaaactgctctgcaaaagataaagccaagaggctgaaaagacaggtcatagactgggagaatatgtttgcaaaagacacatcttataaagggtcattatctaaaatcaataaagactcttaaagctcaacaataagaaaatgatctgattttttaaatgggcaaaataatttaagagattcctcacccaagaagatatacagatggcaaataagcatatgaaaagatgctccaaatcttatgagggaagtgcaaattaaaacaagaatgagatgccactacacatctattagaatggcgaaaatccagaacactgacaacaccaaatgctggtgaggatgtggagcaacaggaacgctcattcattgctggtaggaatgcgaatggtacagccactttggaggaccgtttgacagtttcttacaaaactaaatataatcttaccatatggtccagcagttgcgctccaaagaagctgaaaacttaggtccacacaaaacctgctcacggatgtttatagcagctttattcattattgccaaacttggaagcaaccaagatgtccttccttcagtaagtgaatggataaatgaaacgtggcacatttgggcaatggaatatcagtcagtgctgtaaagaaattagctagcaagtaatgaaaagatgtagaggaaccttaaatgcatgttactaggtgaaataagtctatctgaaaaggctatatattgtatgattccaactatatgacattttgaaaaaagtcaaaactgtggaaacagtaaaaagactagcaggagtcaggcatttgagagcaggaggagtgaataggcatagcacagaggatttttagatggagttttgctcttgttgcccaggctggagtgcagtggcgcaatcttggctcactgcaacctccacctcccgggttcaagtgattatcttttctcagccgcctgagtaggtgtccaccaccacgcctggctaattttttttgtatttttagtagagatggaatttcaccatgttgacaaggatggtctcaaactcctgacctcaggtgatccacccaccttggccacccaatgtgctgggattacaggcatgagccaccgtgctcagccagtataataagatttaaagagaaacatcaaaacattaaaaagtgggaggatgaaggtaaaatgtagagtttttattcgttttctctttgcttgtttgtttatgcaccagtgttaagttgtcatcagtttaaaataatgagttataagatattatttgtaagccccatggtaacctcaaaccaaaaaacatacaacagatacacaaaaaataaaaagcaagaactgaaaacgtaccgcaagaaaaaatcaccttcactaaaagaaagacagaagggaaggaaagaaggaagatgagagcacagaacaaccagaaaacaaataataaaagggcaagagtaagtctttaacttatcaataataacagtgaaagtaaatgaactaaactctccaacaaaagattaaaaaacaagacccaccagtctgttgcctgcaagaaacacacttcacctataaagacacacagtggctgaaaataaagttatggaaaaagatattccatgcaaatggaaaacccaaaaaagagcaggaggccctatacttacgtcaaacaaaataaatttcaagacaaaaactataataagagaaaaagtaggtaattatataatgataaaggggttaattcagcaagatgatataacaattgtaagtacatatgcacccaacactgaagcacccagatatataaaatattattagaactgaagagagagatagaccccaatacaataatagctggagacttaacaccccaccttcagcactggacagaccattcagatagaaaatcactaaagaaacattggacttaatctgcactgtagaccaaatggacctaataactgtttacagaatattttatttaatggctgtggaatacacatccttctcagcacgtggatcattctcaagaccgtatgttaggccacaaaacaagcctttaaaaattccaaaaaaatgaaagtatataaaatatcttctctgaccacaatggaataaaactagaaatcaataatgaggaattttggaaactatacaaacatatggaaattaaacaatatgctcctgaataagaacaaaaaccatatgatcatttcaattgatgctgaaaaagtatctgataaaattcaacatccctttatgattagaaaaaataaaaaataaaagcgatgtacaacagacccatagctggtattatactgacggggaaaaactgaaagcctctcctctaagatctgaaacaagacaaagatgcctcctttcaccactgttattcaacatagcactggaaggcctagctagagcaatcagacaagagaaataaataaagggcatccagattagaaaagaaagtcaaattatcattgtttgcagaggatatgatcttatgtttggaaaaacctaatgactgtgctgaaaaagtattagaactgataaattcagcaaagttgcaggatacaaaatcaacctacaacagtcagtagcattcgtgtatgccaacagtgagcaatctggaaatgaaatcaagaaaataattccatttacaatagctacaaataaaataggaagaaacttaaccaaagaagtgaaagttctctatggtgaagactataacacatcaatgcaagaaattgaagagaacacacaaaaaaatggaatgatgtttcatgttcatagactggaagaaccagtattgttaaaatgcccatacaacccaaagcagtctacacactaaatgcaatccctctcaaaataccagtgacattcttcacagaaatagaaaaaaaaatcttaaaatttatctggaaacacacaagacccaaaatagccaaagctatcctaagaaaaaaatgaaactggaggaatcacattacctgatttcaacttacactgcagagctgtagtaaccaaaccagcatggtaccagcataaaaacagacacacaccaatgggacagaatagagaacccagggctggttgcagtggctcatgcctctaatcccagcactttgggaggccaaggcatgcggatcacctgaggccaggagttcaagactagcctgaccaacatggtgaaaccccgtctttactaaaaatacaaaaaattagccaggtgtgagggtgggtgcctgtaatctcagctactcgggaggctgaggcaggagaatcgcttgaacctaggagtcagaggttgcagtgagccaagatggcaccactacactccaacctgggtgcaacagagtgagactccatctaaaaaaaaaaaaatagtgaacacagaaataaatccatccatctacatacagtaaacttatttttgacaaaggtgacaagaatatacattggaagaaaggacaatctcttcaataagtggtgctgagaaaaaactggatatccttatacagaagaatgaaactggacacctatctctcaccatatacaaaactcaaatcaatatggatgaaagacaaagacaaatctcaaaactatgaaactactaaaagaaaacactgaggaactctccgggacactggactgggcaaaattttttgagtaataccccacgaccacacgcatccaaagcaaaaatggacaaatgggatcacatcaagttaaaaatctcctgcacagcaaaggatacaatcaacaaagtgaggagacaacccacagaaagggagaaaatatttgcaaactatccattggacaaaggattaataaccagaatatataaaggggtcaaacaactcaataggaaagctaataatccagtttaaaaatgggcaaaagatctgaatagatatttctcgaaagaaggcatacaaatggcaaacaggcatatgaaatggtactcaatatcattgctcatcaggtaaatgcaagtcaaaactatgagatatcatttcacctcagttaaaatggcttttatccaaaaggcaggcaataatgaatgctggcagggatgtgaagaagagaaccctcatacactgtgaggtgacaggcaaaggaaatgtaacatacacataattggaatccccaacaaaatattggaaaaatggacaataataaatactaaaaaagagtaagtcaagaatgtcttccacaatcctgtgcctgcacatgtcatccacaggcccaagggctagccagccctgcctgctgccaccaccactagcacggggggcctgagggtgcacctgcttagcccatcactggtatcatcaacacccatgtaagatgcccaggggttcaatgaccagtatgcaaagggccttctgccaccacagccagtgcctatgctgccacccagggtaatgaggactagcttacacagcacttcagcctccagcaaagcatcaccacagcctccagaaacagccacagcctaagctaccgaggaacttgcagataccactgacgttgattacagccacagaaatcatacagagactacattacagcacccacttagaattaaagccaaagtaccctacccaactgacactatggatacaattataggaaaagtatttccctaagaaagctacttcataaaattggtagaagtgactgttacaacagatgcacagttatcaacctaaggacacaggaaacatgaaaaagcaaggaaacatgacagcttcaaaggaacacaataattctccagcagcttcaaaggaacacaataattctccagcagcagaccccaaagaaaaggaaatctgtgaaatgcctgaaaagaatttcaaaataataatcttaagtcttagcaagatatacagaaagacaaaacaaagaaatcaggaaaacaattgatgatctgaatgagaaattcaacaaagaaatacatttcataaaatgaaccaaacagaaatcctgcaactgaagaattcagtgaaccaaaaatacaaccaagagcttcaataatctattatatcaagcagaagaaagaatttctgaatttgaagacagagcaacgagcactttttgtttgttttgttttgtttttgagacagaatcttgctctgtcacccaggctgcatggcatggtcacagctcactgcagcctcaacctaccaggctcaagtgatcctcccatctcagcctcctgagcagctgggactacaggcgtgccctgccacacgtggctagtttttaaactttttgtagagatggcatctcactatgttgccaaggctagtctcaaacccctgggctcaagcaatcctcccatcttgacctcccaaagtgctgcgattacaggcatgagccaccatgcctggccgaagacaaagcttttgaaataacccagtcagactgaaaaaaaaaaaaaaaaaacaatgaaaagactgggtgcagtagctcacacctgtaatcccagcactttgggaggctgaggcgggcagatcacctgaggtggggagtttgagaccagcctgaccaacgtggagaaacccagagtctactaaaaatacaaaattagccagcatggttgcacatgcctgtaatcccagctactcgggaggctgaggcaggataatcacttgaacccgggaggcggaggttgcagtgagccaagatcgcaccattgcactccagcctgggcaacaaaagcaaaactccatctcaaaaagaaataacggccaggcgcagtggctcatgcctataatctcagcactttgggaggccaaggcaggtggatcacctgaggtcaggagtttgagaccagcctgaccaacatgaagaaaccccgtctctactaaaaatacaaaattagtcgggtgtgatggcgcatgcctgtaattccagctactcaggaggctgaggcagaagaatcgcttgaacccaggagttggaggttgcggtgagccgagatcgtgccattgcactccagcctgggcaataagagtgaaactccgtctcaaaaaaaaaaaaaaaaaaaagaaaaagaaaaaacaaaagaaaaaaagaaaaatcctgtgtgacatatggaacaccaccaagtgaacaaatattcaaattttaggaattccagaaagagaagagatggggaaaggcatagaaaatttattcaatgaactaatagctgaaaatttctccagtcttggaagagatataaacatttaggtaattattatgccactttctggcttctgtgatactaatgagatgtcaacaatctaattgtcattcctttgtaaataatctgtttttttttctttagggctattttaaaatattttctgtttccttgatttctcctcctttggatgtattgggcttcctgactctttgaagaatctatccagtgtctttaaggtatctgaaaaattctcagccattgtctctttaaatattgcctctcgtgttatttctattatttccttcaaaaactcttttacatgtatgttaggttctctgtttccatcatccatggtttttcaactgtttttaagtgttttgtctctttgtttctctggactgcattctgatgtaatttctttggatctgttttccagttcactgtttctctcttcgtctgtgtctaaatctgttgttcagacatcgaattttatagtaatttgtttcctttgttcttattcttgattgtgaactgttcatttgctttgtaaatatattagttggaattatttgagtctttgacttaattttccccagaaagatttgtatttccttcaacttgtcaccttgatgggaggggggaagaggtgtctccagtataggactatttttgtaaataaatcaacttaaaatttggaccacacaaagttagactgaatttggatcatcaacttcattgaggtctgccttgagtttataaattcttggggtatttttttctccttcctcaatgttactgctgaactgtatcttggccttttggctaagatcaagtggagtatcttttcttatcagtttaatgttagggctgagacaggaacatttcctgcatgtctatgtacaattgcatgaaatttttcatttacagtttgaagtttctgctgtacaaagggtcctcttctatttttcccaccttgggaagatcctcaggcttatttcctctcctctcagccctctatcattgtcagacttgctcagtgtttgcagggttctgtagaaaacctggatttgaaagttggatttggcatggcttgtctcctggggttcttgatttccctctctttgttccttgtggtttatttgctttcatgaatgatctgtggtatgttttataagtttctttgaattcaactatttactttattcaggagggttgttcagggcatcttatctgcaatagtataagaattataatccccaaggctattcttcactttctatgtccttttggtttggatctgtcttaacctagaaaacagagcctgaggcaaggatgtaaagcattggggctttatttgggaagtgtaaacccaggactgtgagagtgaggtgcgagagattgaggcaaggaaggacctccctgcagtgatgcgatgtgagtctcaactgtgctggctgctgtttcataaggggctgaagtgacctggctcggcagatgcctctgggtcagctgcatgggaagatggctccagggattccacaggaggggaacggaatgtatcttctggctctcttctggcggctactttccactggtcagagctgtccccgcagggaatcaggggccctgggttgcattcccagcctcctcagcagctgctctgggtaccacatccccatgctgcagagtggcatctcatgaggacacagaagtggcaggtggagcatgtggctggtctgcctggctgcactgagttggtcgaggcaggtcagcaggaacctgagtggctgcttggcccacaccacagcagagccagggagaccagcaggcacacgagatgtctgctgacacagggtctaagatggcccagttatgcactggcccctgtgcatttctgggccacgacaccttctgaattgagttctcagtgtcattacaagtcacaggtttctgggtgatgttaagatatcacaaggtggactggctatgtttccaaccctttttcctctagctccgtacaccatctccatccccagcgctggcccttggcagctcagggtaaagtcatgtgaagctctgggtgcaggtcaagggctagtggtggaggtaagaggctctgctcctatggggtgggggtgaggggctctgtgcctatggagtgagggtcagggggtgaggggctctgtgcctatggggtgggggtgaggggtggggggctctgtgcctatggggtggggatgaggggtggggggctctgtgcctatggggtgggggtgaggggtgaggggctctgtgcctatggggtgggggtgaggggtggggggctctgtgcctatggggtgggggtgaggggtgaggggctctgtgcctatggggtgggggtgaagggctctgcgcctaagggctagtggtggtaagaggctctgctcctatggggtggggaggcccctggggtggataagttcagctgtggggaggcagtgggaagctggtttgggtagcgggttcagacttgtttccaggcaagggtatcagagccctgctggatttcaaccctctgacaccccaagtccaaggtcagtaccccaagtccttccagggcagaacctcaaaacccccacaggagtgatacgaggtatggaactgggttcctggacagccagccttgtaggtgtgcagagacgtcctcttcattgtgatgctgtcactaatactgtaaaagattggtcattgttcagtaggagaaaagaattctgtctgcacattacagtcgtaatgcccccactggctctaagaattcctgaaacaaggggctcatctgacctgacgtcatgtgtgaccatggagtccatctcccacggacgtgagctgagggagcagaagccagattgtgtgcccttccccacacgaagagcctcaggtcttggtagagcagcatgacattctggtgtggccataagagggtgtgggaggggcagacgggggagaaaaatggggcaagcagcgcctcctcagccccccaacccaatgacccttaacagccaccagcacccacaggagcaggtgttttaggacagccagtcgagaaggcgaggtaaacatcctctgtgtctagcctggtgacaagtttgagcttatgggacattaactcacaaagcaaagtaactgcagcacgctgtgaaccctccctgaattaatggcaggggaatctgcttcaagcagaaatgggttatctacagaaactttggatgtgcagtttagtctgaatcctccccattaatggtgagggtaatggggtggagaggacagcctcagccggccccagctgacttctctccgctgtggaagttaattctgtgatgctgtggggcctgacagcgttttttgccttcctgctttttttaaggcagacattgccaattcacctttccggagttgtcttctgttccgcgtggggagaagatgatcgagggggctgctgggagcataggggaggcaccttgtgcccacacacatctgcagatgaactcttggggtcatgcggagtgagtcctaactgtgtacggctttagagggcgtctccaactcaaccaactgctcagtgctcagagcagtcttatctcatggatacatcatgacagatgccaatggcaatgtaatcatcagaaagtattctttaaatttcttgaagcaagcaaccagaaatattaaagataagcctaaatataaggcagccctctgtaacccacccacatgacactggtgtaggtttgcacacgccttgcattccatggagtcatcgaatggttatacaagtgttatttgtggccaggcacggtggctcacgcctgtaatcccaccactttgggaggccgaggcaggtggatcacctgaggtcaggagttcgagaccagcctgaccaacatggagaaaccccgtctctactaaaaatacaaaattagccaggcatggtggtgcatgcctgtaattccagctactcaggaggctgaggcaggagaaatgcttgaatccgggaggcggaggttgtagtgagccaagatcgtgccattgcactccagcctgggcaacaagagcaaaactccatctcaaaaaaaaaaaagtgttatttgtgttattttaatgttctccctttcacttcaagtcgatatacctttctacatgcctaactttattatacttttcaatactgcctagttgtatatttaggagaggtacagtaatttactaaaacatctccattattgcacatttagtcaaatagttgttttttcgtttaagtgatgtcataatgaacatctccatggtggttttgtttcaggtgagattcttgttcttaagctgcatccccaggagtaggattactgggtcaaagcacagacacatctttatgacttttgctctgtgttaccaaaactcacaaaaatgtttaaaggattgtttgaaaaaaggttgtgttcaaggtggttcaagagaatcaggagtttcaggctgtccagaattttgtaaaccaaaaccacacccctaatgcaaagaagttatggatcttataaaagaaagaaagaaaatctgtatgacgctgagcagaaaacatcactcatcagcccgatacttatttttgccatagttgacttgtttaaaaagctgtaatttcagaagatgtgttatttttagtaataatactcagtagctgacatctactgaactcttaatgttccgggcaccatagtaagcatttaacatgaattttcacacataatctgtatgacaacccacggaatagccctattttattttacagctttggaaactggggttagagaagcaagtagccccaaatcacacaggggcatagggctgagcgtggattcacgtcagctgggctaaagccagagccggtgctttggctttatccaattgtgttaggactctgtgctactgatcaatgagctatcgatgaatatcagaaaatcgattgattaaggacacctgacagtgaggtcttaggagtcacttttcctcttggtacagatgaatacctacaacagagagaaggacaaagctgtcctgcagtgccgggctcacctgcgccaccgcctgcagcctttgcttcctgactcagcctaactcccaatgtcagaataaatgcaggagagggcagtttggtgataaaaggagaggaactatacttggaaatgatatttttctgcatatttagaaccaaaaaccccactggttcattgatctctgtgagtaaagggttaataaagctccctttctggaattgaatctgacctctgctcacctccagctctgtcccttgggaaatctgagagggagggccaccagctctattcccaggtgtgggcagcagaattccagcctcggcaaacgccgtcccagaagtgaggtcgcccgtgaaaatgctgcgttgcttggcaagagggacctgcgccaatgtcattaagattcctaatcagctgaccttaaagtagatgagcctggatcctctgggcgatgtgagtccctgacagcaggagagggggcaggaggggaaggcggggactcgaagcatgagggagactggctgctgctgctgctggcatagaaggagctggcttctgccaagaacctgagggagcccagtcgctgctgcctccccagcaccctcaggcaagacctcaggctgggcatcgccttgcctttggcctggtgaggctccaagcagagaacccagtcatcaccctcagaaacttgtttcagtcctttcggtttgtaacaatccaagcaccgcccccagagttacatgataactttcattgtctccttcactgtggaggccatgaggagcccctgcctgaaaaatcctcaagtccccatgctgagttgaaccgtacagtccgcagtagggcaggacctgcccgcctgttcgtcacccctggcggtggctgtgcggtgagtctcccgtaagcagcacataactcagcttcaaaaacccaatctcataattgtgcctttgatcagaagttgtatctatttagatttattgtgatttctgatatatttggattgtttatacctctctatattgtgttttctaatttatccttttgttgtttttttctcctttcttaccccttcttttggttgattcattctttctgcttatcccactttcactccttcacactactttgagaattatattctctattcctgttgttttggtggggaatctcaaaactttaatctactgtttatcttagagtctaaagtggcaggagcaatgctgcacgcctgtaatcctagcaccttgggcggctgaggtgaggggatcacttgaagccaggatttcgagaccagcctgggcaacatagtgagaccctgtctctacaaaatatggaggggggaaaaaaacctagctgagtgtggtggcatgtacccgtagtcctagctactcaggaggctgaggtgggaggattgcttgggcccaagaattccaggctatggtgagctacgatcatgccactgcactgcagcctgggcaacagagcgagaccccatctcttaaaaaaaaaaaaaaaagcctaaggctattcagtgtcttcagtctcttttcattcttctcaaacatccagagtttctgaaactcacgtagtttgctcataaactactcaaggtagtttgctgtaccttgtttttctcaccccagcaagcagggctattgctgttactggtgttaggattattaacacagtgagtttaactttattcatgtttatggttcccttgcttcagtatctctttttgtgtcttcaactttccttctgggattatttttcatcttcaaaggtcctttactgagatgtgtttatggtaaaccgtgttggtttttctttgtctggaagtaatctgtattttcctcttaattttgaaagatagttttgcagataacagaagtctagattgagagtattttccccaagtgctttgagatattactggcgcctcccggcacccagtgtggtaaggaagctggctctcagccttgttgctgctcttttatgggtcatctgccttttctctcctgggactcagcatcctctgtctttgttttctgcaggttcaccatcactctccaaatgtgggtttcttttgatttagcctgttgggattcactgggccttctgaatgtgaggatttatgtctggaaaatcctcacctgacatctccttgaatgtgacctctcctgcatgctttattgtctctttctagaatattctttacataaagatgaagcctgtacattctctcttctgtgtcctttcatatttctttgattttctatctctttagctttcttggctgcattctgtgtaacattatcagatttatcattcggttcatgaattatctttcaagtgtgtcaaatttgctattcatgtttctaatttcaatgatattttaatttctaattgtatttcatttttgataacatcttgttcctttgtcacacttcagtaccctctcttatttctgtaaatatgttagccgtcattactgtatactctgccttggattattccactatttgcattgtgatgagtctgattgtacatttggttgtttctgctgacttacccatggtggccggcttcctggtgcgtgtggtgcctctgtgttgtgaaatcacatttgcatgcatgggactctcaggcatccgagggtggatccctgcagaggctttgtgcctgcctttgccaggacccgagcagcccacttggaagtacattttgtgggtgtggatgctttaaaccttgaacccacttgaggatggcagtggtagaaattctcgagactttttctcttatttgctcctcttttcagagccgaggctcacgcagcaagcgtccctgccacttccccgtgactggcgggtttccctggctcactcttgagggcccttcttttgggctcctggcttcctgcagggcttctgctctgggttcctgcctcacacaggccccaggcttcatctctgtgcttgcctggggctcattaatgttcaggatcctggacagcagggatcaacaggacctgtacagacggtgctgtgcccaggtggactcacgcttctccatggcctcaggccttttgggattcaagttaccttctccccaaaaagattttcaaatgtgatgttattgggcattttcgggttttagaggctgtctgttgggaggcctcctcccccatctcttctgctgtattctggaaggggtgttcctggcccacctcctcaggattagagaactgcattgccgccgacatttgaaggactcgacacagtggcccagccttcctgttcatcttctctgtctgctttccagcttctgctaggcctgtgcaccgtggtgtgtctcctgcccgctccctgcatgcagaacgtcacttgttctacagctttccctgatgtggtctcactgtccctgtccctgtggccacttatgtgcctgtttattcatcctccatgttccctgaggagacgggcctgggagggcagaggcaggccccactcacactcagaccccaagcctgggcctactgctggccacgtggtggctcaggagaccgtggcatctgcctcctggcgcaggtggcatgtgcccgttctcctgaggggcattctctgcagaccagctcacatgctgtagcattgcggcctttctcaggagtcagcaagcatgtgtgttcgtgcaagcctttctagaaagtgacgggtggggacgtgttggcagtggggggaggggaggggccgatagccttgcagcctcttgcgggcccagggctgtccgctctccgtaccactcacatggccaccctgagggcagtgaacccggggccgtgaagctgctctggtgtgtcctgaaaaggcctttccataggagcgagaggtggccgtaatggctgatgggtctggaacgcatggtcccgcagagaggcacggctccacggcgcccccaaaatgtgagcccctccattcactcctgtcattcccgcttgtcggggccgggtcactgaactcccaggcccgcttgggctgccccccgctccctgaagactccgtggcagagggctggagtgcagggaggagatggccccagcagtggggggtctggaaacatctcccttcatcatctttggggtcccctctggacccgccatggcctccctcacactcctccgtgcaggtccaggctctgcctcacacgtgccttgcttgccacactgggggctgggaggctgggtgggctgggggtctgccctccgccttgaggagcaggacatcgaatccaccctaaactgactcagccctgccctggcctcttcttgaggtggaagcggtgtgtgcaatgggaggggtgtcggggcagaactgtgtcccccaaaattcatatgttgaagctctaacccctagaacctcagaatgtgacttaggtcttaaaaggaaataggggcttaaaaatggggattgagttaaaacggaggccttaagtcattaaattgtacaccttcaatacgtaaccttgcagtgccccagataccttaatagataaatgtttaaggcaaaggacatcagcagggtggctgggacccagtctgcctggtgtccctgtaagaggagggggtgaggatatagacacacgcagagggatggcaccgtgaggacacagggaggagacagcgtctgtgagtccaggaccatctcaggaagcagccctgcccctccttgacctcggagccagcctccaggagaatccctccgtgttggtgctgaagcccccaggctgtggtgttttctcacagccgccctgagtgactcacagcagtttgtccctgatgactctgtgctctcctggggctatgtcttggttctgtggctgagcacccctgttccctgcccttccaggctcctgctctgacagctgggtgcctgtgctgatctcctggctggggccggagactcgcagataggaagtgggtattcctgccaggagcagggcgtgcacttctgaaaacaggagggtgatcggtgcaggggaagcctggcttcatgtgctgctggaagtggatctggggatgagtgactcggcttgaatccctcaggaggtgtcgggcgccaaggtcccgagcagttcctgcttctcgtttttataacctgaggtgtcccaattagctgctgcttcagaacaaatcaccctcaaacttaatggcataaacaaccactcatttaattgtcttccacagtcctctgggtcaaggttccaggcgggctgggctcagggctctacttgcaaaatgcactttatgggcccagcttctccctgccgtggtgggggcccaagaagcatccccagtctggtggagtccccggtctggatgaccccccggtctggtggagccccccggtctggtggagccccccggtctggatgagcctctggtctggtggagcccccagtctggatgagcctctggtctggtggagcccccggtctggtgcagcccccggtctggatgagcccccggtctggtggagccccccggtctggtggagcccccggtctggtggagccccccggtctggtggagccccccggtctggtggagcccccggtctggatgagcctctggtctggtggagcccccggtctggtggcgtccccggtctggtggcgtccccggtctggtagagaacgttgaggtgagtgctcgaggggttgctcgctgctgctgggccccacggtgcccacctggcccccaggaccccaaccccacacagccctttgttagcctccccaccccatgcaccttcctccctccccagaacatctggtgaagatttgttgtaacctcctgggcccacagtccttggggctgctgcggtccgagtgtcggtgtcccccagaattcacgtgttgaaatcttacaccccagtgagctggtgttaggcctttaggtgagtgatgaggcacgaggctggagccccttgaatgcgattcccaggggtcagcacagcctcgtgcctgagaaagcagacgcagccggggagttgagacacggcgccaacacgatgtgagcaggaggccacgcatagagacgaagtttagtttcattaaatgtctttctctttggccgcgttgcgggaaaaatttctgctgctcacgagtagaaacacaaagcagacagaagaagccacttgctgagggaacccagggaagggtgaacagaggcaggcaggtcggagggccagggaggagcctggcggcccggagctaggggacaggcagggccaccttgtgaaagcagagggagcctgggggcttgggtgggtcgaccctttcttgtgctgcctgtgttcttccctgagtgcaggagagagagggagacacagagagagggagaaagaaagggagagatgggggagaaacacagagacagggagacacagagggagagacatagagggagagacagagaaacatggggagagatagagggacagagaaggagtgatggggagagagggagagacagagagactcaaagagacagtgactgaggggagaggcacagagacaaacagagcagaagggggaaacagagacagaaagagacacggaagagggtcctgggcggggccaggagctctggttttgggggcaataggactcagtacccgaggggatgtgctcggcgtttgggtggatggggggcgggtgagaatgggggaggctgtttcctcagtttggaggctccattgactgtaggagacacagtagcagagagagtgaaatgaaaactaaatcgatctcggaaggagacagggcggaagacgtggcttttgtcccgaagtttccaaaattccatgcactgcacaagtgtatttggggcagggtgtgaacgggcttccaggatcccccacctgatggagccgaaggtgcggcgtcacctgcttcaggagagcagctgcaaccacagctggccagggccccgcctcccagcccagctctcctgcctgcctgggtggtaactccacccacaggtggcagccgtggccacgtgtctctgggccacgtgattgtgtggggtcaggcgtgactcctgctgggctcttccacctgccaggcttgggggtgggagtgggaggacgtggctgttgctgtgggggcatccctcttgtcaccgtggcagaggagcctggaggagatcccagcagtgcccccccacacacacccggagcggatcccagcagtgccccccacacacacccagagcggatcccagcagtgccccccacacacacccggagcggatcccagcagtgccccccacacacacccggagccgatcccagcagtgccgcctgtgtccctggatccagccgtgcctgaggccacctcacccactgccttttgagtggtggaagttgtgctcttgaacttcaaagccaacttgggtcaggcttttgttctcttgcggctgaaaacgtgctggggtggttgtgggtgggtggcaggtgcctcaggaggtggcacagcttcgtgggcagggcccagaggtgctgacccgggaggcctcctggtgccacggggagagccatgttgaggggtctggcacggatggtgggaagcaccaagtaagtggccctgactccaagagaacgggggagtccagggctgcaggacggaagggcccagtgctgcctgtggcggccggggcagttctggcgcctcacgggaggggcagccgtggaagccccatgagcttcctaggtaccaggccctctctcggcaggacgaatctcacgtggtccttgctgcctggatggaggggagtgactaaagatggcagggacagaggcgtggcaggtcctgtctgcagggtgccgccccgaggtggagcagggggcctggcagtcccaccaggctcagagcctcccctcaccccgcgcttggctggggacatcagagcctgtggtgagggcacctgtaattcttgatgggggctctgctgggtcgggggctgcttaggcctggatgccctgattgtgcccatccccctctccctccacactgtcccctgctcccgaggggctccctgcagccctgactctggctggcaggggaggagtctgtggttggtggcgcacagcaggtgcgcagctgctgaccagagctgcccccgggctggggaactgaaggaagggctgtggagcctgaagcctgggcctggcctgtgctgcggccgcaccgctgggtgatgcaggagccactccacctccctggcaccccagcctcatccggcaacctgggagcgtgggcctcctgcccctccagggaggccctggccgtgtcctcatggggcccctccaggtccttgtggctccaggtcgggacagtggctgtgagatctgaccctcccgttccccctccaccaagtaggagaaaccccggagcatgagccctcgtccttcaccgtcccggggacagggggacccccagatgctgcacggctgacaggccaacgtggcagaagctccagcttcacaggaagccagtgaccatgagagtctgtagctgtaacgaagccacagagctgtggctttctttccccttcagctctaggaaaggttatctgccctgcacagatctccggaggcctggctgggctctgagagcatcagactgattatcgtaagaaaataatctctgcagacacattccttgctagaagcaggggacaaagcccagcttcaaagacaattccacacacgccctccctgccctgcacagctgcctgccgggtgggagcagagcccttgcagccgggctcaggggcctgggcagggacagcgtgtggcaggggcacagctgagacaggagcctcaaagcgacaccaacccgacgtgaagctacagttgaggagacacagctgcccccattcccgggcctcatctccacagtgagacgctggactctctccctgacccaccgtctcttagaacctcccctccatccggagcagttcggcagccccagggcagccaggggaaccctgccgagtgcctctgggccgccacagaccgcagagcccgcgggagccttgctcacacagcctcaggtccactgtggtcttgggggaaagccctgtcctgggacaggggagccgggggtcctggccctggaccaccatctggggaccacgttgtcacgcctgcaaagctccctgccccacccccatgtgccggctggtgttgacacctttgtagagtgggaacctgcctccgaccccagcctgcagccacagggcaggttatagaccaggtgagagggcgccgcgcccagaaccaaggagcacaagtccgcagtgcccatgagatcctcatgctggccggcgcaggagccatcctcggcctctgcaggtcctcgtgggaaaccgcgggggcacgtggggcggctgcagggtccgcaaagccggctgtttgcgaagggcgcagctccacctggaacagccgaggccgcccacgcgcttcccgcgggatcagagcagcctccacggctgttgtctcaggcaccacgggatgcctttcttcgtttcaatagctgtgggaaagcctcaatcggtcctgaaagaacccagatgtgcagcaatgacaaggccttctctgagactctagaaccttctgccatctcagacaggagggagccgtgaggcaggcgggagatttgcagtcagcaaaggacgggcaggtggggcagctgcacacccagggccctctccacggtcttcccgggcccacccctcccgcggtcctgggtcatccacctgctggcctcactctgcccacgcggccaggtcccaccggcccctgagctcaacagaccaaagctggcccgaccccacccccaagaagaatgaaacaatttttttttacctcttgcagaaaagtaaaagatcatttattcattctgtttctagatagcaaaactaagtgtcaaaagcaccttctgcacacagtctgcacacactggccggtggtcctgttcccgcaaggttgagctgtgttccagagacatgggtcctccgggtgatgaggagccgctggagggccctgagctgcacgtgctaatgattaacgccccgtccgtgctggccggtttctcaaatgcctcctgacgattgcgcacagccggacatcatttgtactgagagacaaaaggaaatcactgaggctttctgaggtgagctgggcggccgcggggggactggactcacacctgctaacggccagtccacaggacctgcccagaggctcggacacacagctgaagtcacatcccacggggagcatcctcaccaactgacaatcagcacgggtttgtaattaagggtttctgcccagccaatgaacggcctccagaaacaacctttgtggaaccccctataaaagccttcccagcgcttgccttcaggacactgctcagggctgactcagtgtacccaagctgcagtctttgtttcccaaataagcagtcattcattctacctccgtgtcaatcttttcttcgtgaacacagctggtgtcaggagcagggcttagcaagatctctcctttgagcggctttctctggaatcgggtgaagtccccacaacacagaggcccctgtgcgcgccccttctttggggccagcacctcccttcaactgaggctgatacctttatttgggaatctgggggcagttgctgcctctgtgccggcaaaggctttcagcttggaggacgttttccctgcttactggagattttcccaatggtgagtattattatcttaagtatgggactctgtgcgtctaaacctcgtaacagttgtgccccctctggactccagccccgtttatctggagcaatggacctttttacattggccaaactggggttcctttgctacaccaacctaggttttctctgaactaaattagaagaacttggttccaaaacaagggtcttagcatgtgggaagccacagagccctaggaagggggcgtgctcatggaaagatactgagcgcgaggagcgttgggtgcagctcctccagaagcgagagaacggcccgtggctatgtattaaaatatacacgtccagatggggtgcttgttttaattggcatttggaggcatctggctggatgccatcagaactctaacattgcctctctccaaaacacagcgcctgaactcacagaggctgataaagcactgaaaggtggagtcctgggcccagggctcctcctgcccctcgttcgggttgttcgtgagtttggtgtgctttggaaacagactttttaacctccagagggaaccaaattaaaaatgacacttttgtcaatagtttattaaattcaatttggcttccctctggccataatcaaaatttctgggtattcaaaattggagtcagatgaggctaaagaaaaacttggttgattccacagcaaaagccgctgccttgagtttcactgagaccaaaaaccttacagctaagataattttcccaaaaaggatgtaaatgatgttattaaagacactctgtccccagcaccccatgagccagtgttaccagaatctatgaacacgtcagacgactcattgggcaactaatgaacttacacgtttacaaaacagtattggtggggaaatatttcaagggcggccgaagaggcacaactgccttgtgctgtttgtccaaaattcaacccagcaaagacaattcggagagtcccaggtcattctgacctgccaagtggaccctctgaggtttggcaaatggacttcatccagccactgcctctcaagactgtaagtatgtcgtgatgatttgcatgttcttctcctgggtagaagcattcccttcctgatgtgccgctgcctcagatgctgcaaactctacaagaacagattctccctaagtgacaagggcatatcttcacaggtagtgacaaggagctccactggccaggtcataaaacaaatctgtgaagtctggtccacatgacagcactgtcattgtgcctaccatccccaatcttgcagactggtggaaagcacagatggcatcaactggcagaatttcaggaagcactaaaattgccccggccaaaggcacttcctctggtccttctgaatctaaggtctgcaccttttggaaactgcaagttgtcaccttttgaaatgatcactggagggccaatgcatagagtcccttctgcttttaatagtccactgatgaaaggagacatgctccagtattgtaaaggaataatgaaggctgtccacgcaagtcataccctggtcagacaatctttacacagtgtgttcccagttgataaaggcaccagacatcacaaccttcagcctgatcattttctctattggaaaagacatttacaaaaagatttccttcaacctcagtgaagagtccacatcaggtactccttacccatccctgtgctgccaaactaaaaggtgttgacccttggattgaggtttctcatttaaagaaacctctacccctgctggaattcggacaatcacctgaaatgaaaactgacccaaaagtgaagcagatgacagttgagcttgactgaggtcacgtccccaacgagggacatgactccctgggacaagtccctcccagcaacaagggacatcatcacattcaccaactgatctgtgacactttctggaggaagaacttggtcaaaagggggaaatgtgaaagaaaatgaagtcactaatgctgaggctaagtggaactgggcggctgcgggaggcctgcattcacacggctgacggccagtccacaggacgcgcccgtagacttggaccaacagctgaagtcagcccctgacggccttcacatctcccagctgggagtgcccttaagaactaacccatcagaatgggtttcatttaggatttctgcccagccaatgaactacctccaaaacccctttgtggaaatcccctaaacaaatctctccaggccgggcgaggtggctcacacctatattcccagcactttgggaggctgaggtgggaggatcacctgaggtcagaagttcgagaccagcctggccaacatggtgaaacctcatctctactaaaaatacaaaaattagtcaggggtggtggtgcacacctgtagtcccagctactcaggaggctgaggcaggagaatcgcttgaacccaggagatggaggttgcagtgagctgagatcacgccactgcactccagcctgggcaacagagtgagactccgtctcaaagagaaaaaccaaaactctcgtgtttgctttctaggacactactcagggccaccgtgactcagcttacccaaattacaatcctttgtttcccaaataaatgcttaatactattaaaagtgaacaatgaaaaagcagattcaaaacctattcaaatggttctaactcaatgtgttagtacagtcacagctgcttactgaaaacacacacttggtctacttcaggaagacgtgtggagaaagggtgaagggtgagccactgggcccagctcaccacacgacggccccctgtgcttgtgtgcgccccaactcacagtgacaacactccggccatgcctctgcgtgttggcttggtgtcatctgcattgcactggagtgaaacagggtcaggctgccaccattcacacaaactttaaaaatgaaacctttatcaagggaacatctttggactgtttttaaaacctttggaaccatgacttggagctggcagaacaggctgtggctgtggacttcagcactaccaacagtgctgaaaacactatgatttacatccattccaagttgcaagtccatcttttcttcctgcaacaaaagaccattagcttaaaaaagggagcgggttccatcatccttgcagcagctaagacaaccccttggggtccacctgggctcccagccccaccttcctgatgttcagacccagcaactccttccagggataccgcaggcactcaggtcctcttgttaaattaaatttggcctaaagctgcctccattctttgcatttctgcctagtgaattgcaacctaacgaagcatgtaaacaaactcaacctaataagtctattttgtaacaagtagctgagtctgtcataagctgccagtgggtcagaccacacccacaggtggcagacgcccagccgtagccaatcaggctgtttccgtgtctcacttccgtgttctgtctgtaagtgctgcctgcccgtgctgctgagtggagctcgctgaacctctcccggttctgagtgcaattcatgaactgttctttgttcaaataaactctaaagtttttctttttttgagacagaggagtctcactctgttgcccagacgagtgcagtggcacaatctcagctcatggcaacctccgcctcccggattcaagtgattctcctgccccagcctcccaagtagctgggattacacacatgcaccaccacgcccactaggctaattttttttttatttattttttctttttagtagagacgggatttcacgttggctgggctggtctcgaactcctgacctaaagcaatccaaccgccttgacctcccaaagtgctgggattacaggtgtgagccaccacgtccagcataaagtttttcaacactcttgaccattgcgtctcacccggaccacgcaacagcctcctcaccagcctccggcttccaggctattccctgcacagtggccacatcacaccctacgctgctcagaccctgcagcggccctcctacgcacagatcctcctgatgcatcagtggcccagctgctccatctgggacaccagcttctctccgccttggccgtatgagccctgggggcctctgtattcattgttcccggccattgcgagttatagcccccccagccttcctgagcccctcccaacctcccaccacctccaggctttctccacgcgagttctgcagcatttaccagcacctaccacacaatcttctcactggctggtcttttcccaccacaattaaactcccaaaggccatactgccatctcctatgtgcctaaaaacctggcagttttacacctgagggattctttccccaaagaggcctcccagcagtctaatgaacagaggagggctggctgctgttgatgacgaggacttacagggccccttgagcacacccaggccacactgggggcccaggggctctggcagaagtggtgtcctgatgtagatgccacagcactcgcaggccagcaggagcggcccctaccctgttcctccatgcctggtcaccatccgctttctgggagatccgaaaaggttcttccaccttccgctgtgtggcaggaaatgagtctaatgagtctacactccacagctaccaacttccataaagcagtttatttttcttaaaaaggaaggtacatggtcacagtccaaaatgttttatacagctctcagcctggaaaatgcaactgatgaaaaaggcactgtttctagaacaaatggaaaaagaataaatatgtcatcatttaccctgcacagctttgagtaacaccataggaccctgtcacacgttcagggtcaattttaaaagcttgagaagacacagcaaggtgatgtcctagactagccaggctccgaaaggaagagctgtctgtccctcctaactgtcctctctctgtcacaggtgtccatgtcactgttcctctagcagatgtggaaagtggctgctcagtgaggactcagcccccaccaacctgactgagggtcacacgacaccatggtggaaagtcacaaagggtaacgggccaagagggtgaggggggctccctgaccctgaggacccctgaggcactgctgcaccttccacggattctgtgtctagcgttgccctctttgcagatgcccctcgtggtggtggcacaaagacctaaaaatgatttctgtaaaatgggtacaaggagctccctgataaagcagctcatcctagacagccttttggagttagcgtaactgtccttcctcatttctagttctcaatagcgaatggcagacctggaggccccatgtgcacctgccagccggggcgagggcagggacggccagccgggcgagggcggggcagtcggggtgagggtggggcggggcagtcggggcgagggaggggtggccagtgggggcgagggtgggtggccagccgggcctggtgtgaggagcagagctgcaagtttcctacagacaatccactgagtgccccagagacgtcactgaaaaacttcccagtgctctgacgtgccagcagtagggcctgaactgtcatccctccacggggctccctgaggcctcaggccctttcctttgcagcaccaggtctgccttgcacgcatcccaggaggaaacacacaggcagcctcctgctgcgcggagggcaacggagagattcatgaggcccctggtcgctctgcagacatttaaaatgacgcttctccttgcaccagctcccagggaaatgtcagcccgggtccacctgacggagggcagctcacccgcctgcatctatcctcaatgcacttaaaatatgaagacatgaaaggtggctggaaaggccagagcgggagcctgacaaacactcctgcttctgggtcaccacgcgggcactgctggcaaccgagctgtgggttcacagacgctgcctgaaaacaaccgccacccccgagagcagcggagcctcttcatcagccatggcggctggcaacgccgaggacggagcccagctctagaggcgtggggcctcttctgggcctgggaccctgcgagggacggtcctgtccgcccagctcccggctggcagtagacggtgactccacggcgacagaacctgcatccacccgcgcctgtcgggtccggggagcggccctggaggatcctcctcagtaggtgatcttccagtgggtgggttgctcacacgccttctcttggtctccgcagaacctgttgtacgtcgtcttggggtccaaccccaggatttctctttcctcatgaatccgaaaagaaaatgttgagactgaggtgccaataaaaaacctgcaaaggatcacagaggttccagagtcagggagaactggcgtcacagaggttccagagtcagggagaactgagaggagcagctgagtgaaatgagttccacagttacatggaaccaacacggccgtcccccgagcacccaccagccggccgcccccttgctggcacccctcgctcaggtgccctcgacatcggcgccctgaggggctctgcctggtgctgcagccccatccacaccccacagtcagcagccgccacgctcctgtcccaccgcatgtccccctgggagccctcctctccgtcaccaaatcccaggccaggcacgccagtgcaggtcgaatacctcctgggggtcacatggtgaacaatgagagattcctactaaccacacactgtctagccagggcatggcgggtccttatcctgaggcacagtagacatcacggaggtcaaggccccctccacacacacgctgtatgggctggtggggacacccttctccaggggtttctccagacctcaggtcagcggcctgcccgttcctccggctcctgcgcagctggtctctggctctccagcggcacttcatgaacttcgtgaacaagcaaaccccagagatgtttccagagcaaatgtaacatgcacagcgctgtacacagagccacagggccagcaggccacacaggcctgtatgctgctgcggggtgcagcactggtggggagaccctcaccaccccacacacaggggcctgccagagcaggccgcgccggcccggaggcagggcagcttcagtgagctgggccgagcgcttcgcgcagctgagggcaggaggctgagagctcagtgcgaagcctccccacagcaggcttcctgggctgcggagacagcaccgccaaggtcgcagtcaaaatcccaaggccacacctgagaagcaggggtgagttcgtaactgggctcctgcacacctccgccctgacctaagaagtcagcgctgcatcctgtctgcttaacagggaaagggacccacacccagcagacagcatcacccggagcctctgtgggtcttacacaccatgcccagaacaccacaggaaatagcagatgtgtgaagaggcaccggctcagggcgctcagcattcctcgggcaggagagagacagactaacccacagagacgcacgcgtgtgcacagtgctaaccacggggaagatcattccctctactttcattttccatttaactcaaaccgtttcaccctaaccccagccttcatctcctatgcagatgggcaggcaggtctttggaggaacagaggcccaggcgtacctcccacagcaaccccagaggaatgactgcacgcagggcccacgctcccggcctctgggacgctcacggcagccccacgagaatgatcacacgagggcccacgctcccggcctcggggacgctcacggcagccccacaagaacgatcacacgagggcccatgctcccagccttggggacgctcatggcagccccacgagaatgatcacacgagggcccacgctcccggcctcggggacgctcacggatgctcaacaacacagcaacaaggacatgcccaagtccagggcacgggcaactctcagggcagggggcagacaggggcagaaaccgggaatgatgggaaaatgcgacacaagaagaggttctgagacgaggccagctatgccaacagcctgctatggaggaattctgtgcatgagaactaaaggggcaagatgaacaattaacttcagcccagggaaacactgaaccagatgctacaggagactcagacgaggaggcaaacagtatggaaatgaccactgtgaacacaggcgaccatctgctctgacaccgagtacttgggacagaagaacctttgaaagccacccgacccgctctcggccgacagtgacgtgggcaggcacctggcgtgtgcgcagatccactggtcaataatcgcaacgcctccgtccttgtagagctccagctcctcccacgtgggttcaaacctcaccatctcgggtaacagcttttttagctcttcatattctgcaaagtagaaggagagaccctttgaaccgggatcctccagtaaggacagatacgtgactctttagcagacagacatgcgtacttggcttctggttaattcgttaggaactggctccaaaggtgcagacacacaactcagctttaccctcccaggaattacagttgaagatcatgcagatcttcatggatctgggtagttccaggtctacccagaacagaaccagggatcaagaagaaaggaaagaaacgtgctccctctccctctccttctccctctccctctccccacggtctccctctctttccacggtctccctctcatgcggagccaaagctggactgtgctgctgccatctcggctcactgcaacctccctgcctggttctcctgcctcagcctgccgagtgcctgcgattgcaggcacgcgccaccacgcctgactggttttggtggagacggggtttcgctgtgttggccgggccggtctccagcccctaaccgcgagtgatccgccagcctcggcctcccgaggtgctgggattgcagacggagtctcgttcactcagtgctcgatggtgcccaggctggagtgcagtggcgtgatctcggctcgctacaacctacacctcccagccgcctgccttggcctcccaaagtgccaagattgcagcctctgcccggccgccaccccatctgggaagtgaggagtgtctctgcctggccgcccatcgtctgggatgtgaggagcccctctgcctggctgcccagtctggaaagtgaggagcatctccgcccggccgccatcccatctaggaagtgaggagcacctctttccggccgccatcacatctaggaagtgaggagcgtctctgcccagccgcccatcgtctgagatgtggggagcgcctctgccccgccgccccatctgggatgtgaggagcgcctctgcctggccacgaccccgtctgggaggtgaggagcgtctctgcccggccgccccgtctgagaagtgaggagcctctccgcccggcagccaccccatctgggaagtgaggagcgtctccgcccggcagccaccccgtccgggagggaggtgggggggtcagccctccgcccggccagccgccccgtccgggagggaggtgggggggtcagcaccccgggcggccagccgccccgtccgggagggaggtgggggggtcagccccccgcctggccagccgccccgtccgggaggtgaggggcgcctctgcccggccgcccctactgggaagcaaagagcccctctgcccggccagccgccccgtctgggagggaggtgggggggtcagccccccgcctggccagccgccccgtccgggaggtgaggggcgcctctgcccggccgcccctactgggaagtgaagagcccctctgcccggccagccgccccgtctgggagggaggtgggggggtcagccccccgcccggccagccgccccgtccgggaggtgaggggcgcctctgcccggccgcccctactgggaagtgaagagcccctctgcccggccaccaccccgtctgggaggggtacccaacagctcattgagaacaggccaggatgacaatggcggctttgtggaatagaaaggcgggaaaggtggggaaaagattgagaaatcggatggttgccgtgtctgtgtagaaagaagtagacatgggagacttttcattttgttctgcactaagaaaaattcttctgccttgggatcctgttgatctgtgaccttacccccaaccctgtgctctctgaaacatgtgctgtgtccactcagggttaaatggattaagggcggtacaagatgtgctttgttaaacagacgcttgaaggcagcatgctcgttaagagtcatcaccaatccctaatctcaagtaatcagggacacaaacactgcggaaggccgcagggtcctctgcctaggaaaaccagagacctttgttcacttgtttatctgctgaccttccctccactattgttccatgaccctgccaaaatccccgtctgtgagaaacacccaagaattatcaataaaaaaaataaattaaaagaaaggaaagaaacgaaagcattgaagctccataccctttctgacggcatctgtggccacaaacaccttgtccagccggtgggtcttcatgaggctgcggatcttcctcacggccccttccagactgggtacatcctgtctgtgaccccagatgaaatcttttcttctcaggtggactcccaggtaggggccccctagcgcggagcccagcttgacctagcaaagaaccacaaggaaatgcagaagctgacaggcgggctcggggctcatcctgggcaccgggtgggactcgagacgcagagggatgaccctttccatgtggcctcctccacggggtggctccagggctgtctaagggattcaggtggaatctcgggggcgaccagatgtctttctaagaagacagtgaagcagtattaattaccagaaatcattttatctgaggtaaagaaaaatatttaaaaagagaacagcatgtggaggctcacgctgtgaacttttcctccgagaaccaccgcagggacgtgccacaaagagttcacggatcctgtggacaaagcagctcacagctgcaaactccccgggagccagaatgctctgctgccctcttgacagtgccacctcctggctggaggccaccaacgcaaatggctacagcaaattctaaccaacaaccctgctccaaggaaggagaaagcaacagctaatcccaccacctgcaacctcctggctgtccacaggtcccgagtctgtccacgtgacaacttcactgcagcataaccagcattcgagaaagccagtgcactcaacaaaactacaaccaaggacccccccagagtccacttcactcccccgccacctccagcagagcaggtgctggaacccatggctgggagacccgaagacggatcacagcacaggactctccgcagacattccccagcagcatcccagggcctggtagccccactgggtggctagacccagaagagcaataacaatcactgcagcccagctctcagggagccccatccctaggggaaggcgaagagcgccacagagcaccccgtgggataaaagaatctgaacagtagcccgtgagttccagatctttccactgaagtagtctgcccaaatgagaagcaggcagaaaagcaattgtgataatatgacaaaacaaggttctatagtacccccaaaagatcatagtagctccccagcaatggatccaaaccaggaagaaatctctcaattgccagataaagaattccgaaggttcattattaagctactcaaggacataccagacaaaggtgaaaaccaacttaaagaaattaaaaaaaaaacaacaacaacaatatggatgaaaaatgctccagataactaggtatcttaaaggaaaaacaattgcaacttctggaaatgaaagacacacttaaagaaacgaaatacactggaaagtttcaataatagactagaacaggagaagaaagagcttcagagctcgaagacaaggttttcaaattagcccaatccaacaaacaagaaaaaagaatagtaaaaaaaatgaacaaagcctccaagaaatttggaattatgttaaacaaccaaacctaaggataattggtgttcctgaggaagaagagtaatctaaaagtttggaaaacttatttgagggaataattgaggaaaacttacctggtcttgctagagatctagacatccaaatacaggaagctcaaagaatacctgggcaattcatcacaaaaagatcatctcctaggcacacagtcatcaggttatctaaagtcaagatgaaggaaagaatcttaagagctgtgagccaaaagcaccaggtaacctataaaggaaaacctatcagattcacagcagatttctcagcagaaacctacaagctacaagggactggggtcctatcttcagcctccacaaacaaagtaattatcagccaagaattttatatccagcaaaactaagcttcataaatgaaggagagatcatctttttcagacaaacaaatgctgagagaattcaccactcccaaagccagctctacaagaaatgttaaagaagttctaaatcttgaaacaaaacctcaaaatacgccaaaatagaaccttcttaaagcataaatctcacagggcatataaaacaacgcaatgaaaaagaaagaaaacagagtattcaggcagcaactagtatgatgaatagaatacagtacctcacacctcaataccaaagttgaatgtaaatggcttagagactccacttaagagaaacagaatggcagaatggaaaaaaatccacctgaaagctgtgaggcaaaagtcttcaagagactgacctaacacataaggactcacacaaacttaaggtaaaggggtggaaaaagatactccatgcaaatggacaccaaaagcgagtacagtagtattcttatatcagacaaaacagactttaaagcaacaacagttaaaaaagatggaggaacattatataatgataaaaggatcagtccaacgggagaatgccacaatcctaattatacatgcacctaacactggagctaccaaatttataaaacaattactactagacctaaaaaatgagatagacagcaatacaacataagtggggacttcaatactccactgacagcactggacaggtcatcaagacagaaagccaacaaagaaacaatagactcaaactataccctggaacaagtggactaaaatatttacagaacattctacgcaacagctgcagaatatacattctgttcgtaagcatatggaacgttatccaagataaaccatatgattggccacaaaacaagcctcaataaatttaagaaaatcaaaattatgtcaagtaccctctcagaccacagtggagtaaaactggaaattaaatccaaaaggaaccctcaaaactatacaaacacatggaaattaaataatctgctcctgatctttgggtcaacaatgaaattaagatggaaatttaaaaattctttgaactgaacaataacactgacataacttatcaaaacccctgggacacagcaaaagtggtgccaagaggaaaattcacagcattaaatgcttacatcaaaaaatctgaaagagcacagacaatctaaggtcatacctcaaggaatgagagaaacaaggacaaacccaaacccagcagaagaaaaccaccaagatgagagcagaactaaatgaaattgaaatgaacagacaaaaaaatacaaaagttaaatgaaacaataagctggttctctgaaaagataaacaacattgatagaccattagtgagattaatgaagaagagagaagatccaaataaggtcaattagaaacaaaacgggagatattacagtcgataccatagaaacacaaaataatcatccaaggctactatgaacacttttatgcgcacaaactggaaaatcaagaggataaattcctggaaatacacaacccttctagatatagaccaggaagaaatataaactctgaacagaccaataacaagtagtgagattgagacagtaatttaaaaattgccaacaaaaaaagtccaggacccaatgaattcacagctgaaatcagacactgaaagaagaagtggtatcaattctactgaaactattccaaaagacagagaaagagggaatcctccataaatcaacagaccaatatccctgatgaacatagatgcaaaaatccttaacaaaatactagctaaccgaatccaacaacatatcaaaaagataacacaacatgatcaaatgggtatcataccagggatgcagggatggtttaacatatccaagtcaacaaatgtgacacaccacctaaacagcactaaaaacaaaaatcatatgatcatttcaatagatgcagaagaggcatttgacaaaatccggcattgctttaagattaaaaccctcagcaaaggtggcatagaagggacatacctcaagataataaaagtcatctatgacaaatccaaagccaacattatactgacgggggaaaagttgaaagcattcaccctgagaactggagcaagacaaggatgcccactctcaccacttctattcaacatagtactagaagtcctagtcagggcaatcagacaagagaaagaaataaacggcatccaaatcagtaaagaggaagtcaaactgtcactgttcactgatgatataattgtatacctaggaaaccctaaagactcatccaaaaagctcccagatctgataaatgaattcagtaaagtttcaggacacaaaatcaatgtacacaactcagtagcactgctacacaccaacaacaaccaagctgagaatcaaaccaagaactcaactccttttacaacagctgcaaacaaacaaacaaacaaaaacaaccaaaaaaacccacaaaacttgatctctacaaggaaaattacaaaacactgctgaaagaattcatagacaacaaaaactaatggaaatacatcccatgctcatggatgggtagaatcaatattgtgaaaatgaccatactacaaaagcaatctatcagtgcaattcccatcaaaatgccatcatcattcttcacagaactagaaaaaacaaaaacctaaaattcatatggaaccaaaacagagcctacatagccaaagcaaaactactaagcaaaaagtacaaatctggaagtacacaatactcaacttcaaactatcctacaaggctatagttaccaaaacagcatggtaccgctataaaaataggtacctagaccagtggagcagaagagaacccagaaataaagccaaatacttacagccaactgatcttcgacaaagcaaacaaaaacataaagtggggaaaggacattctattcaaaaatggtgtggggatattggcagcccacatgtagaagaatgaaactggatcatcaactcaaggtggattaaagacttaaatctaagacctgaaatcataaaaattctagacgataacatcagaaaaactcttctagacactggcttaggcaaagagttcctgaccaagaacccaaagcaaatgcaacaaaaacaaacattaatagatagggcataattaaactaaaaagcttctgcacggcaaaagaaacaatcagcgaacagctcccagagtgggaggaaatacttgcacactttgcatccgaccaaggactaatatccagaatctacaaggaaatgaaacagatcagcatgaaaaaacaaataatcccatcaaaacataggctagggacaggaatagacaattctcaagatacacaaatggccaacaaacgtatgaaaaaatgcttaacttcactaatgatcagggaaatgcaaatgaaaaccacaacaggatactaccttactcctgcaagaatggccataatttaaaaacccaaaaataatggatgtcggcacggatgcagtgaaagggatactgcgacactcctggtgggaatgtcaactagtacaaccattgtggaaaacagtgtggagattccttaaagagctaaaagtagaactaccatttgatccagcaatcccactgctgggtatctacccagaggaaaagaagccactatatgaaaaagacacttgcatatgcatgtttatagcagcacaatccacagctgcaaaaacatggaaccggcctgaatgcccattgaccaatgagtggataaagaaaatgtggtacatcagccataacaaggaacgaaatgaatgcatttgcagcaacctggatggagctggagaccattattctaagtgaagtaactcaggaatggaaaaccaaatattgtatgttctcacgggaactaagctatgaggatgtaaaggcataagaatgacacaatggactttggggactcgaggggaagagtggagggggtgagggataaaagactacacattggggacagtgtacactgctcgggtgatgggtgtaccaaaatctcagaaactaccactttatccatgtaaccaaacaccacctgctccccaaaaatgattaaggctaaaaaaaaaaaatgataaaataagccaggcacagtggctcacgcctgtaatcccagcactctgggaggccaaggcgggtggattacttgaggtcaggagtttgagaccagcctggccaacatgggaaaatcctgtctgtactcaaaatacaaaaattagccgggtgcggtggcacgcgcctgtgatcccagctactcgggaggctgaggcaggagaattgcttgaacccgggaggcagaggttgcagtgagctgagatcgtgtcactgcactccggcctgggcgacagagtgagactctgtctcaaaacgaaaacaaaaacaaattaattaaataaaattaaaaataaaattaaaaagaataaaaaaaaaacactgaaaagaaacacaagtgggataaaaatgaaaaaaaatcttctatattttttccccagtaaaaactgtccaagtaacttaattattgctggaacaatgaatgctattccacttggaaatagctcaaataccccataaagaacaagcgagtaaaatggcacttctatgaaagttttgtttaaaaaacgctaaaaacagacactgaaaatgcttaaaaacaatatcaagttgaaaaagcaacacatttgttgaaattacatcacagaaaaactcaaactttcagaaaacacttaaaaatatatacaaagaataagaaaaggatgattctagaccaaaacagcactgatggtgcttttgggtgagtccaggtgaacgctgcttttttctctttatcaatcaagtcaagagggaaaaaggccgaacgtgcctctgaccacctcgagctcctgcttccgcgctcctggccttgccgcgctctgagaacacctttgagtccgctgggcctgccatgactgcccgtgttactaaaggtaaagccaggccgagtgactccctgagtctgcacatgacgagggccccagggtcccggcgcctcccgagagcaggtcattactgtgactcacattccagagaggcgccgaggcatccacgcccacagacacgccaaccctgctgtgactttacatggaaggcctgagtgtggggcatctccagagagactttaccttttctctaattaacaaaagggaggggggctaccttcatcttcatccagtcctcctggaaggggatcctgtctgcgtcgtccgtggagttgagatgtctgctcctgaactcgtctcccacctcccgcaggtgcctggcaaacaccatgctgcgacgggtctgtggaaacggcgacggctcggctgagaacacgcccgcccgccacgcagccctcccggagcgggttctcctgtcgctgccaccacccacccccgcagctggaacaagcccctcagacacgtcatccacggtcgcctgagaagcagcgccatccacggtggaggctcttggagggtctcctgcatgaagccaacgcagggcaagccgcccacccctgccggctctgccagcccctgccgtgggaagctgcggcacacactgggctcagctggccgttgcccctggctggcacaactgtgtgcagctccttcccctcagtctctccccaactcgacttctagcttaggcggttagcacatcctgctttgccaaacggggtgggactgacctgcacaaagtcccacgtgagcagggactgtgtctcctgcaggcaggttccggctttacaagctgctgccctggtgaacacgtcagcaggcctgctgtgtccacgggagggggcagccacttcccgccctctgctcccactcactcacagaaccaggggtggctatgggaagtcaccccatcaatgcggaaatcaacgccaacggaaaagacccgctgcagagaatagtcccacctttcaaagctaaagagaggagaaaggaggggtctacgttccagccactgacggagtcactgactccggggctgactccagggcgctgccaccgcattcagggcctgtggcatcagaggggagagctgggtggccctgcgggctcccgaggacctggctctgcagccacgtgaggcttgggggtggcacagtcaccgcagttgcccaaatccatggcttaaaatgatggttttaatcagcaaggttcaaaaagagctgtcgactgttttaaattttcaaaagctaaataatgggcaacatacactaactgagaaaaacgctcccgaggaaacactcacatcccagtattctttccctccatagtggtcgtgaagtaggttctcggctctgtctaacatcacggacctgtttttaaacaacagaagaataaacagttataagagttaaggatgatgacattcacactctcagagcacaaactgggagaaccccgggccgaggaagcagagaccaagtctccgagggacactaaccagggcgcgttgggtggttatggctgagacacaggcaggctgctgtctggcctccacaccacggttctgagagggctttaatgcctactgtcaacgaacagaatgacatcagagaaaagtatctcctaatttgaggagtgtatttgacagtgggcaaaaggcttggaatccaggatccaccgacggctatggcaagctgcaggcgtgcctgaggaggggagggtgggggaaggttttctttgacaaaaaggagaggttcacataagctgcctggaaacaaattcactgactcgagctcaaagccggagctgcatctgttccgtggtagagacgccattcctgggcaggcattctttccacagcgtctcgtccgaattactgcaacccttgtccggtggcaaacctagtcccaggaacacgggcacacgactgaagcagcggctgtgaaaggtgaggtgcgtgaagcacgtgaggaacgtcctggggttatttcagagagccctccagctggcctttatctcagactcgcaggcaggtgcctcctcctcagtgccttccttgctccagtttgggtctgacaagtcatcctggtgcctgtgactgtcacgttacctaattccacgtgggaagtgcctctcctattccagccattgagccaaccgtctcaccaaactccccccagggctcttgatgcaaaataaaaacgaaacacacaaaatggaccgtgagcaaatagacctgaatattggggtggtaaaggctggaatacaaaaacgcagaaatttttaaggaaaaataaaaattttaattttggccaggcgcagtggctcacgcctctaatcccagcactttgggaggccaaggtgggcggatcacgaggtcaggagatcgagaccatcctggctaagacggtgaaaccccgtctctactaaaaatacaaaaaaattagccgggcgcggtggtgcatgccacaagtagccccagctacttgggaggctgagacaggagaatcgcttgaacccaggagactgaggttgcagtgagccgagatcgcgccactgcactccagcctgggcaacagagcaagactcagtctcaaaaaaaatacaaaaaacaaacaaacaaaaaaatgtaatctctacagagaaaaaatgagcaacatatctaagttggcattttatagaataacatttcaaaaggcttttaaagtgtagttttactctgaaatcaaagaaacacacacgaacagagcaaggattccacattttgctactggatccacacagatggaagctctcggccctcgtggctgcctgggaaccagccgtgcacggccactgcggggactctgaggactgcaccaagggcacacccagccatcctcttctgggtggcatcctacagttttacgccctcatggttcacacaaagactcttctacagaaacctggaaacaaccaaaagccacattttcttccatctgtacacagacaactgcaaaagaacgaggtgatgtccatgtgtcgtaatacccaggtgaatggctgggtgggaagaaagggcaaactgaaaaccgcatggagagggcacgtgtggtgattccacgtgtgtttcaaaagatggctgcatgcacaggcggccatgtgaggcgatttctggagagatgggtgtagctggattcagtgggtgcctccggccctgcttctaatgccgttttaagggctttttatgaaatgcaatactgcacttcaagacgcacattccacacgggcgcgggtagaggacattccgcacgggcacaggtagacaaactgctccaaaatgaacacggtgcagcccccacccgggtggaggaacaaggaggaagaaagcgcttcacacacttgctctgccccgtcctcaggggcctccccggcatcctcccatctctccctccgatgcacgggactgtctttgaccttcatgcacatggaacatgactacatttatctttttctttttttttactgggcattatatcttgatttctctttgttgaacacggcagcaggttgcccatcttcagctgtggatctaccacactctatccagtgcgtggctgaggggtgcacgtgttttcctggtccggggaggctatgaacgttcctgggcaggggtctgcgggtgcatgtcccgcattcagggtgcactgggttcccagggttttaccagattcttgctccaggagcagcctttgagcccctgcaggcctgtcctcccgacagcggttggtttcccgagcatgacagcaatgggggcacctgctcgcattaacagcagctgtccttactcctgaatcgcatggatcctgtgttggactcacctcaccccaggctgcccgtccctcactcgctgagtttcgtctcaattgcacggatcccgtcttggactcgcctcaccccaggctgcctgtccctcactcgctgggtttcgtctcaattgcacggatcccgtcttggactcgcctcaccccaggctgcccgtccctcactcgctgagtttcgtctcctgtatcccagagagtccttagtttatcaaatgtgctgcaggacctccctctctgaggcctgtctccatttttctaatggacaaaagttcttgattttaaagtaactggctttaccaatctttcttttttggtccatgcttttcccatcttgttgaagaaagctttctgccccacggtggtgaggctcctctcctgacggcttgatagcttcaccttcccattagggctttaacccccggaagagactttccctgggtgctgggggcagatgacctcaccgcccatcatcagcctccttttccactgcgccttttccccctgctccccggcagaagcgtttctcctaaatcaggaccatctagttggaagccccctctgggctcagctccattctaacctgtaaatgtgagtcaaaaaaactgactggcaagactgttccacaggccccaaacgtaggcagactggcttccaaaacccgaatattgtcatgaaatgaacccagtcccaggacaacattaaagctgcatctcaacaaccaaaacaattcagcctagctccctccacaacctctgagttctgtctgcaacagccgggctggctgagcagcagacacgcgggcctgtgatggagccacctgccttcacaaaggcccagagcagctgagaccatgtggtcccggcccgctggggccagcggcagctgttactgaccagggtgataccgagccagctgtgatgtgcaacaggatcgtggctgatggcctctagaggcacacacagggcacgacagcagacaaggcagcctcaacgtgggcaagtgcgaggggcacccgtgccctgctatgcctggtctatgggagacgctcacagtgcctgctgggggattcagaagacccaagggaggtgacggagagggtcccagtctgcagcaagttctaagaacgtggccatcaacaattccctccagagtttacgacatcatcaggtactgacttgtctgcaaccccagcctcctgggtggaccctcgaggcccagctcaccaggccggcgaccacttgaggcagacgcatggccaaaggtggctgcatgatcctccccagacccgtgaggcagaaaacagatcaaacagtgggtgttgggtgtggggaggggggaggtactggtaaaagctgcccaagtgctacaaatcgagaacagtctcatggtgagctccccgccgcccccagcccagctcagcccctccctgtgcacctggccgggccgagccctcacctctgtgcccctcacccgctgtccacgtcacccactgcacccactgggctgtttcgcagagacacatgcaagcacttccctaaccaccaccccccagggcccccagggtccgctgtctgtgaggtgggtgggccagggatgcgggagtatgggcggagagcccccagcccagcatgcacggagcagacgccacagcctccaggctgctcccggggggcctggggcactcaccgggctgatgtgtttctcagcagcaggggcgccacgatggaggctgagccctggacggacagacaggagacgtttagacccctggtctcctcataaccccaaaaccatcctctggaaaacaaaacccacagcagctctatcagtttattttgctttcacaaggaaaacaaatcaagtctagacacgcacacactgtggcttgctcctgatgaaacgcggctgctttaggaaaacttactgatcgtgactgcagatcgtgacattctagtaaaattttaaaagaagcccatgagtgtctctcaggctgatggaccactgaggctttccccatgataggggctggcgggatggccggggaggcagagggagccggacagaggcagccctgtgcaccttcagggccagcctggctgtgaccgtcagccaagtcaaccgcgcccttcccaagagctcacctgccatgctttagagccagctgccctggcactggacacatggaggctgttaactgacagcttttccacaggaggcctggtagtgtcagagcctttaatggcaatcgacacttgggactgacaagacctccatccctgtggcaacatccaaatgcatgaaaagacacagggaaagaggcacggggtctcagccagatgttcatcacggcccattctccaggcctcagcacaaaggggaaccgcctgtcaaggacgaggaacggtgtgggcagccacaagcgctaccaccacaagggccgccgcaacactgtcaggatgcccaggaggggacgcccagaaccctgcatcagcaaccagcatgggcagcgagggcactgcgggggaggcggttgcggccggggggagtggggggtgaagacaccgtggcggggggaggcggggtgctgcagggggggcggggggcacccacggtggtggggaggagtgggcggggggcgcctgaggcggggggggggggacgcatgcggcagggggaggtgggggggcacctgcggcagggggagcagcctcagcaggcacctgtagtactcgtgcttgtcctgggagtacaggagctgatcaatacacggccgctcgtccaccttctcttcccaggtcccttctttccacccctctgcgtaactttgcaggacgtaaacctggtcaataaagggcccaccagattctgaaagacaccaagaaaagccaggcagtgtgacagcgatcagaagctcacttacgggcatgcatcagtcaccagcagctgactcttactactgtacaccaccctattcccaaagggagtgtaggaggctcacaaaagcagagacagggcagagcacatgccatgagggcacagggccatcagcgtgcaactgcagctggcggggggtggtgtggagctggtacccgattccccggccctacccctgcctggctgcagcaggccccatcctcacaggggcccgtgtgagcccatccggccctcacgccgtggtccaggctgttccctgccaggaccactccccttgggggctcgccctccggccctctgtgaggccactgtcccctacccccctggtttcccacagcgctcctcaccccctcggccaccatctactgcactggtgtcctgcctcccccggggacagaggctcaggtgagcaggagtcgtgcctcttacccacggcccgacccgcaccaagaaggtggcactgtgacgcccaagaggtcagcaattaagatctgctcaaaggcagcaggaataaagcgggagggagcaccgcgcaggtgaagttctggggcaggaacaaagcgggagggagcaccgcgcaggtgaaattctggggcaggaacaaagcgggagggagcatcgcgcaggtgaagttctggggcaggaacaaagcgggagggagcatcgcgaaggtgaagttctggtatcctttttgctcactcatgactgggggctaagggctgcgtggcctaagggcctgaggccacagctgcgggggcttcttttaggctagtgggaggtggtgaagatcctgcacgctgggcgctatgtcagccacatcaggagctcaccgtgtgcagtctcttggcagcctcgccctaggacaggcacccagttccttccccacctcacaggcgaggaaacagctcagcaaagccccaggctggtggatggcaggtaagcgtgagaccagcatatgtgcctcagaagctcattacacagcatctgtcttcccagaccttcccaagcacttggatgcccaaggcccagacctgtccgcttccctgtcaggaaacccactggtaccaaagggaggtaaggatagcatctctgggttcctataacccaatgttcagaccgagggctggctgctagttagacccaatacccaaccacagctttcatcttccaggactcacaagcaaattttaaagtcaactcaggaaaggacgcactccaggaatgctttttacaagcagcagactttctgacttggtatcaacaaggatgttggaggttaccgcctgttgttgcatgcccctagcactcacaagactgaccttgacacagaaaacatttcagagtgacaagatctagggtgcaacgagaaccacatccttgaaaaatgatgacacgggagccacactccttggcagggagcaaaggtctctaagccccgagagtggctgtcgagtaagaactcaacagatgctggaaagcaggagcctgactcaaaactaactcattcgtcttcaaggcctctcaagtgcagcagcaaagcatcacttacctttatctcttccaaacaacgcaacacaaaaagctctaaataccttcattctaagaagagctttaattcttctcttaaaattaactgaaaagattaagcaacacaaaattaaacgagacagacctttatccctggcgctgcactgagacaccacgaagcatactccacacgcagtgcgtcttcctgaacgtaaaacagcctttcgcacagggagccgagtcctgtcactataacacccaggggtggccgctttcttagggtgtaagggcggctctaactgagggggcacaaagctcatccacttcaggtccatttccgagaaacattttgggaagctcactgcagcgtgggaaagggactgtgctcctgaacggaggaggtgctgccacaggcctcaggcagcagcactgggcactggaggatgctggtgaggctggatgcaatcgtaagcccaacctgatgtctaccttagaaatgactgcctggccccagttaagcaaccacggcctcccagcgtgccgctcggcctcacctgcgatgaactgctcatactcgatgacggggatgtttttattgagacttggaagatcaaaaaactcagaccagggaatccggacctggtggatgtcaggactctgccagtgatagaggcggccccatggaggcaggacaagcacccactcctccgtcttcagcagagtcttcaggagagaggcgattcggatatagacatccctgcgcaggttgaagccttccggggggttgacgtcatacagaagatacctgagcagggagaaggaggaccacaggtctcaaatgctgaggtttctgcacggaaaacccgactgctcacaagtctcagcgcgtggcccgactctaggcacttaacaatggttcctagtttgtgaaggcagtgagtggcctgtttctctatgaccagttacttacggagcctgtaagcagaagcagcagacatgctaacatcgttttaacaattagcaatagttcaacactaaggcagaggaatcccagtgactggaacccaagaatcagtacccacatggttctcaaactgtttggtttaaagacccctttacactggaaacaatgactgacggctggttatgtgcactatgtctattgatacgtcctatgttagacgttaaagctacaagtatttaattcagctaaaaataagaagccattacatgttaacaaaaaccacatatttaaataaaaaataagtgtattttaaaaaatgaattagaagaactgtgatgatgttcttaatttttgcaaatctcttttgggtttggtgacagctggattcccatacccgtttctgcattcaatctgttgtgacatcacagatcaagtggtttctaggaaaactccacagtgcattcatgagaagtgaaaaaggcgtataatactctggtactactattaaaacggctacaaaagctcagagatccaggacacactttaagatcactgccctagaggaaggacacaaagcgccccaaggcacagacaagtccccaaggcacagacaagtccccaagggctacagaaaccctgtccctggcgctctcctttccctgctctgcgctggttttccatactcccatcgtcgcgagtgaagctgcgtgcagcgcccaggcctgcgaacgccacgaggggccgtgcacacctctgcgtccaggcccctcccggggtccgcttggagatcccacagccacagggcggccgcgaagctcgtcttggccctgagaattcactgcggagcgcccgcccggcactgactcccggctccgcacacccaggcctggacccgtgtcacttgcaggggcctccggagccagcccacgctcagcctgagcaacccggcccccttcctgggctcccgaggctgcgccccgggcctcgcagacgaccccgcctgcagacccgggccgcagtgacgcagcctcgactacagccaacccgctggcccgaccctgcccccagcccccgccccatcccatcccccagactccagcccggccccggcccctgcccctgcccctgcccctgtcccgtccccgtcccatccttcttggccccggctcccgccccgcccccatcccatccctcgggcccccgttcctgcccccatcccatcccacccctcctggccctagcccctgccccgcccccatcccatcccatcaccctggcccctgccccgcccccatcccatcccatcgccctgatccctgccccgcccccatcccatccctcctggcccctgccccctgcccctataccatcaccctggccccttactccgccacattccttgccccagaaccctgaccccatcccattcccctgacccctgccccctgaccccgctccatcccatccccctggcccctgccccataactccgctccattccatctccctggccccggaccaccctccatcccgtgggcctgcccctgaccccatcccatctccctggcccctgaccccgccccgcccccatcccatcctctgaccctgcccggtcctggaaccccagcgttggcaccgtggacgcgcgtttaccgtctgcgggaagccgcccccgacagaatatcggccgccgattgtccgggccagaactcctggccggaggcagaagccggaggccaggacactgcccccagcagcaggaagacgaagctgagtgtcgccatggccccgggcggccacgcacttccggcggccgcgccccgccccggaaccacgccccgcccccgtgaaatgcgttcccagtagccacggcaacgcccagctccgccctccccgcgcatgcgttatgcgccatcaccggcaagcaggggcgggagggggaactgcgcgtgcgcagagtctccgccctcctgaccgcagcggctagaggttccattgcagacccggaggccgtggctgtggttcgcggcggtgctgtcgcgggcgccctggcgcagcccacgcaggggctcctgagggtccgcgaggccgggaggtccgggggtcgggaggtcccggggtcgggaagtcggtggaccctgcaggccagtggggagggtacgcgagactgggggccgggagggctgacggctggtggcgcggggcgggtccgtggggaggaggcccggggctggtaggggcgggagggctggacggcgggggcggggcggaggagggggtccgtagacggggtcggcgccgggtgctctcgcccctctggagctggggtcggggcgggagccgcgcatgagagcctgggtttctagtcggggggcgccgtcgagctccacacctgcggcctcctgggtgcccccaaccctggagccccggcgagggggcacccgggctgaggcctggccctccaaggagccctggagggactgtgctgctagggcgcggggctcgatggggtgatctggagacctggggggatccggggctgccgcccctgcgctgccaacctcccaccccgccccttctgcgaggcgttattaaaggtctggtttcgggagccaggtgcgtgcccgccgccgccgctccccgcagcctccaggcagctcccgctgttccccgagggcaccagcactggccgaccgacctggcttggggcgcggcgctggcaaacccggccttctgaggggacgccacgctgactctagtgcaggcagcccccaaaacggtataattggacgaatttcttgaaggatgccagttaccaaaaaagaaaatactaatgcttattatctgttaaatttgagatcaatttgttatcaaattttctcacacagaaaattccaggcccagagggccaagctggtgaatcctacttagagaagaaataataggaatccagccactcagacgatggacgaggaggggcacttccctgctcgatgtatgggccagcattgccttgatagcaaagtcagacatcaccagacagtagaaccacagaccaatgtctttcatgaaccaagacacagcatttaaaaaaattagcaaatggaatttatatctgcctattgtttacaaaaaaagccaaactttgtaaaatacttgaagagatttattctgagccaaatatgacccatgacacagcctcaggacgtcctgagaacttggcccaaggcggttgttttactgcttggttttattcatttcagggagacataagacatcagtcagtacatgtgaggtgtgcattggattgatccagaaagtcaggacgactccaagtggaaaggcctccaggtaataggtggattcaaagatgtttctgattggcagttggttgaaagaagttactatctgaaggcttggaatcaatagaaaggagtgtctgggttaagagaaggggctgtggagaccgaggtccttattatgtggatgaaatctcataggtgtccgccctcagaggcaatacatggcaaatgtttcctattcagaccttcaaaaggcactagactctcagccagtctcctcaggatcagaaaaagagctggaaagggaaggggagtctacagaatatgaatttccccacaagacaccgctttgcggggccatttcaaaatttgtcaaagagatatattttggggtaaaatacattgatactttgagggcctgttgtcacgtgatgctataccagcgtcagattggaacttggtgtcttgctgctatggagtctgctgtcagtctggtcagctgcacctgaactccaaagggaggtgggtataatgagccatgtccaatccccgtcccttcctggcctgagctcatttttcaggttcttcagaatccccctggtggagatgagggatccattcagtgggttggggaagcttagagttttatttttgatttacactatgtgaagcagaaattaaaatactgtaaccctgatagggttattttaaagctgcaggaatcaaggcaggttgccgtgggtaagaggatagacaggcaggtcatgtagcaggacgagctgcggacaaaacccctcagacaccaggttaaggaaggatttggctttattcggccgggagcttcggcagactcgcgtctcaagaaccgagctccccgaaaacagagttcctggcccttttaagggcttacacctctaaggggtccacgtgaaagggtcgtgatagattgagatcacatgtggttagagtgggagggggggtaatcttttaacctcaggcctggtcatcggtggcaccggctggtcttgctgctgacttcattcctgttgtttttcaacttttacttcatccttctcttcagagacaggagacagtaaaagaaatggcctctctcctctgtcagagtggagtcccgagctcccagaaatgccacatgatggacaaacgcttgggggaaaaaaaaaaaaaaggagacctcagtcggacacaaaagcaggagctttaaaagaaaaaataagagataagttgaacttcaccaaaaaataagcgtttctggtctttgaaagacacttaaaatgaaaaggcaagccatcgatggggaaaatactcagaataatggatctgacagagggctgtatctagaatatatgaagatattttaaaatccagtaatttgacataaagatggtagccagcctgacacacaaaggaacccgaatggccaatggacaggaagggaacccgtatggccgatggacagaaagggaagtgaacgtgaacatctcattggggatgccgttatcaccactggaatagtcaaaaacatggacaccaagtattggtgggtgagtggaatggcgggaacccacatacacggtcgatgggagctgcaccctttggaaatcatttcacagtttgtgctccatcctggccaaacccacagctggagtctttccaaaaacagtgacgggagtttccaccagggagtgcctcaaaccatcccgagatggggctggttgggattccagggagaggcactcgttgccagggtgatccgtccagagcacttcctaggggatctggcataaggagggctgcagtgtatcctcaggacagataggacagatagtgtatctttgggacagacggcaagatggggattccacccaggtctgtctgcagcgagttgatatgagagtttaaggaatttggaccagggctgctttgtttcagggttttgggcaatgacctaaacacctttatcagtgcctgggaatgctcaaggcccagcttgagttcaggcctgcagggaaaacctgcaactggccgggctgcagagtggtcagggcacggaaagccagaagctggggacacacctgctgtatgatccagccgttcgtctttacctgggagaaatggcaccacctggctgaacataacttcttacactcccatgagtcctcctggacaggtgctgtgacctcgtgcagccttggggaccctgacactcccacggacaggccaaggggtttgcctgggccctgtgggcacagagccccttgagatgggtttccctatgcagccccccaccccccaccggggacccatggcactgcagccctcaccccccctctagggacccacaacactgcagccctcgcccccctccggggtcccacagcactgcagccctcgccccccatcggggacccacagcactgcagccacgcccaggccaccgcctccaaacacagggccgctgctgtttctgtgaacagatacttcttgcagatgtcaatggttaatggatggggaggtgaccgcccaagcagaagccgaccctcttcatgaaggggccacaggtcaccccgaagcagaaatccatagaacagccaaggccacagcggaaccgagcaggccacgcctctgcctctgggccgctcagggccaggcctccctgaccccactggctctattgtgaggactcagggtggagctctgctgggctcagtggccttcacagccggggtccacagacccgggtcctacgggcagtactgtgctcacctagaggccacggtccatgccctgtctccagcaggcccaagtcacttgtccatggcgaaggcccggccttgcttcaggccccgggcgcgctccccctgctccccctgcccaccgtttcttcccaggtgacagaggcgggagagcaggcgagccacgtgccgggcgccgcagcagggggcactccaggctggcgcccctctgcctctccgtgggctctgacctttcttctccctgcctgggcagcctccttcaggttggggagtcttttgttgacccctggattaaagtcctaatcaggaatgacccggaagaggtcttatgaggctttcctcaagagaagaaaatctgtccctgagtatcaggaagtggcccctttccctgcaccgcagtcttctgtgaccagcggctcacacagcgaaggaggggctggcggcccccacaggccactgccccgaggccgccacgagagggcaggagagcccttcctgggagctctgtgccacggggaaacgcagccccgccaagcacagcatggatgtttccagcagggaatgaagagagaggccccagcacatgagagaagagcacactgggcggcccctgtcggagcctctcctgtccccagcgacccctgagagcaggccctgggcctctgcggcccctcccggagccactcttcaactgctgacctgctcccagctcttctgtgccccgcccagctccctgcaaaacctcacctgaggggaaggaggccctgtttgggctcagacgcagcaggtgcagcttgtggtcctggggccacacctgttagagcccatccttctacccctgctgggccctgagtgtcgtccgtccccacagaactcagcagggtcaggtctgggcactccaggccgccagccccctgagtgagccctgggccggaggtagttgtgggtcacaggcaccccagccagaacacccacagtgggtagatgtgtggggaccggatgtgggtcctctcctgagagacgtgcagatggggagaggctgggcagttctcagcacagctggagcatctacctgtcaccacctcggagcctcctggccccgtgggggcggccctgggagcagggtcggcagtgaagagcagagaaaggcagttggggatgttgccactgtcccccgagaccaccctgccatggagacgagggagctgtcccttcgcggaagggggctggccagcaagaaggacagagagtggactggccgaggaccgctgagctcaggacccaaggaggactcttctaggagacgagagagcgaacgccagggaccctgtgcaggcctgctcctccgtttgcaaggtgagttaccaggttcacgtgtttggagtttctggactcattgcggagttccacccctgcacgttgcggttccccagtaatcaaatcctggcttttgtgcctggaagtgcacagggaggggacaactttgtgagtcagtggcagggcagggagttctggttctccagagccagaggccgtgctcagaaggatttcttagcaggagccttggggcccccagtcaacacttccctacggacagcctggccagctctgtgcacggagcaggcgcccgagggtcccaggtcaccaagtgaccaagtcgtgaaggcgcccagggtttcctgggggtgcgctgatcccaaggaagccacgtgtggtcagcatgggggaggggaccagcgccccggggggcctgcagcacagcagggcctgccctcctgggtgagactggccggtgcctgtggggatctggggggctacagtcagggctctgtgctcccgagggccacgccagcccacctgccctggaacagaacccgaggcttctgcctaggggagtacctgggcacctgcctcctgtgctgccctggacacatcccagcggctgcacataggggaggcacagcctgggctcagggccagggtccactctgtggggatactagacccgggggtgacaatgccagctcagaacttccccccacacctgggctcctccagcctggcctttcctggggaagggagggcctgtccttcctcagcactgtgggagggaggcaaggcctgcggttgaagcgtccccaacacggggctccaggagagaaagcaccacatctcagggaatgaaaacagagacggggccgcccagtgcactcggtggctcggaaatcattaaagaatgttctgagcccccgattttggctgtaaaagggactggccggcttgtgaccgctcccctgtctgtgccttgagacgggagtgttcagcgttgggggcagctttccctccaagaggagcttcacaaacatccgctctctgcggggccgcctctccgtggcctggggccgctgtcggaggaaggctctccagctgccgtcatctgggaaacgtggggggcgagcaggggtcatggatggggctcactggggactgtgagaatctgtcccgcaggactttctgggatggaaacgctggcagaggtgaagcctgcgtcatgtgcttcactgaacccggctgcttatttatgttcggagggctggtttcaaggactcctcgtctccctctccagtgatagcgtcagcggaaatgcagacggggacggggctgctgggtttcctccctggaatgaagcacagccggaggttttgctgattcaccagcaggccctgaccgctgagttcagggtaacaaatccacatggatcctgagcccgcatagctccctgggcctcagcataaacatcgtaaacctccgggccctggcagtgtctgtttcatcccctccagagcaagtgcaagtgtgagatttagagattctaagaggggaagggccagaggtcttgaaaacgaccttcattcgttcattcattcgagaagtttgcgagggcctccgtgtcctgcgtttagtggggcctaggacgcagatgtgaagggcgctgctctcaggagcagacagaggtggggatgaatcagtacacgcccacctcgggcccacaggggaggatgcgcggagctgtgggtgtggggaggagacccctctgcgtcatgctgacggtgtcggcagagtcgccagcttctgcaggagcggtacctgtgggttcttctgtgacttgtttaaccgcatcttttgcccagtagttagtcttttcctgttgggacaccatgttggtagtttggaaatggtttcttccatccattgcctgccttttagctttgtcgatggtgttctgttgtaaattttggtgcacgtttaatgtgaacaatggttatgagacgagtgccatgagttcctgtgtgcctgtcacccagcccggccacaagaggtgctgggggcagtgtccacacccccctttcttaggacgcctgagtctcagatgtgacttatagggtatttcttatggcaagacggttaaaacaaacttcagcgtctcgtctgtccttctatggctgtggcttctgatgttctaatggcgttctcgtcagccggggctgagaacaaaataacatagactgtggggcttaaacagcagaaacttacttcccacggttctggaggttgggagtcttggatcaccgtgtagcatggtcaggttcctggtgagggtgggattcctggctaacgtaacgaaggctccctctcctgataccgtgtcactgggggtgaggcttcaacacaggaattttggggggacacatcagcattcactccatcacaggtggttagccctttaatccgcgggaattttgtttggggttgtgtgagatacgggtctaacgttttctttttcaaatacgtagccagttgtcacatcatttattgaaaaaggaatcttttctccaccgactgacatgaaatgctaccatcatcgtaaataaaattcccgtaaatacttgctgtctctgctgtctcagtcctgactcacgggctgagttctctttctgcacagtagcactggcattaactgtgacagctttacagcaggctccctccccgaggccgttcagaagcattcctcagcgggtcctacacgtttcctctcccatgtcaagtttagaagcagtgtcaagacccacagcagtcctgcgggagttttaagggatgcacggagtttatggggacagtttggaaaattgacattcatgtgacttagagtcctactacttgaaaatggattccagctctcaacgaatttagagctttggcaaaatttttaagatttctttgatgtccgatgtgctcatttcttggtttgttcttgagtattttgtggatttttatgaaatccacaaagtttttgttataatgaatgggacactttcccataaaatgttgtaattctgtattgctgttttagtaaacactgttgattgatgtatattgatgttacacttggtcacttgtaatagtttgtccgttcattattttgaactttttaggtaaacagtcatataattatgcaaataattatagttgtgtctctgcctttctaatatttatactttgtgtatattatcatgttggccaggactcaagcgtctttctcttgtttctgactaatgcgaatgattctaatgcaggggtttccaaactggtggccggggggccaaatccagccaatggtctcttcttgtaaataaagttttattggaacacagttacacacatttttctacatattgtctgatggctactgtcacgccacagcaatgctgttaaatagtccagacagaggcggtattgcccgaaaaacctagaatattcaccatctgagcttttacgggaaaatttgctaatatctgttctcatgcattaaatacaatgtttgttacaggttaaggaagtttctgactatttttagctttctgaatatcttgtggttgtgtgtgctttaaaattaggactaaatattaaatttaccagttgcttgttaggggcctatcttttgagatgcccaaagtttcccttttttagtctcttcatgtagtgagttgtactaacagattctctaatgttgaaccgtctttgctttccggagatagactttacttgctcctggtggattggattctgtttgttaatacttttatttttgggtaattacatccctattataaataatatgtcagcatcattgtgtgtagatgtgtgtgtgttattcttgccattagtttctcaggtttttggttaactattgatatggtttggatctgtgtccccacccaaatccgatgttgaattgtaatccccagtgttggaggtgtggcctggtgggaggtggttggatcatgggagtgaatttctcatgaatggtttagtaccttcctcttggtactgttctcgcaatagtgagttctcgcgagatctggtcgtttaaatgtgtgtggcacctccctgaccctcctgcttttgctctggccatgtaagacgcaccagctcccctttcaccttctgccacgattgaaggtttcctgaggccgccccgaaggttcccatacagcctgcagaaccatgagccaatttaacctcttttccttataaattacccagtctcaggtatttctctatagcaatgtgagaatagactcatacaactatatattacagaatgaattgtgatacttttgtctttgtctgtgcctggaaatgatagtaattcttagtaaaaattcacctgtatcaagttcttcctattgcaacaaacacaattctatatattttacatgagttaagtccttaacctggaagtcatccctgtgaactaggtattgctttcgtgtccatctgacagatgaagaggctgagagtttaagtagtctgcctaaggtcaccagccatgggggcgaagatggaatttgaactgagccgttggccttcagaggacaggttcctaaacggtcattctgtctctctgttgcagagatcagtcctgcatattcctgtaaaaaactgcctgagcttggtgcttttttaaaggatatcatttgactacttttttttttttctgtttcctgcccatgtcccatagggctaatcagattttctatttctacttgagtcaatgttatactttatattttcatttttgttgtttttaaatgttacactattttttgagatagagtctcgctctgttgcccaggctggagtgatctctgcttattgcaacctctgcctctcaggctcaagcaattctcctgcctcagccttctgagtagctgggattacaggtgtgtgccaccacacccggctaatttttgtatttttagtagagatggggttttaccatgttggccaggctggtcttgaactcctgacctcaagtgatccacctgcctcggcctcccgaagtgcagagattacaggcatgagctactgtgcccagccatactttatattttctaagaaaatcatctgtttaacctggcttttaaaatgtgtcagtataagccagaacatggtggttttataattgaaaaaacctagtgtctgcctgtgtcttccccgaggtcttctgggtggagactgggaagcaggggccagtccacaaacacacctcatgttaccgttccctgtaggaaccctcagctctgtggccatctcagattaacatccactcctcctgcagaatttgaaaggagagttgctatcaccaaatcccttcaggtctcaacatttacccaggttaccttgattccagagatggctcttaacttgatttctataaaccagtagagaatgtgtctgatggcacagaggaaaacactgtcaacacgaagttcctgaacagtttaaagagatgacacagatgttttttaaagtaacccatctaaatcactggaaatgcccctttctccctattttgtcaatggatggaaatgtgttgagaaaggtgcttattgtaagagaaacagaacagaattaaagctactaataccaattcaaaattggggaatggctgggcgtggtggcttatgcctgtaagccaagcactttgggaggcgaaggcgggaggattgcttgagcccaggagttcgagaccagcctgggcaggatggcaagaccccgtctttacaaaaaaaattttttttaattagccaggggtggtggcagacaactgtagtcccagctactcaggaggctgaagtgggaggatggcttgagccgaggaggtgagggctgcacttttaatttttttttgtttgcttgcttgtttgagatagtgtccagcctggatgacagagcaagaccctatctcaaaaaaaaaacccacaaaaaacaaaactggaggaaaatccagaaaagtaggggacatcaacaatcaacacactgtaaaactgtcatctcaaacacggtaatgtgtgcgtgcccctcgctggggctgagtgtgtgtgacactgcgcaggcttacaggcccctgcacgtttcggcgtctgtcctctgcggatgataacgtgctcctgccggagccgctggggcggtgtctgcactgggaggaagcccgttgggctgtcatcataccctgctctgtgggaaccttccagacgagacggtcacttcggggcagacatttcctaaaggggcttagaatcaaaatccaggaataaggacatggaatgctgagtggtttcacaaccaaaatagagtttatgtcaatattgaatattaaacgacaacaattaaagccagccgggactgaacagctgccagtgcgcagcctgggtgggggctcaggacaaggggctcttatggagcccctcgagacccccaggaggtggacactgcccccagctcttggtggagcccttgggctgcaacagcaggaactgaaccccaggggctttggggttaagagaagaatgtctggacgttagcggcaaaagcaggcgggtggggcagtgagcacaagcgggggtgcccctgatactggctacccctccacatctatctctgtccgggtctgcctctgtcctcggcacacggcacgcgctgctccgggggcggccgcgccacaggtgagcggaacacggttcgaggaaggtgggccgggcacagggcggcccgtggttgcaggtaccagagcttgctggagctggctgggctttgaggatcaatcacctggttctgcagatgtagaagtatgtaaagtaatcagcactttcaccagggcaggactcggatccaggccagcagctgcccagcccaaggctccttgcaccaccgtgtgagccacatactttccggataggagaaggtccagaaggtgaagtctgcgcccaggacctgcagaggtgagaggtgagaggtgagggtcaagcattccataccccgggttccctggggccccgcccctctgcacagtgacagtcgtttgggagaggtttcccacagctggccttcccttcagaccacttgagactcccatcgatggaatgttcatcctctaactgcacaattttttgcaaaccacaactttctatcttaatctcatgaaactgggaatcccagaccatgagaaagtcaggaaatggctttgaacaccggcaggcgctgcacagcgctgggggagggggacgagcctgggaactgtctctgctgaggatctcggccccacgtagcccgtccttcagaccctcatgcggttcatccccttctgtggctctttttcggagcccccctacccagaacgtcccaccccaaggcacgcagtgggtgcccctgcggggtctcaggcagctcctgacttccagtgagtcctgggcgccgcctgcaggaggtgaagacgccaggaccgtcgctcgggcctctcgggtggctctcgggtcagagggccgccctacaccctcacctgtcccagaagccccccacacccgcagctgtccactcccctccgggggcctctgctcttcccctgctgcctcccccaggacttgctcctccctcatcctccatcctcctccgcctcagcatcccgttagctcaacaccacccttcagcactgctcagccacaggcaaagcagagtaaaacccgaaaccgccccgagatccccacgtctccagtcggaccctgcttcccggagcgccgcccccgcctgctgcccggtgtcacccgcctcgtgccacccccgtggccccggccgcccctgaggctccccaggtggggggcatgtggccgcctccctgttttcgctgtgggtgatcctgtgacttcatccgccccaaactcgccggctccttggcagcaacttgatttgtcttttgtggggcaggtgctctcttcccccacgtgggtcctgctctctgtggcctccctcgaggtcacctgcaggggcctctgtaggttgcattgagaggggcctgtgggtcctgccccccatccgacactgagcgttgtaggactcacatcggggagcccctgccacgtttaggcctcacagcagccctgggggtggacgggtcccacaggttggccacagccccccagtgcctccctgtgagccatcctgaccgccagaaggcccccggtgacaccagcacagtctccctctgggttcccacacccaggccacagggcactcaggggcaggctcggcagggagtctagtccaggaattggtaccgacttttcctggcttctcgaaggttcagctctggccagggtcaggcccaggaggcagagcaaaacccaaagctccctgagacccccaccttttctgacggggcccccggggacctcggggtatggaacgcttgaccctcgcctctgcctcttttgagctgcagtctggggcaggtgtgcgcctccccgctcaacccaacaagaggctgatctaagccccggccccatgcggggctgcatccctgcagcacggaccagatgcagtcctggctgtgcccggcacctcccatctcgcagctgagggtaaccagggtggtgtggggcttgtcccagggctggcggttgctgaggagaagggacacacgtgctgactgggaaatgcaggcccggctctgacggcgaggtccgggttgcggtttccacgtcttcgtcacgaagcctcgaagtgctgcctgtgcttagcagtgaaaatatttacttggagatgttcagtttcacagaagccaggaaggggcgggggtggtgcggaagcattgttccccagagcacgcgggaggcggcccagccctcagccaggacgctcccccacctcaccctcgctgggctgtggccctggggacgccaccactggcctcacaccgtggagcgtggataggccgctctggcctgtctgcaggggaaatggctgtcacttccatcagagatgacggacacagcagggcctgtctctgccaaaaccagagtcgaggcagtccccggcagccggtgtatggggaacccctcagcttccgtgtggagggtcagggaggctggatggcttttccttccgttcctgtaggcccgaagccttccccggatgcactcatgaccggggcctggccagcaggcgtccgggagtcagcggctgcttggggaaccagggccccactcacacgcgggaaggtgatggtggcaggcagactggtagctgagagcgaaaggtgtggcgggatccgcctggctgctgctggagccccaggctcgtgaatcgcctctgcgtcccgtcccctgcgttgggcagcttcacctgctcatcctgctcggcctgggtgtttctgctcctaagcgcccccctcacggtggtcttgggaggctgatgtgagagatccccgctggctgcagtctccagggaagccggcattcggggcacacggaggtcctgccttggtgcccagccttgggacaccccacagtgaatgcctcctctccacggtctccatgtccctgagctcctgcttaggcccccagagctggcactaagggtggatgcagcagctggtgcacatgacagggacggcagagcccatccgaagggacatgccacctggaagccacctgcaccggctctgtctggtgtctgacgtgggaaggacgtgctggaagcccatgggtgtgtgggaggcccgggcctcgagccatgtcttggtgcgtgtcggggggacgtgttctgtgaagatgccgcagctgcctcacctcctttccatgtgcggggatgggtgggcagcgtccttgccaggggtgttcccggcagagggaggagagcatcacccttgggccaacaccgccaccagcagcggccggaccatggagctgagcatcagctggacccagggcagcgaggggctgtgggcggcacctgtgcagcaaatgtcagcacctggttatgaatgatgtttaacgacagaagtgtggtcacagcgaattcatcacccttggaatttgaggcatgctctgtccagcgcagtgtcagggctgagtggggcccccaaaatccatatactggatcctcaactcccaggacctcagagtgggactggatttggaggtggggcctttaaggaggtgattacagtaaaagggagtcactggggtggccctgtccagtctgactcccaagaaggagatgaggacccagagcgcacagaggggccctgggagggtgggaggagccattgactgccagccaggggggtcccggaggccctggccccgcagcacctggacagtgggccccaccctgcaggactgtgggagaatcgatgtgggacgccaagcccccgttcatggtcctccgtcccagctgccgagcagactaatctgaccgcaaggtttgggccacactgggctgggctcggctcgttattggtcagcccttgggcactgtgagttcagccagaactgcctcccacatcaaccatctccctgtaaacacggaccctcggacagccctttcctgaggcataatcccacccttcaaggtagagccctcaagggcgttcccacctcagcaactcccccagccatcacaccaaacatagcccagaccaaagccagacgctctctgagctccaaggaccggcttgggcccacaccttcccaccatgtttacccctgctggtgtcatctgttcagttccagccagaccacagggcctctcaccttccctcccactgtggctgccatcctctggcctggaccgtgtcacccttccaccctcctggctgagcttgcccaccttcttggaacgctctcacaagcccccctgccagaaggctctcctctggaccacctgaccccacaggcccctccgctgctcccctggccacacctctccgtgaggctgtccatctgtggcagccgtggtgtgggtgaatttcatcatgctgacactcctccacacctgctccgtgcctggcagtcatggtccaggggctggatgcccagggtaaagtggggaagaaggtgataggcacccagccacatgctccgtgcccacagatccctggggccagccaagctgcaggtgccctccctcaggtgagagtccactcggccttgtgattcctacagaatagcccttctctccttctcctgtgtctctccaggggccagggaggagatgctaggggcagagagccaaggtggggtctcagcctgggagcgatggcactgctgtggtttcaatgtctgtgttcctccgaaatccatgttgaaacttaatccccagcgcaacagtgttcagaggtgaggccttcgggagggttaggccgtgagggttccaccgtcaagggtaggattagagccttacgaaagggctgtctgactggccaggccccttttgccctcctgccttctgctatgagaggacacagtaacaaggggaccaccttggaagcagagagcagtcctcgccaaacaccaaacctgccggggccctggtttcagacttcccagactccagagctgtgagcagtacatttctgctccttatgagtcacccagtcacaggtaccttcttacagcagcacaaaggggccacggcagcctgggaccgcccagccccaccatgcttcctgcagatgcgagcagccagggtgccagccacacagggtgcttctcgcttttaattttactttttatttcaaaacaatttcaaatacaccaaaaagttgcaagaatagtacaaagagtacgtattcttcacctagagacctattcaggttttaccaactgtcccaataatgccttttttctttctttctttttttttttttttgagaaggaatctcactctgtcgcccaggctggagtgcagtggtgcgatctcagctcactgcaagctccgcctcccaggttcaagtgattctcctgcctcagcctctcgagtaactggtactacagacatgtgccaccacatctggctaatttttgtatttgtagtagagacgtggtttcaccatgttggttggccaggctggtgtcgaactcctgacctcaagtgatctgtccacctcggcctcccaaagtgctgggattacagggattataagacttcatgctcatcctcaacctggaacagtcctcagtctttccttgacttctaagaccttgactctgtggaaaagagaaatactgtcagtttcggtttatttcatggttagacgcaggttgtcggtggagggagctggttcatctgggttgggaggtgggcgtaccgatgtgtccactccagggggcattgaccttgaccatctggggaacgtggcgtctgcaggggtctccactggaaattccttccttctctgtcattcatgcacatttcgtggggacactcagaggtgatgtaaaaccccattcttcactccacgttcaccaccaggtttggcactgactgatgttcttgttgcctgaattaattgtgacagcaacggctgctggggggaattcctcatgcggtcacttatcaactggaattctaccggggtgggtgagctttctttttcccccatttattaattaagtatattgacatctatatagaaccacagagtctcattttatgcatgggccatcatctgttcctgtccttcttcagtttattttgttgttaagtttgtctcagcgggggacccttcaggctggcatctgtgtcttttccatccatgtttcctggcattttcttactttgcagacgcacgcacacacacatttcatctgcagattcttctacctatttgtattgggaaccctgcattccggtgctaccgaggtgaatctaataccgtgtgcgccgctgtggctgccgtcctctctacatcgcacctcccgtcagccccgccggcctccctgcatgtgctcacgtgctcggtctcctgtgcgtaaccggtcttctgacccttggggctcagaccggcctagaggctgcgtcccctaaagctgcccgctgtcctgctccaatacctcctccatggagcccagacccccaccgggcaccctccctgcctgcgtgggaaggagtgggtctttctgaattcagctttctctgaaatgagggtggagtctctggtggaaggggggccctcgctctgccgcaccctctgcgggagggagcggtgaggtgcaggctctgctggtcctagggcagctgtgctcaggccaggcaacagaggaaggggtgcctacagaggctgcagggtacctcaggccacccttgctgccccatcctcaggtgacatggggaggacctcgcagggagcctggctggtccactgtccctcctgcttcatctctcactcaggccctaggactctgccccagccaaagctagcgtgggcgattcatggctcgccgctgcggcagctgagcaccatcagaagtgaccccatttgtgactgtcttggcctgagaatgttccacgagtgagaacgtgcccctccctgcagccagtgtcccagactcccccgcagcccaggcaggggctgggctcgggcgctgacgcaacaaggagagcgcttgtctccgggcagccaggcggccagacagccggtccacttagcttcgctgctgcggccacagctgcccatggcacacaaagggcccttgttcccacccagcatgtgctcccggcgcccccccaccgacctctcccggacatgattaggtgtgggaactattttccttagggctgcatttgacatttgccgttcatttgggaggaggcgtctgaaccgaaggagccctcgccagcctcccctcccattcccatctcagtgcaggaggtttaggagcaggcggccctgacatgcctgtgaccccagacgggcctgtgcaacccaggccttcgttgccttccactcagaacaggagagtctggcccaggagggcggcgggcagagaggacgagaggaagacggagccggggtgcacaagcacacacatgcgtgcacgtgcaaatacacatcagggacacacgtgcacagacatgctccaggaacatgaacgcatgtgcaaatacacaccaggaacacacgtgcacagacacactccaggaatatgcatacttgtgcaaatacacaccaggaacacacgtgcacagacacactccaggaatatgcacgcatgtgcaaatacacaccagaaacacacgtgcacagacacactccaggaatatgcatacttgtgcaaatacacagcgggaacacacgtgcacagacacactccaggaatatgcatgcatgtgcaaatacacagcgggaacacacgtgcacagacacactccaggaatatgcatacttgtgcaaatacacaccgggaacacacgtgcacagacacactccaggaatatgcatacttgtgcaaatacacaccagtaacacgtgcacagacacactccaggaatatgcatgcatgtgcaaatacacaccgggaacacacatacacagacacactccaggaatatgcatgaacaatacaccaggaacatacgtgtacagacacactccagaacacacacagatggcagatgtgcaaatacacaccaggaatgcacacgtagaaatgcacaaaaagacgaaatgctctgtgtggaacagtgaagacacgcaacccattccctaaggacatttactcacatgttcacgcccacagcccagccggccagccccagcagagctgcggcctcatgacagcaggggcttgctgggcagtgggacttcagggtctatctctcacctgccccactcacgggctgcccgtgccctactctcgtcctcgcacagtgggacccaagatgcatttgggcacagcaggagggaatgtcctggtgtgtgaggaatggcagccggtgggagctccgtgaactgcctggccacaaacccgcactgggagcattgttgaaactgccctcaaaaccacagttgagagccgggtgggccctgggagtttacagtgtgctggggcagtggggagagcctctgataaacactggaggagattgcaaaatcgtgggtctgaaatgtggagccgaagttcagttgtaggctggggcctccggcggggccagagtacctggggcagtgcctggcaggctgggctgggcctggcgctctgttcttcctgagcccaggctgccatctgcagacaactgctgcctgcctgctgtctcgtgccgctggggggcagaaagggtcctgtggcaccgtgggcagggtggcggctgatcccctcttcccgcaagggacccttttcctgaagtccacggcactggtgccccccagcagccttggccctcctccagcttagccgcccctacatcgtgtttgacccctggagcctgtggatgggaccctgtctaagagggagtcttgtgggtgaggtgaggtcaggctcttgaggcaaggagagggtctggtctattggaggggggacctagatgacatctcaagggtccttaggagagagaagagaacagggcgcaatccagccaagggactccggggcttcccagagctggaggaggcaggaaggatccgcctggcagcccctggcgccccctggagggaggtggccccgtgacactttcctttcagactccggcctcggacctggagagcacatttctgatgctgaaagcaccaagctcatgacactttgttaccacagccccaggacacatgcagactctcaccttgacccaaaggagcgtattttattcaaatttcacaaaactgaggactaggggacattccagctgctcagagaaaagctcgtctgacttatctgtaggaagatgagttaccagtgatgagtcacggcttttaccatttccaaaaatacctgttttttcctgaacttttagttctctctaccctgatcagaaaattaaaaacaaaacaacaacacttcgtggaccagccccgacagctgccgttctgttttctccaggccagcgctgagcagagccgaggtggggagacctgggcagtgccagggctggccctgctgctgcttcctggcttctggacggggcttcctcttggctcagggccggggaagcccagcctctgaacaaagttagggtcaatatctgcatccctgccctggccaggcaccgcatctcacatgggaaagacctatttgtccttaaatgggagaggagacggaatcccagaagggggcagtgacccaactaaggtcaaagggctgcccccgggaaaccagccgcttctcatccccaaggcagcctgcccgccctggagagcccgggatccccagatactgtcgacgaaaggggcagggcctgtgagcgacgctggccttaggcctggactgcaaggggtggccctggctagagatgggactgcacacccttccaggcaccatcctgggtaatggagacactctgggaacacgtatgtgcacatgcacatgcttacacacacatgcacactcatgcaattacacatgcatacacagccatgtgcacacacacatccatacacacatccatacacatgaacacacatccacacacatccatacacgggtgcacacacttgcagtcacacatgcacacacagccatgtgcacacacatccacacgtgtacacacatgcaaaacatgcatatgcagtcatgtgcccacacatgtgcacacacatatacacacatacaagcccccacacactcagcatgtccacaggtggaggtgggtggggagggtgttctgggggagctgggcaggtgggggcagctctaggatggcggtgcccgagctcagcccggcctctgcttcctaggtgccaccctaaggaccaaatccccagaagccaggtgaggacatcggagaaccgggctgctccgtagcagacccatagaccctgatgcatggctgggcaccctggcctgtcccagagcctgcagaagggcggaagcctagacaaactcatccgcttctgctgtcccaagatgactttcagcccaggtcagcccaggtaagtccgtgtccaccagctgcccggtctgctctggaggcagaggcttgcagttccgggagacagacccgccacctggcagaggttgtgggaggcttgtcaccgttggttggccccctggcacctgcctctcctcccagggagcagggatgagtcagctccctggcccttggacttaggaagcctcagatggctctgagaaggctcctccagggcttcagaggcacccttagaggcttagagtctcctgaagatgcgagataggcctttgcccaccagcccatcacagagcagtggctcatgcctgtaatcccagcagtttgggaggctgaggcgggcggatcacctgaggtcaggtgttcgagaccagcctgaccaacatggtgaaaccccatctctactaaaaatacaaaagttagccagacatggtggcaggtgcctgtaatcccagctacttgggaggctaaagcaggagaatcgctggaacttgggaggtggaggttgtagtgagcagagatcacgccattgcactccagcctgggcgacaagagcaaaacttcatctcaaaacaaacaaacaaaaaggtagaggaagggagaattatctctctgcctgactgcttgagaggtggcaccttctcctgtcctccagctgggacttgaacccacagccccactcatgtgcaggccttcaactcaaactggaaccacaacaccggctctcctaggtctctggcttgcagatggcagatcgtgaggcttttcagcttccaaaatcatgtgagccaactcctcagaataaacttctctctttctctcatgtaaccacacacatataaacatgcatgtgcgtgttttcctgccctctcatctctgctccgttgacttatttcgctattcctgcttcatttactctagttttcttaggcatgtccattaacgcagcttgtccttcttcgctttttaaaatagactttactttttagggaaggtttaggttcacagtaaaatcaagcaggcagtacagagttcccatgcaccctctgctccaccacaaacatgcagcctccctcaccatcaacacccacaccagagtggcccaggaaaacgtgtacacatgtgtacacacacacacacacacacacacacacacacacagcatgtccacaggtggaggtgtgtggggaggatgttccgggcccagtgacagcacgaacacatgaacccatccatccatccatccatccatccatccattcatccatccatccatccatccaccaatcctcttggctctgcttctctggagagcactgtgcacacagatgcacacagatatcttcacttggtcttcaaccccggagcacaggcagtgcaatggactaaagatagccttttcaacaaatggtgctggaacaactggacatccacatgcagaaaaaacaaatgaatctagacacaaaccataaaaccttcataaaaattaactcacaatttatcacagacctaaatgtcaaatgcaaaactataaaactcctagaaggtatcgcaagagaaaatctagatgacttaggatttggtgatgtttttaaagtacaacatcaaaggctgatccatgaaaaaatatcagtgataagctggacctcattaaaattaaaaccctctgccctgcaaaagacaaagtcaaaagaatgggaagatgagccacaaactgaaagaaagtgtttgcaaaatacacatctgataaaggactgttatccaaaatatataaagaactcttaaaactcaacagtaagaaaacaaacaacccgattaaaaaatgggcaaaagacctgaacagacacttcattggagaagatgcacagatggcaaagaagcacatgtaaagattgtaagaaatgcacctaaaacaacaatgagatgccaccacacacctgttaggaagtcagattccagaacactgaccactgaatgctggtgagggtgtggagcaaagtttggcattcactcatcactggtgggaatgcagaacagcacagctactttggaagccagtttgcagtttcttacaaaactaaatgtgttcttactatacattctagcaattacatttattggcatttacccaaaggaagtgaacatttatttccatacaatcacctccatgcagatgtttatagaagctttattcataattgccagaacttggaagcaaccaagatgtccttcagtaggtgaaaggggtaggtggaccgtggcacacccagacagtggaatatgatgcagtgctagaaagaaatgtgctgtcaagcagccaggagaaaacatgcaggagccttgactatgtattactacgtgaaagaagccatgcagagaagtctacagacggtgtgattctaaccatgtgacactctggaaaaggcaatatcgtggtcgccagcgctcaggaaggagggacagacaggcagagcccaggggatcttcagggcgcagaaccgctctgtgtgggactgcagtggtggatccatgccattgcacatctgtccaaacccacggcatgaagagcaccaagagcgagccctcgtgtggaccagggtctttgggtgctgacaatgtggccacgcaggctcatggcttgtaataaatgggccgctccggtgtgggtgttgatggtgagggaggctgcatgtttgtggtggggcagagggtgcatgggaactctgtaccgcctgctcgattttactgtgaacctaaaccttccctaaaaaataaagtctatttaaaaaaaaactaagaaggacaagctgcgttaatagacatgcataagaaagcgagagtaaatgaagcaggaatagagaaataaaccagcggagtggagttgagagggcaggaaaagttccacgcaactgtgggagtcccattcgtgataagggcggtttctcaaatgaggggtatgcgatggactccccagtacatgtgaagtcagaccctcgcaagactgaaccaagaagaagttgaatcctgaatagaccaataacaagttctgaaattgaggtagtaataaatagccattcctcccattcctcacttcattcccaaaaacatgtttcacagacagtaaaagcctaaacaggaagggaaactataagatatcagaggatgggagttcactcatgatttgggtttctgcttatctgttgttggtgtataggaatgcttgtgatttctgcacgttgattttgtgtcctgagactttgctaaagttgtttatcagcttaagaagcttttgggctgagacgatagggttttctacatacaggatcatgtcatctgcaaacaaagacaatttgacttcctctcttcctatttgaaaccctttatttctttttctcgcctgattgccctggagtcagaacttccaacactatgttgggaaagagtggtgagagagggcatccctgtcttgtgctggttttcaatgggaatgcttccagcttttgcccattcagtatgatattgcccatgggtttgtcataaatggctcttactatttcaaggtatgttcctttaatacctagtttattgagagtttttaacacgaagggtgttgaattttatgaaaggccctttctgcatctattgagataatcatgtggtttttgtcattggttctgtttatgtgatggattacgtttattgacttgtgtatgttgaaccagccttgcatcccagggatgaagctgacttgatcgtggtggataagctttttgatgtgctgctggatttggttcgcctgtgttttatagaggattttcacattggtgttcatcagggatattggcctgaagttttcttttttgttgttgtgtctctgccaggttttgctatcaggatgatgctggtctcataaaatgagttagggaggagtctctccttttcaattatttggaatagtttcagaagaaacggtaccagctcgtcttcatacttctgatagaattcagctgtaaatccatctggacctgggcttttttaggttggcaggccatttattactgcctcaattttagaacttgttattggtctattcagggattcaacttcttggttcagtcttgggaggatgtatgtgcccaggaatttatccatttcttctagattttccagtttatttgcatagagttcaaaataactatgaatacagctaacaagggaagtgaaggacctgttcaaggagaactacaaactgctgctcaaggaaaccagagaggacacaagcagatggaaaaacattccacgctcatggatagaaagaatcaatgttatgaaaatggccatactgctcaaagcaatttatagattcaatgctattcccattaaactaccattgacattcttcacagaattagaaaaaactatttaaaaatccatacggaaccaaaaaagagctctcatagctaagacaatcttaagcaaaaataacaaagctggaggcatcatgctacctgacttcaaaatatactacaaggccacagtaaccaaaacagcatggtactggtacaaaaacagacacatagaccaatggaacagaatagagaactcagaaataacaccatatgtctacaaccatctggtcttcgacaagccaaacaaaaacacgcaatggggaaaggatttcctagttaataaatggtgctgggagaactggctagccatatgcagaaaattgaaactggacaccttccttacaccttatgcaaaaattaactcaaagtggattaaagccttaaatgtaaaacccaaaactataaaaaccctagaagaaaatctaggcaatgccattcaggacatgggcacaggcaaagattttatgatgaaaatgccaaaagcaatggcaacaaaagcaaaaactgacaaatgggatctaaataaactaaagagcttctgcacagcaaacgaaactatcattagagtgaacagacaacctacagaatgggagaacattttttgcaatctgtttgtctgacaaaggtttaacacttagaatctacaaggaacttaagcaaatttacaagagaaaaacaaacaaccccattaaaaagtgcacaaaggatatgaacagacacttctcaaaaaaagacatacatgcagccaacaaatgcatgaaaaaaggcttaacatcgctggtcattagagaaatgcaaatcaaaaccacaatgagttctcatgccagtcagaatggtaattatgaaaaagtcaggaaacagcacatgctggcaaggctgtggagaaataggaacacttttacactgccggtgggaatgtaaattagttcaaccattgtggaagacagtgtggtgattcctccaagattgagaaccagaaataccatttgagaagctatcccataactgggtatatacccaaaggaatataaattattataaagatacatgcacacgtatgttcactgcagcactattcacaatagcaaagacatggaatcaacccaaatgcccatcagtgatagactggataaagaaaatgtggtacatatagaccatggaatactatgcagctataaaaaggaacgagatcacgtcctttgcagggacatggatgaagctgaaagccattatcctctgcaaactaacaaaggaacagaaaaccaaacaccgcatgttcacttataagtgggagctgaacaatgaaaacatacggacacagggtggagaacaacacacaccaggtcctgttgggggagggtgggggtggagagcattagggaaaagagctaatgtgtgctgggcttcatacctaggtgatgggttgataggtgcggcaaaccaccatgggacatgtttacccatgtaacacacctgcacatatacaccggaacttaaaaagatattagaggagaacacggaccttagaatagcaactctcccaaacaaagacgcagccccacgtggagcagaggaggagaagataaagtggactgcagcagaagctaacacaactttatcaccaaagaccccagaaaccaagtcagaaggccagtggtggacatgggaatgatagatgctaaagaatgctcagcttatagtagccagagaaaatcctggcaaaggtggaaagtgtgaaggcaccaggcatcagtggcacgcgagtgtgatctccggaggcgggggaggtgggggaggccggggcgtgaggggctgtggttatcaaagggaaccggctctcttaggggggctcttttactttctctgttactcagagcagggaccagccagctctgtcgaggcctggaaagtaatggatttaagctttgcggccacatggtccgtgcacccactctgctctgtccatgtttttctttgtatttttctccaagcatttaaacacgtgcaaaccatccttagcccaaatgcagccaaaagctcctgtgggtggagtttactgtcttacgcccgggagcggctcaaagtgtgccccaaccagcagcctgggcacccttggtgctgtaggaatgcaggtgccctggcccacccggaccctggtgtggggggggggcccacccaggcctctaagaagccgtctaagggtgccgcccaggtctttgagaagggcagccttggccaaatggtcatacctgtacacgggccgggccgcacgacttctttagagctggggccaatggaagccccctgagtgctcctcaacaggggcctggaaccccggctcttgttaaaatgcagattctgactcagcaggtctgggctggagcctgggactctgcatttctacccagcgcccaggggtgcccaggctgcttctgggacctcacttcctggccgtggtaccttcacagcaccagccactagcgtggaacttgcactgcagcttccgacagctgcagaaatgggcatgtaggtggggtgggggctgggacctgagcttgttgtctgtccctccctttctcactggggcattgaggacacacatgaaagaggcgagggggcgagaaacaatgctggcatctccatcctgggaagaggctgggaagagtgactcagtcacaaaaaataaacaacaccagcttttgtcttagaaattcaccctgtttgacttcatggattcccatcggtctgcaaggacccgggttagcctgggatcctcttctgtggctttggtgagcagatccccactccgcctcctcttaggacgcctagtcctgccgtgattggccttgggggcccgggggtgacctcaagtgtccccagccaggccgcccaccccaatctcaagaagaaacagggtgggaggaagcagggcaatctcagcacccatggcagaggaggccacggtggaggaggccacgcctggctcagcctggagttggggacgtgaggaggggctgagacggtcaccccaagacccccacttcaggccagctcagagggtccagggtgggggtacttgggagaaggcttgtgagggggtccctgtggccttcagggaatcccaccccatttggatgttacctccaggctggtcctaggggctgggcacccacaggccagaggccaaggaaccaggaagtgccccccgacatgcgcttggggagccccaagctcctccactcatgaaaaatcgaacccccccaccacctccaggtcagtcaccgtctccaggacgtgggtggctgcccccactcctctggcccccacttctctggctgagaaactccacgtgcaccaccccaggggcttcaggctcctccagaggggctccattccccttcctgccccgtcccctgatgttccttccccaccaagccctgggccatcttcccacagcctgggactagccttctggtcacctgcagtggctgccaggtgggctggggtgggggctgtccctgggtgcccaggcctctcggggacccctgcatgcactgggcatgacatggagggtgcctttccccacccagggcccaatgaacctggaggtcacagccccgaccccggcccagctccagggtgaggccgggcccctctggagccccactctggcctcctctcctgcccccacccccatcctgccccttcctgccctggccctgtgtctatctgctctgcaggccgtgctctgggagccttgaggccctgcgtccaccccctggcagttcttctaggctgggctccaggattggggcctgttacctggaggtggactggcctccctgctgtcaggcagggccattgggatgggcgtggtcacaactgctgcagacctgggtctgggaggacaagcgccttccttcccagcggcgaggttttccatgactcacttcagagccaggccaaggtcaaagggcaccggacgccggtccctcctcaggcagagggagacaggaagggacacccaggccccaagggggaagggctgctgcagtcgggacagggagcatgtgtgagcgtgagtgagggcgtgaggcctgtgtgcaggcagcaggtcaggtggacaggccggaggaatggccctgactccacagggaccccaccagacagctgattggcaatgccgagagatgctgtgctgctggtccttcctgcagggtcgtggaggagctcggccacttgtgaagctggacgggagaggacagtggtggcagccagaccggactcacatgtattccatcaacacagttgaaatgttttatgaccgcatggcagtatgttcgggtgagggtcctgtatgttttacacgacacatgtttaaacggcattctgtgagcccagaggctttgcctgccggccagcaaggtgcagtagaaaaggttgagggtcctagtctggtcccgtgtgggcactgcctgaccaggtggggtcagcaccaggatgagagccccagcctgcacctgccagccgcggtgccacgtccttcctccacttcccttcccgcagccctgggaaaccccagcccagtgggctggcaggaaggaggccggtgtgcatgtgcctgactggcccctggttggcgccaggcactctctgcaggaccctggcgccagcccgtcggaagacaaagcctggaggctattcttggagcatgtgtcacaaccccaggagcgccttataaggctctgtccaggctcaagatgctctctgagcgccagggtctgccctgacaatggcctgcagctggacgtggggccacacggccacctggctgctcctggcccgtttcgccctggggtccagactccctcctgtttcctgtgagtctcccctaagatttgaaggaatttgaccaacaccttggcctggggggacctgggagagaagagggggatggagctcagagctggccctcggcagccttacatggtgatcgtctggtcccgctaagccgcgccttggaggctctgctgtgggagcctagcaagtgtttatttttagaagctcttactccaacaccagggctgggcccaaataacacatgtattttagtggttcaaaaatacaagtttatggtaagtcattcgatgtggagaaagtgccaaaccagtgagtgcagtgagaggtttcctggggccacgggcctcctcctgcaggtggcccaggtgcacttgactagctggagcgtgtggctataatcccaggaaatgtatccctcctctcggagggactcgggctcaggagcacacactgaagatgggaggccaggacccagagtgtgaccgtcctggccctaggagggcagggcagcctttggtttgctatcagagcctcgaggcctggcactgagcccggcgtcccctggagctccctgctgcattggatcagcagctggcagacaggtgggccagcgggccgagttttccccaggactgggtgaaggaggcattgctaggaagtccccagatgcagcaggcacccagaacagccggccctccctgtcctgggagaggcatctaccccactggaggctgagccctcgccccaccaccgtggcccctgctccacatcaccatcaccagtggcttgttagagatgcggatggaccctcagtccccatcacacgggtggtggatctcataaaacctcccagaccaggctctgcagctgcggggctcagctggtggctctcgctcagggactcctgaagggcacccaagtggctcagcgcagggagggcaggaagggcaggcggctggggtggggctcagcttgggctgttggctgaggccaccccacgtggccacactggggctttgcagagccggcagcagctgggatccgagggggagcatccccagagacccaggcgggtgctgccaggccccttaagatgtaaccctgggaaccccagaaagtctgtctcacttctgctggttgagcaagtcagatttgaggagacgggactcagacgccgtgtgtgggtggggagtcatggccccctggtgtgtggatggggagtcatggccccctcgtgtgtgggtgggggctcagggtcccctcgtgtgtgggtgggggtcagggtcccctcgtgtgcatcctggggtcagggtcccctcgtgtgtgggtgggggtcagggtcccctcgtgtgcatcctggggtcagggtcccctcatgtgtgggtggggatcaaggtcccctcatgtgtacgtggggggtcagggtcccctcatgtgcatcctggggtcagggtcccctcgtgtgcatcctggggttgcacctccagaacccacatctgcacttagtcagattctggcttctctgtggctcattgaagggggagaagtcggggggctggtttcgggggaagctcacgcccctgctgagcctcaggcggtggccaaggtcctgcccacaggccagccggggagcgggcaggcggaccaggggtcagcaaactgctctgtaatgagccagagaatgaatattttaggctttttttggccagtcacaactcaactctgccactgtggattctaacctcatggcatctgtgtcacacaaggcgatgtctgccgattcctgaggttaggacggagacaccctagggggcctggttcagccaccacagccacctccaaataacgctctggggtagcgggggctggacgacggagcctcccatccccatcccgccccataacgacatcactgtcccattacttatccccacgccatgaccacccagcacaattaggaatcggaaaacgggccaggcgccgtggctcatgcctgtaatcccagcactttgggaggctgaggcgggtggatcacctgaggtcaggagtttgagaccaccatggccaaatggtgaaaccccatctctgctaaaaaatgcaaaaattagctgggtgtggtggtgggtgcctgtaatcccagctactcgggaggctgaggcacgagaatctcttgaacctgagaggcagaggttgtgacgagcagagattgagccactgtactccagcctaggtgacggaacaagactctgtcccccctccccgccccccaaaaagggtaagaaagcagaaggctctctctgtccttcctttccccttctctgacactcctccttgctgtggacctgagtttctgacctgtcccatgccggcagccccaacaaggcggccagacctcagccccagcctggctctgagagccacacttcctagcgggcaaggagggctgttggccgaggcaggctggctcctgggacagagggtctcctgggacggccccttcctgcacctgcctaccccatcctgcacgctcttccctctacggcttctgaagagctagatctggggtatgtctggtgtaaacaggatagagttgggttttgctgggtgagcccatacagccacttttatcttcacgggtgagtggaagctgacggggccacaccagctcagccgcgctgttctgtttactgtggtctctccctgaatggccgctttggctttttgaattcatttatgcagatttgtacgtttcctcacggctcatttgtgctcatatgtatgatatttgtgcgtacacaacacccacctcctcttcctcacgtgggttctcctgtcccagccccgccctcctcttcctcgcgtgggttctgccctcccggtcccgcccctcctccccctgctccgtgtttagtcctcaggtcaaggtcacggaccagaccctgtcccctgaacccaccctcccctcaggcagggactggactcttcggatctctgtgtggtgctctctgctcatggcagtccctctgatgccacctctgggctggccgagcctcacagcatctggcggtgccccaggatggagtcgggggcagggcccgagttcccccttgctgagctgtttcccaatccctgaggcgttcaggacagcgtggggggaaagccacgcccaccgtctcgcctccacccaggtcctgtcctgcacggggctctcgggaggcctcagcattctccttgaagatgcccaaactttaccaacccctgtgcccagccctggcccacacccacggaagcagggaactgaccccatcccagccagagcgggtactccaggcgggcccagaacctggagctggtgccaccaaactcgcatgaagagtctggctgtctgtcaggaggaggcgtctgggcgccccctgatgccaggacggctctgcccattgtctgcgtccctgactcgagagcttgagcccggggtgggcctccagaggctggtgctctgtgccagccatacgggcacccatgtagctgcccctctgtcttcttgccaagctcgggaccctccccacctgggacaaagtcacctccaacctctgcgcttcactcatcaaaatcacctctgcttaataaaccttgaaggtctcaggtgctgccggcatgggaggctcctgcctgcaggcctggggccaggccctggaaagcgcttagggagggctgggctggcagctgcacaagggcagcctcgtgggatgctggtcaagcagaaaatccccagggatgtgagctggttttttgtgggaactctgaaagtgaaaacatcaactccccgaactgggaggccaccagccccagagggccctccccaagcccccgcggggtcccagccagggccatggatgtgggcaggcctacagctcactggccagctcccctctgcttcctcccgggccacagcattcctggggccaccagggtctcattgtccctcacctggccagggtctccgtgcccctcacctcctctttgctggaacattccacacattccttcccccgacagggcagggttcctgggctgaggctggggcaggtgtgctgggcctggagctctccctaaggtctccagctgatgtgggctcctgggatctgcaccgtctcccctgggccaccctcgctgggctcatcctaaagaagcctcctccgcctgcccctcctccctcccaaccctcagcctccccaccccccggcacccaccatgagctgagcctgctgtgaggaggggggcagccccaggaccccacacaggtggggctcagcagcttccagtgagaaacccatgcaaactgcctggggagttccggcagcgatgggaaaaggcactgtcctacccagggggctgagaaggctgagccttgaatgaatggcagtgagcagacatcagtggaggtggacaggacactgaggacagagtcaccctcccagggagtcagaaatgaggggtgcaggggagtgggagggaggtgagggggtaaggtggggtgaaggatgtggaggggtctcctgggctctggcctgagctaggaaggggcagggctgggtcaggaagctgggtctgggcgctgtggtgcatcctgggtgactgtgggacgctggaggaggaagagttcccgcatttgcgtctgggttgggactgtctaggcgaaagctcagtgtgaattgtctgctgtgttcccggtgtccaaggcccccaggggctgggtgagtcccaagagggatgtaggccgagcagagttgggcactgaacccccaggctccccttgttgaccacccagccagaaattcccagggcagaaggtggggtctgctcacccatggggcaggcggtctggggatgtctgacgcctgggcctctggccagcaggatgtggacagaagtggccgctgggtggggctgagtgcagagggcagtgcccatctgcagcgtggctatgcgccccacagagtgtgggcctgaagcggggaaaggacccccctcaacacctcaggccggcgggtcccattccagctgccacccggactcagcctgaggcctcctcacctgcaccagcttaacttggatccccagccaccacggcaccatagcgcccgattcccatcccggtgcccctgcttcgggctcactcacatcccagagagtcggtgccagcagggcaggggacagatcacgtggggctcctgggggacgaacagtcgtgggaggcagggctgcaaggagcctgtgcggaggggcctcgaggctggggtgcagggaagaccccaaggaggaactgtgcggggaggggcgagtgccctgcgggtgggggacccctgcccagcgggacagccctgagaagctggggcccagcgtggcaggcaggcacatccttcccaccccagcttcccccatcgcccacgacacccgtccacacctgtggcccagccacctacaccccggcaagtcccaccggcctgttccactgggaaaacccgcacacccccttatctgcaggacactggcgcccaagcttgtgggaggcctgagccgtgggcagagtgggggagggagggagccactggttcccgggagagcttcctctccccaacccccacaacaggtggcaatacctgatccccaggagaaggtgcttccttctgctacccggcctcactttcccaccctgggattcccgagcagcctcagtgagcagcagactccaggctgggtccccatgaagcgggggactgctatgcctgcagcccaggagcaaggtgcacagtgcacccgggggtgtctccaacctggttctacctggctccacgggcaacggtcccagtgggctgtggtccctccacgagctgtggttctgtgggctgtggtttcgtgggctgtggtccctgtgggctgtgctgtggctctcatctgccccccaaggggcctggctggacctctgtctcctctgacgctgcacttgtctgtgtctcggccttggctgccgctcccctgccatgcgggctcgtcccacacggcccctgccttgaagacatcttcacatggagttggcaaagccccgggaggctctgggcccttgtatcggggttgggggcgttaaccagccccccgggaggctctgggcccttgtatcagggttggggggttaaccagccccctgggaggctctgggcccactctgtttctaactgagtcagagccaagattagaaaaggctgaaaccaccccctacaacccagggccctggcgcctttgccagctgtttctaatcagtccgtggtgtcagccacatggtgttgccccaggatccccgaagccaagtcagccttcactgtggaggagcagggcggccttgaaaggagctctgtcctccatggggcctcggccaggaaggcacaaaggggctttgtccccagcccaagcctggaagaccctcctccagctgtggccctcgggactgtctggccggctcgtccttgggggttgcatctccccaggctgcagcatgggccccagtcagccgctgaggtgcagaggatgagaaattccacagaaaagcatgtacggacaccttggggaagcttccggaagaatgcatgcaggaggctagccacatgcccagggtgggactcgggtccagttccctgctcctgcccccacagcatcctcaaagcactgaaacatgagcgcatgggccgtggggacgcactgtcggaggtcactgcctgacccggtgcccagtgtctgccctggcccgtacggtcccatcgatctgccccagacgtgctgcagccgtgtgttcagggccccaggtccccctaactcccgggcttggcttcccccgataccacccacgctggtcatctcttagtcaccctgacaatggccactgctcacaggacagtcccacgctctgtggctgggtgtggaggcccccactggcccttcctgatacctctgccccctcttttctcctctctccctcctgtcccacccctggctgcagttgactctaacatttcactggcattcaccccggcacagctcacaggctgcattgctacctctgggctttgctgcctggtgaggtgtgggcatccttcaaagcccagttccccaatcacctcttccgggaagcctcccctgactgcctgggtggcaatgactcctccccttctgtgtgcaatggaaacaggtggcctgaggagtcaaacggtgcaaaccctgccccactctgtttgggaagcacctgctgtgtggcaggcgctgcgcttggtgctggggatagaccatggggaagaaacacacagaacctgccctgctctcaaggaacaggccctgggggcggccaggggcagagacccaaggcagacacccacacagtggcgtaatgacagtgcttatggtggggacctggctgcacagcaggtcagcaaggggatgttcaggtgacactgggggcacggagacccaggggagagtggattgacagaggggacgctgggcaaatgtcccgaggctgaggtggagttgcgggaaggaggaggctgccgggcagaggcgcagagagctttgcaggtgttggcagagaccagcaggccctgcgaggcctggggtgtgtcctcagctgggagggccatagaaggatctgggcttgcagatgctggtgcagactggaggcctggggtgtgagagtccaggcggggctcctgccaacacccaggggagtgggcctgggccaggtggaccgggagctggcacggtggtcaggtgcttggaggctgcgtgccacgctggggacctggaggtgtgtgaggaggtgtctgttgctcctggggctgccgcctgcagggctgggtgtgcagcagtgcggggcaatgaagtgggcgggttctgggatggtggacgttccctttgttgggaacgtgttggtgccaagctgccatttgagtttggctctgaggggtctgggcaggggacacacagggaatcacacaggatggagtgagttcccagggacccagggtggcttggcctgagaacagctcccactcccagatgtgtgggaagccctcggcaccaagcctcagcctctccatctgtgaaatggagacaacgtcactggacttgcaggctgtccatgagggtgatgcgatcagaaagggtggagttcctgaacgccccggggtcggggtctcacagcaggagcttagctggtgtcggcatctcctggacccgtcctcagctccgagcgcccagtcctgccacctgtgtccaagtctgcactgtgcccacgaggccctcaaggccgcagacagccccacacttctcggacgccgccccagcacggtccttgtgtgaggtggacactccttctggacgccgccccagcacggtccttgtgtgaggtggacactccttctggacgccgccccagtacggtccttgtgtgaggtggacactccttctagggaaggagtagtaactcttgggtggtcgggtagttgccatggaaaggggcagtaatgcccaggtattgccgtggcaaccgtaaactgacatggcgcactggagggcgtgcctcatggaaagctacctgtgcccctgccctgtgttagctaggcctcaatgtggtccagtatctgagcaccgcctcctgcctcagatgttcccgtctgtcaccccattaccagggcggcacttcgggtcctttccagccatcattgtcctggcattgccacagtggacactgccacacaggcttgtgtgcttgcgcgtacccaggtcctcacctctctgggataaaccaggcacgtggcggccgccccattttccacccgccagcggtggaggagttgcccagccttgcaggaaaacagctctcatgccagcagcggagcatcctattcaagttttctcagggctgccagcacaaatgctgcatgccgggcggcttcctcagcagaccgttgtttctctgcgtcctggaggctggacgtcccaggtccccgtgtggcaggcccggttcctcccgcagcctctccttggcttgtgggcggcgtctcctccctgggtcctcgcagggccacccctccgtgtgtctgtgtcctccctccccttataaggaccccaggcagactggatcagggcctgccctaaggactgaattttaccttaatcacctctttaaaagctgtctccaaatacagtcaccttctggggtcctggctgttagggctttgatgcatggatttgggggacaccgctcagcccctaacagcccccatcctctgcctgcctttaccatggggctgagcccagccctgcaggagtcccctggtttgatgtctgctgtggccacggcgaccctcaggctgctccagccgcacttgtgcttgtctctgcctggccctggggcttcacctcctgagggggtggagagagagagacctgtccctcccagctctcctggccttgcccactgcagagcccagagggacatcctccaccgtgggcctgggctcaggtgtgctccgcgttctccggcccctcctccaggtgcgctgctcacagcacacgtctccacgtcctggcatcccgggcctccctgggctccgtggccccggagggtgcccctccctcagccagtactgtgggaagagcccggtccctctggggccagatgagcagggcagagtgagcaggtccccctttggtggagattcacgatctccaccccgcccagcagccatcccaggccgcagtctgctgactatccccagctcacacttctcaccagctgacacggtgatctggccgggcacctgcccagggtcccacccgcagaggaacccgcctcttccaggttggttccgggctcctggacggatcacgcgctgttgacatgcagttgtagcttttttcttgtgggtgggagcaatgctcttcccagctccacctggaattccaccagggatgggtgcagcatcctaaccccgccttcccttggagaattcactgctctggacagacgcctggcccaggatttcaaaggcgcatctgttatggaccgggcccccagaggagacgtctttttgccattttgttttctgaccggagggttttttggaggttgccctcccacccaccgggttgctggcagcccagcccgtgctgttttcagtggacccttttgcaaatgtcttcacaggctcccgggaagctgagctgaacagtgacctcagccttgagcaatcccgaggatgtgtttgctgaggaaatcattaaacagggagatgagagcactcaacccccaacatgccaggctctgcgggaggctgcttattcctgtggcctcgggccaggtgccccagcgtttgctgcccttggtagacacttgtctggcctgagccctcgggcaccatacaccgacatggttagggcagccagggtcagcccgggcccctgggagagctgagtggagggaccactggccaagcacagagggtgcagggtgcccaggaccaggcgtcacctgatggtcacctgggggaacctgctcactccgccctgctgccctgctcactgctcgggggcccagccaggccggggaccagggcctcagagtggaggggggtcagggcccagggcctcagggtggaggatggtcaggactcagggcctcagggtgggtggtcagggcccagggcctcagggtgaaggggggtcagggctcagggcctcagggtggaggatggtcaggactcagggcctcagggtggaggatggtcaggactcagggcctcagggtggaggcagtcaggactcagggcctgaggatggagggggtcaggcctcagggcactggacagctgactggcttcttcccaacccttttccttcttttcgcccaacataaccactgggaggtatccacagaagggggctcctcaaacactgcctggtgtcctctgtctcagccccaggggaaaggactcgcacggggcggagtgggaactttgggtgaaactgggcagggggtgctggccaaggcgggggagagggtggactcccatcaggtcaggagctccgaggtgaggcctctgctagggtggagggtctcaagatggggagggaggggttgtgggaaaggggaggggaggtggagccgctccaggagcctcacgggccttcgggatggagccgctgggcgttggcgagaggcttccgtccacggcacagccccgcacgggggcagaggacgggaagggacccagggcagccccgaaccacctcagacttttggaaaatgaactggaaagaaacaagacttcttttgaaaagaagaatgtccttttttattttgactttttgtcatcgatattttttgcgttactcctggttttaaaaagaattgcattaaaataccgcttttctgatgagtgagtttttggaacacccccctgctccctgctttaattttgccctggagaggagcacctcattctactctgggctgtgcatctttggaaggaatgctgagacccccggttcccactgtccccgtgggccataccccgtgagccagcgggaccagctccgaaggcagaaggtcaggccggggtcagcttcagccttggcgggggcagccgctcagcagagggtggcccagggaggccaggctggctaagggcagggccaggaccacccagaatgggaggcccacagcccaccaaggggttgccccgtgggaagacatggggaatgggtctggccctctcagcacgctgtggagtgtggcagagggcgggggtcgtgtcctggaaggaggaggctgagcctccagagagcagcgtcgggctggaagattaggggaatgctgtgtgtacaaggcccagccatgacaagcagtgactgtggttttagccaagagtgggcagtgagggaggggacacacgtggcggatagggtggggggtggcccccacaggacatcaggagggacctaagtgaaggaggaagcgctggcaggccaggcacccaccctcgggggccaactatccagagaggggcagggggagggcagggggagggggctgagagcgggcagaggcagggctggagcaggggctgagagcaggcagtgggagggcagggggaaggggctgagagcaggcagggggaaggggctgagagcgggcagggggagggccggggcaggggctgctgcctcctggaaacgtttcatgttgtccttgcactatttacagtgaggattatttataaaacccaaatcgctttaaagccatttccaggttttacatgaacaaaaatctatttgaaaaaagaaaataataaaataaacatttaaaaatctttcttagaattccctaaatttcagggccgtgtgtgtgcccatgtgtggtatttgtgtgtgtgcgtctgtgcatctgtgtcagtgtgtctgtgtctgtgagtctgtgtgtctgtatctgtgtgtcggtgcatctctgtgtctgtgtgtgtctgtgtctgtgtgcctgtgtgtgtgtctgtcactgtgtgtgtgtgtctgtgtgtctgtgcatctgtgtgtctgtgtgtgtcagtgtgtctgtgtgtgtgtctcagtgtgtctgtatctgtgtgttggtgcatctgtgtgtctgtgtctgtgtctgtgtgcttgggtgtctgtcactgtgcgtccgtgtgtctgtgcatccgtgtgtctctgcatatgtgtgtgtgtgtcagtgtgtctgtatctgtgtgttgtgcatctctatgtctgtgtatgtgtgtcaatgtgtctgtgtgcttgtgtgtctgtcactgtgtctgtgcatccatgtgtctgtgcgtctgtgtgtctgtgcatccgtgtgtctgtgcatatatgtctgtgtacgcacacagctgatcctctgacaccgaggaggagacacagtggggattctgggtctggcaggctctctcctctgcatctctcaagcctcccacaacccccttagtgtccacccatgctgtaagaggagaccatctggagtcccaggtgttttagagactggaaaccagcccacggggcccctggaggaacaaaaaccagctcccagccagcgcatgcacacctgagacacgccctcagccactggcttctgccactgctttactgggtcagccatgagtggggctgaggagcccgccctcccatcaacgtgttgctacctggagagcattgacagacttgggccattcctctccgtggcgggtgcccctgtcttcctgtctacatgagtccaggggccctgtggtgcatgggaacagccaggaggggtggctcagcaggactaagatgagagactatcatgagacccgggcacattcccaccaacagcgggttcctttccgtccccgcatcttccctcaccagcaagcccctgtgcagagcccagactccacaaaggcccatcagtcatcactgtccacatgtgcatccgatgtgtagggtggcggcggggacgaggctcagacagacaagacaccccagggtcagccaggccggcctgtcccacttgagctgggctgagacaccaatgtcacccctcttgaagcccccaaagcttgctctctggccgacagctggcttttgagccagaaggctggtgaccctgttaggatctggcagacccgccagggtggctcccaactcacccacttcccgccctgaggtcctctcctccctccccaccctctggctacatggactctccatcctggaacaccgggcatgacctgactcgcctttgcctcgccgttccctctgcctgcgatgctgtttccccgaccacacaggcctccctggctcctggcctcctccagtcttttctcagggtcttctccgtgaggcccctctgacaaccccgttcacattcctaaccagcacccagcagcctgtctcattgtctcttactggaatgtgtgtttgcacggcagggattttccccctgctgtgtggtgatggatccccagcgtctggaactgcttccaatgcgaaggagctcggaagccttcagtgtggggatgagtgagtgaggcaggcggctgccggtgcggggaagacagttagggttgttcttacatgatagtttttaaagatgccatcttttcaaccaagaaattctacttctaggcccctgccctggagaaacaatgaactggtggggaagagtttcatcatttcaaatgctcggccatggtttctgtgacctgtgggtctggttcctccatggatggagcagatgtcagcggcctttgactggagaaggtcgtgggtcttgcaggcttcaaaagcttcttcgtttatgttgtgccaagaaagctatggctgggaacggttccctccctcagtgtctgcttgtggcagctcccgggcgtttctgggctgcctcaccccgcactgcactggcctcagagccaggccttcatctgaccaagtccccacctcctgctgtcttcactagtgctgttctttatctgtctttgggttccttttagtattttcccctaaattttcaaatgatgtgtctggttggttgaatgtgaacctttcttgattactaggtaaatgcatctggtcttcctggtgtggccgagtcccacaggtgcagtgtggggcacccacgtgccttccctggagtgaggagtccgagctctcctctccgtctctgctcatgatgggggccatgctcccccgtgcccttcccagcaaagatggggcctccagggctccactcccactcccgagccccttcagtgtggacacatctcactgttaccctggtatccgttcacagtcactgagacttggccagcagctttgctgcctttgtgttggtttttgtcaacactctgttctgtgtcccatgccagccgagaggcctgtgggggtggctagtggggggaagcttggcctgcaggtgaaggcagggctgggggcccttctgggccatggtgccagcctgtcaccttcgtgttttctgccatcaggtgtcagggtcccactgggccttcagctgcctgtgctacctgggcatgtgccccctccccaaatatgtgcccctccccagacctgtgccccctccccagatctgtgcccctccccacacctgtgccccctccccggatctgtgccccctccccggacctgtgccccctccccagacctgtgccccctccccggacctgtgccccctccccagacctgtgccccctcccaggcctgtgccccctcccgggcctgtgccccctccctggatctgtgccccctcgccgggccagtgccctctccctggacctgtgccccctccccaggcctgtgccccctccctggatctgtgcccctccccggacctgtgccccctccctggatctgtgccccctcgctgggccagtgccctctccctggacctgtgccccctccccaggcctgtgccccctccccggacctgtgccccctcccagacctgtgccccctccccagacctgtgccccctccccagacctgtgccccctccccgggcctgtgccccctctctgggcctgtgttttcccaaacataccccatggagaggagctgggtcctcacaggttcaaaattgtcctataaccctgggggggttacggtgtgtgcgagggatggaaaccagactctgaggtagacgtgtgtgtgaggagtgtcagcccccgtccctggagggcgaggaggggagtccagggaggccccacccctggcctggggagatgggtctcggtgaagaaccagggccacactggcatcacaggcaggcccagtcctggtggatatgtccaggccgccccttttcctcccctccatccagggtgcaccaggctcctcccctcagagaccacccagccggaagcccaggctccccaggtcaccaaaaggggcttgcagggcctcctaggtgccacagggtgccgggggtgaaatgtgactctaccaggcagccgtcaaagaaacaggtgtaactgcatccccagcgtggagaggaggctggctcgggccagcagggtcccagagagagcccagggtccgggaagcagagcaacctcaggcagctccagggggacgttgatggagggaccattggcaacggtggagcagggagtagggagaaagcgagcccatggctggagcgcgccaggagggtgaggtgagggcggggcccctggagccttagtgcagggagacaggctgcctgtgcacctgccgagaaggagccctccccgaccttggactgccaatacccgaggccaaacccaccctccccagcctgtgccagccccagggtcagcctgggcagagcgtggtggggagaggtgcccagggcacctggaggggtaggaggggacacctgccctgctgtacacagtccctgcttcccccatgtgctccccaccagcctgcagggagcatggagttgctttcacttcatcaagatcctggagcacctcttcctgctgcctcaagtggcccacagtttccacgacacctctctggtttccggagctcctgagctgggatgtaagccaccagcattcatctctggcccctgcctcaggcccttcgactcccaaaataatgggcaggagtgggagcttcatccaaggcccctgcacactgccttggttcacagtgaaatctggaacacggcatcttggtttccaggaaaactgccttgggtgccatggcgcagcctgcccacacttcaggcacagagcacagaagattctgtggtttccacacctgggaagagaaaagaaaaaccttccaggtactttaaagttccagaaaaatgagaaatgcttggccacaggtacacctacaaaccctgctgtctgcacaaaccttgctgcagaagtcacaggaaggctctaaggagcaaagaaggaagagccggcccctcctctctgggagactgtaggagaatgaaggaaccctaggtggcagcggctgagctcatggtccgctgacgacattgcctggggtgggaaggaagcccagccagcccaggcagccatgggccagccatgggtctcagagggagaacagaggcctcccgccaccagcagcactagtgtgccagccacgtgcctggacctggaccctgcagccctggggaggctctcggatgacagtggccccagaggcatccaactgcagcctcatgagagccctgtgccccagcgcccagctaagctgtgctggatttcctggctcagaggaactgtgaggataaggaaggtttattgtaggttgttgtgagccattaaacttggggtgctttgttaggacacaatggatagcaaatacaccactgaccggttaggagcccccaaactggggagaaagtctcacaggggagcctgtgctcacagggacggagtcagcctcacacacagacacattttgttatgggttgaatggtgtcccctccccccaaaaaaggacgcactgaagccctacacccccatacctgtgtgtgtgaccctacttggaaataaggtctttgcagatttaatcacgttaaatcaagttcattaggatgggctgtaatccaatgtgactgtgtcatcaccaaaaggggaaatgtggacacagacacagacccacaaggaggaggccacatgaagatggaggcagagactggagtgatgcacaggccaggggacactgggggctgctgggagctgggagaggcgggagggatcctccccagagcctctggagggggcacggccccacccacaccttgatctgggacttctggctccagatctgtgagagaacctctgttcttagccatcagttttgtggaacagtgttgcagcagccccagaaaacgaatgcagatttctgcaccttttaagagcaaagacagtctgggcgtggtggctcatgcttgtaatcccagcactttgggaggccaaggcaggtggatcacccgaggtcaggagttcaggaccagcctggccaacatggcgaaaccctgtctgtactaaaaatacaaaaaaatagctgggcgtggtggcaggtgcctgtaatcccagctacttgggaggctgaggcaggagaatcacttgaacccaggaggcggaagttgcagtgagccgaaattgcaccattgccctccagcttgggcaacaagagcaaaactccgtctcaaaaaaaacaaaagaaaagacaatcaaaacacagctcaagtgagcagcatttgtactgaatcaattggcctctgtttagtactattaattagacaagaaaaaagggagttgtctttgtgtaccactgggggtttgcagtttttagataataagtttattttaagtaactatgattttcattttctttcagtgttcaggtagccacaacttgaccatggggaccccttgaactggcacgacctcccgtccgcacccaagtccccaccagcctgtccctctgatggttctgggctgggtgtggcagggaaagggcagaagtgagactttgacctggtgggtgcacacgcctaggtgtaaatctagctccaacatcttacatgagaatgaattgaattcagattctttaatggctcaccctggagttttatccctcctggtaataatttcatgaccaacacaattctttgtttagctgagtattttgattctggtgagcatcatttcatgtgtgtggtgttgtcaacagccacaggtgagtctaaaataatagcacagggtcttgtgacggtgctgggaacctctccgctcatactggcccgcatgtcttcggacgggagtcgcagcgcaagcttgcaggtggtcattgctgggagtgttaaggcaatacaggtctctgagaagagagaaaaaggtgtctttatattcagaatagtcagggaacagcgctggtgtttacagctgatgtgaagtgaccaacacagagaagaaacagacacgcccaggtcaagggaatttgtctttaacatattttttttaaataacccacaatttggtgttgaattctaatttttaaaagacactcaggtatttatttatttgagacggagtctcgctctgtcgcccaggctggagtgcagtggtgcaatcttggctcactgcaagctccgcctcacgggttcacgccattctcctgcctcagcctcctgagtagctgggactacaggtgccagccatcatgcctggctgattttttgtatttttagtagagatggggtttcaccgtgttagccaggatgctctcgatctcctgacctcatgatccgcccgcctccgcctcccaaagtgctgggattacaggtgtgagccaccgtgcccggccaggtatttatttcttaatgccctattcctacaaagtgcaaaggccatttgagaatgtcagaaactataatgaaataagatcaaaatacaatagctttccacatggatattattagagatgcttgcccttaaatttcaccctgcaattcaggttaaggagcaattttataggcctttataacattatgatataatcaatgcttctataaaatcccgtttatgaatgacaagggacccatcgtgtgtgtcagagtcactcacaaaacgtttaatgagctgttcaggtaatgacatgacccaacaggggatttccaaaacgcccagtctttcaaaaacgatatgaaaatctccaaatcggacatttaaaatgattcatattattattaggaaaagcatataagatgtattaaagaagaagcatggtttggctcctttttaaacattttaattagtggactttgttacttagagcagttttaggtttacagaaaaactgagtctcaggtccagggagccccagtgtctcggctcccctgcgactgacatcctgcttcctgtgctgcgtttgttacaattatcagtcgcgcgaacacacggctcacattagggctcactccttgtgtcgaacattttatgggttttgacaagtgtgtcatgacatggatccactagttgtggtcccttttatcaggttaaaaataaaacggggccttgcagagatttaaatgtggtagtaatcacctttgttatatttttccttctgaaaatattagccttggaaggaaatgttttaacaactagccactgttctgtgtctgggcacatgtccatagtgagcgtattctcttatctgcttcatgctgttgccaatttacagaccagtcgctcagaagctgtgatttttcttctgagcataagcttatcctcaatatggaaactttaattcaaaatacagtttggtctcataggagcattgtagtcttgctggctggaattcacgtggagaccgatgccagtgcctctttcctctgcatccatccatccatccatccatccatccatccatccacccacccacccatccatccatccatccatccatccatccatccatccatccatccatccatccacccacccgtccatccatccacccatccatccatccatccatccacccatccacccgtccatccatccatccacccactcgtccatccatccatccatccacccacccgtccatccatccacccacccatccatccatccatccacccatccatctatccatccatccatccatccatccatccatccatccatccatctatttatccatccatccatctatttatgcatccgtccatcatccatccatccctccgtttgctcatttccacccaggaatccatcatctctcaaactaaggtttcgacatcattccttcttttcagaaagtgcaaaccaaagctaagactggctcacacatgccacgcgggagttagagtgagagcatttttcagatccttgttctcttctggccccacctcccgcagtttctggaagtcccaggacagggaaaaggagagaaaggcagaaaagaaattatcgagtgtggctcttccctctcctcagaggaaattgttcacctgccaccctcggaaatttaattttcagtgttaaaacttgaaattttatagtagtatgtgtaccaaagttataaaatgggcaaacttgtctaaacgaggattcctacattgttatgacattttccccagagaatcacaagctctgagatacacttgtgaaccttacttatgcagacattctcttaaactgggattctttctctcagtttaccttaggctaacacagaaacatattttgacacagaaagaattttttctcttcattgctcaagtcacctggaggcagctcctgcctggggtggatgcctccgacccctgggaatgacccctgcagccaccactgagccccccacagaaggaggctcgtgcctggtccagctttcccacccggggtctctgtggctggctccccccagctcggggcagaagcctaattcagggttgttctgctcagttgatccagtcggacgctaggatttgcctgggggcccggcctgccagcagtacaggtgaggggacgcaggcttggtcacaagcacccctgctgaccttccctacagacctggcacatttaatcttcttctttggggaggagaagaggatgcattcagaaatgcctttgctgatgaggccctcaggagcttgtactggaatcactcaaaattcccaagtagcctgagtgtcctaattcatttctgtgtacatctgcctaattctcaatccacgtctaaggttagaatgaacatttgaattagccattctggacaacacacacacgcactataccatgcatttagatctctctgtaccttgctcgtgtcagcacaaacgcagcccctctcttttcaaaagcccggttcgttttccagcaggcgcgtgctttcattagactttccctcctgtgggttctggcagatttcccaacacaagcacggcaggaagtgcattgtgtttgtagaaaatccaaaataatctctaggtgagtgttaggatgaaaaatgaatttagtgttggtacaggtttttgcttgttgtactttttgtgggggagggtgataaaaatattccaaaattgattgcgatgatggttgtgcaattctgtgaatatactaacaagcactgaactctatactgcaaacaggtgaactgtatggtatgtgaattatattttaataaagctgttatttttaaaaagtaaatttagcaacaacactggatacaagctaaatatacaaaaattaattatctttatacagaccagcaactaataattagaaaatgagaatttttaaatgataccattttggtagtatcaaaacccatcaattacctagtaactgttcagtaaaatattccaaaaacagcaaaacattgactaaggtacattaaagaagatttaaatagcccaggcatgggggctcacgcctgtaatcccaacactttaggagtcctaggagagcagatcacctgaggtcaggagttcgcgaccagcctggccaacatggtgaaaccccatctctactaaaaatacaaaaattagccagatgtggaggtgtgcgcctgtaatcccaggtacttaggtggctgaggcaggagaatcgcctgaacctgggaggtggaggttgcagtgagcggagatctcaccacagcactccagcctgagtgacagaaaaaaaagaaaaaaaaaaaagatttaaataaaggaagggatatgatatatttatggattaaaagcaagttaaaaacaagttaacaaacacaacaattgatctataaattccatgtaatcaccattaaaatccaggccaaagtgtgtgagtgtgtgtgtgttgcgggtagggggttgccaagctaaagtttacgtgggaatggacggggcaagaacagcaagacgaccttgaggacgaccaaagcgagggactcggcccccaggtgccagtgcccaccacaaagctataggagtccagaccaggccacacagcggtcagtgaagtgggatggaaggtccagaccaggccacacagtggtcagtgaagtgggatggaaggtccagaccaggccacacagcgtcagtgaagtgggatggaaggtccagaccaggccacacagcggtcagtgaagtgggatggaaggtccagaccaggccacacagtggtcagtgaagtgggatggaaggtccagaaacacgcacacgggacacttgatccacaacagattcaggattgcagaccaggggcacggggaacctctttactcgtggtaccagctcagttgcagatgcatacggaacgcaggaagccggggccccacgttcccccatatgcagtctgcaaatgcaaacacggaggctgaaacaaacacgtctggaagaaatcacaggggagcatctcccctgctgtgcccaggatccacgggtgagcaagacagggtccctgtccggatggggtttcatttgggggtgcggagggggtgcagaaccaaaaaaaaaccaagcaagcgagtgaaacagggagctcggaagtgggcgctcgcataggccaaggtggggaaggctggcaggcacgtgtgtgtgcaaggacaccaaatgttgatctgcagagcaaagctgggcaacagcaaccacattaaccaatagacgtcggcttatccaggccatgggacgatgtgtagctgttaacataaaggtctatctggctgggtacggtgcctcacgcctgtaatcccagcactttgggaggctgaggcgggcagatcatgatatcagaagttggagaccagcctgacctggtttagtagaaaccctgtctctactaaaaatacaaaaattagctgggcatggtgggacgcacctttagtcacagctactcgggaggctgaggcaggagaatcgcttgaacccgggaggtggaggttgcggtgagccgagatcatgccactgcacaccagcctgggtgacagcgtgagactcactctcaaaaataaataaataaataaataaataatgaataaaataaaggtccggatgagtttggaatgtggaaggaaccacaccgggagtggcgctgggtgtgtccgtgtgaatgtgagaggatgtgtgcgttccatgcggtgctgcagagggtggaaaggcagcatggtatagcagccagtggccgggacccatccgtgaacccagtcttggctcagcactccacggtggggttttctgcccctgccacaactcggaggacagagggagttggatgaagtgccaggactgtgatgaggagggctggctgggaggcaggactctgacctgtgttcgcggaaacatccatctgctccacagtcagacagagcctgtggcagaggccatggaggattttctggtggccacagactgtcctgtggaattccagctcgtcgttggtcaatgggatgaagtttggctttagaggtggatgagacaagttgggctctacccagagcaaactaaagctgctcctggtcaacaaacaccagctcagctggcccaaccgatgcctcggccctggacacacagctggggggaggccgggtgaggagactctgtccgtgggattccacctgccccgtgggagtgagagcacaggcatcgctcacggcgctgcaggccatgtccaccacagtgcagcgcagccctctaggccgcgcccacattgcccaggctccgctcggcctcatcctcgatttcaggcctctgtgacttacccttggggcccagcatagcacagacactatgtctgtttaaataggagagcatagaaaagccgagtccctgcaagggacaaccggcttgagatgacagtcagggtctcaggcgagacggcctccagccgccttcagagcaggtgcctatcagcggggccacgtggtggtttcacagtgccttggtccccagtgccgaacctgcccccttgcccgaaagccgggctaagccaagcagctgtggttgacggttttgcctcaggaattgtgtgtgtaatttagcgacaaaacaaagcaggcacaaggaagactcaaacagggaggtccctgaagatgggagacaaatgaccaatggacagaatttcatgtcctattggtggcctaacagcttggagaagcattccaactggattttcaacacaaggaattggttagacgtccctggcggggtgtgtctcttccagctggattttcaacacagggaattggtaacacgtccctggcggggtgtgtcgcttccagctggattttcaacacagggaattggttagacgtccctggcggggtgtgtcgcttccagctggattttcaacacagggaattggtaacacgtccctggcggggtgtgtcgcttccagctggattttcaacacaaggaattggttagacgtccctggcggggtgtgtcgcttcccactggattttcaacgcagggaattggtaacacgtccctggcggggtgtgtcgcttccagctggattttcaacacagggaattggttagacgtccctggcggggtgtgtcgcttccagctggattttcaacacagggaattggtaacacgtccctggcggggtgtgtcgcttccagctggattttcaacacaaggaattggttagacgtccctggcggggtgtgtcacttcccactggattttcaacgcagggaattggttacacgtccctggcggggtgtgtcgcttccagctggattttcaacacagggaattggttagacgtccctggcggggtgtgtcgcttcccactggattttcaacacagggaattggttagacgtccctggcggggtgtgtcgcttcccactggattttcaacgcagggaattggttacacgtccctggcggggtgtgtcgcttccagctggattttcaacgcagggaattggttacacgtccctggcggggtgtgtcgcttccagctggattttcaacacagggaattggttagacgtccctggcggggtgtgtcgcttccagctggattttcaacgcagggaattggttagacgtccctggcggggtgtgtcgcttccagctggattttcaacacagggaattggttagacgtccctggcggggtgtgtcgcttcccactggattttcaacgcagggaattggttagacgtccctggcggggtgtgtagcaggataagaggagccacgcagaaatatcgggctgcagtctctaattgggttgctgataataatatttgtattctttttttttttttttttggctgttgttgttgttttttgtttttgtttttgagacagagcctcgctctgtcgtccaggctggagtgcagcagtgcagtctcagctcgctgccgtctccgcctcccaggttcaagccattctcgtgcctcagcctccccaaaagctgggattacgggcacccgccaccacgcctggctaatttgtgtatttttagtggagacagggtttcaccatgttggccaggcaagtctcaaactcctgacgtcatgtgatccacccgcctcagcctcccaaagtgctggcattacaggcgtgagccaccgcgccaggtctgttggcttgtttttgagacagggtctcactctgtcgtccagactgcagtgcagtggtgtaatcacagctcactgcaacctgtaactcccgggttcaagagagtctcctgcctcagtcttccaaataactggaactacaggtgtgcaccaccatgcccagctaatttttgattttttgtagagatggggtctcactatgttgcccaggctggtctccaactcctgggctcaagtgatcctcctacctcagccccctaaagtgttgaggttacaggtgtgagccactgcacttggccataatattggtattcttattttaaactagaatatatacagtttcaaataaagcaaatgaagacaaaacatgttaataccatcaggggccaagattttcggggttagagaaaaaagcatacaagtataaagtcaaagaagttgaagaaactctccagtttgaataggaggcacctgtgtaagctcttgaactcatgccatatgtttgtttcataaaaatacattttttccgctgtgtcatctggaattgcccagaagcaaagacgactcaggagccacagtccccggcacccaggctggctctgagcccctctccccactcacctgaaccaggactctgggaagtgactgagcgcgggctgggcagcggcacagggagctgctggaagcccaggaggcatcagcaagtgcagtgtcacccgccacgccggcgtccccctgtcgagagggcagcccccagcttgaagggctcccagcgccagccggggcacgacaggcatcgaacagactaatggtatagtgatggtagaaaacatcaaatgtttgaaactctgtgaatttatcaaaccgctttcaaaacctcctgtccctctcggatgctgttagggcgccaagccgtgatgctgcgaactggcaaatagggggaggtagaaagcacgtgtcccggctttcctgcgggaactttctcacccagccgagcagctcacgggagaaagctctttccagaggatctccagcgagtaaacgcagaaggagtgatgggatccgaagatcaccgttttgcaaaccttcaggaaacgccagaggtgagccactgccacgagagggtctgagccgtcagggcgggagtagggtaacacagggaaaccgagtccctacaaggagagagccggcttgagaccacagttagggcctgagccgaggcagcctcctgctgtattgagctctaaggcggtccaaaaactccctctgcggggccaccctctgcagcagcacaggctggagggggtgccagcatcctgccctccagggatcccaggaccaggggcaggagtacccagtcctcctctggggacctgtgtgaccaggctgaccatccccagaagagaggcaccaggacgccctgtgcccccacaagatgccaagggcagaggccagcactgcctggcaaccccaaggctggaggaaatgcagggaggagctcatcaaatccggccaggcagcagcagcagcagcccgagagtgggcatcccatgggacgaacggcccgggatccacacgcagatgcccagaaagcgagaggacagagggcgcggggcgggaagacgcgcctcggccggggcagcaaggaaaagacgttacaacagccgttttcagtcagggaaatgtgaacaggctgaatatttagggatccattgtgatgattatattgtgactgtgttttctaaaaaggagagattttatctgctgggggcacataccacagtatttatggacacagtgataggacgtcttcatttcatttcaaataccccatgggaggatttatgaggctagagggaggctggctatcactgaagcttggtgatgcattaatggattcatcttcctaataaaaagttataaaattatgtaagagtggataaaagaaggacattaaacaaaggaagtaaaaggaaatctccttactggcggagtccctgggtggtctgtctgattccagctgatacatcatcgttactgaaggtcataggtcaggctgctgggagtctcaggctccaagggctgagggcgggggctccaaggcggtctgcagaccccctctgtggggtgaccctctgcagcagcacaggctagaggggtcctagcatcctgtccgccaggatcccagtacctggagtgggagggcccagccctcctctgggttctcctgggggccgaggagttgggcccagggcattgtcgggacaccaggccctcccatcgtcggcttcctatgaacgcttaggccaggccagggcagaacagtgggtgagggcctgtgtctggggcctgtgtctggggccaggctgcctgactcccaacctcttctctccccttcctgctgtacaaccctgggcaagttagtgactttgctggatctcaaagtcctcatctgtaagacgagcatcatgctgtgggtgtgaggaaccaatgggagcacggccggctggcggcacctgcccggtgcatggatccagggtggctggaacccaattccacattaacctggggtctggcagccagaaccaccagtctctgggagacgactgcccgggtccccagcaggccagagtcaggccctgtctgggtccccacagcccccatgcccgcgctgtaaaccagcctcaggggctggggaggaggagtattcccagccatttcccaggcagaagccttggtgcttctgctctaattagggctgggggaggggacctggggtcatcatctccaaggtcagtggtcaccacattccaggaatcaccaccagcattggcctcaaactcctcagcaccaattgacataaaatccatgggaattcagctgaagcttcacgcctacaatcccagcactgtgggaggccaaggtgggaggatcgcttgagcccctgagtttgagaccagcccaagcaacacagtgataccccatctctacaaaaagtacaaaaaacaattagctgagggtggtggcacgtgcctgtagtcccagctactcaggaggctgaggcaagaggattgtttaaggccaggagttcaaggctgcagtgagatatgatcgtgccaccacactgcagcctggatgacagagcaagactctgtctctaaaaacaaaacaaatgaacaaaaaatccatggaaattccctcagagccagaaaattgcttccagcctttgggaacggagtgtggtttgagctgcaccgactgggcacggtgggccccactctgggaagagaggtttctttctgcagcttgatcaccccagtggactaatgaggcgagctgttcccaggaagtgtgctttacgtaactgctggtaatgagactggtggggccgtgcgtgtgtgtgcgtgtgcgtgctcgtgactctggaagccttcaagctgccagcattcatccgtcttctctaatgagcctcatgggaacattatcgccctggaggaaggagaaagcggggctgggctctctcgccggcagctctgctccagaactggaagaacttactgctgtcagggacactccagagctcctgcctctgctcattcctacatcactcaagtgaacagctcctgaatttaaaaaggcacatgtacacatgcgcaagcattcacacatgcacaagcattcacacatgcacatgggccacacacatatatgcgcacatgcattcacgtgtgtacacaccacatgcatgtccataggcacacatcctcacatgctatatattgcacatgtacatgcattcacacaggcacacaccacatgtatgtgcacagagagctgcatcacacagcacatgtgtatatagactcatgtaccacacacattacatgcatgtgcacacaaacgtatcacacaacacacatgcatataaatttgcaccacacaccacaccacacatatgcatacagacatgcgccccatgccacacatgtacgtgcacacaaacatgtatcacacagcacatgtgcatatagtcagcaccacacacatcacacacatgtgtatacatatcacacatagacttacacatgtgcaatgcattcccacacacaccatgtacattcatatacccacatgcatcacacacactgccacatatacacgtgtgttgcatatgtgtgcacatgtaccacatataccgcatacgtgtgcatgggtgcatgccacacacacacacacacacaccatgtacctgtgtgtaggtgcatgcactcacatataccatagctatgtacacacacaattcgtatgtacacatatctgcacatagacctgcatttacatatatacctgccatagaagccagatgtgagaatgaaaacctcagaacccagaagccgttgtgagaggagtgtggtgatcaggagatggactggggctgggagaaagcccctcccacgggctgcagtgctcgggacttacagaagaccccagggtaagggacaagctgagcagctgatgctggaggcaaagctgaggtgggcagcacggccccccagggccgcctcggtcccagcgccgaccgcgagtctgtcctccagctgcctcgttcactgggcttgagtcgacaagaacctgccagggagggtggcaggaccacgaggctggggggcctcagagtttgccctgcaatgacaagacccagaatgggggaagggcctccgcacacctggggctccgcggggaccaggacgtggtggcggccggatcccaggatgggggggaagggcctccgcctacctggggctcagcggggaccaggacatggtggcggccggatggaccccaaaaacagagcaagactgacggagagcgtggatcagggaggttctgcaccagctcttcgcacaatgaggaaagatcttgctgctacaaaatagaaggaactcagcaaacaacctctctgagtggtgggtaaagatgcccgcgccctggcacatgtggtactagaacctcatgctgtacaggcgttccgctccgctgagggcctcctggacaccttgagtttgaggccagcagaggcctggccttgctgcctacccacctgcctggccacttgtccaccgacagcgtggcctgggccctggcagtggaacagggaggcatccctagtttcccctctggctccggggtctgagtggggagcccctggtgtggggatgtgttcatcctcagctctgcaccagcccccacaggccccagggttaacctgggcccacagtttctaggaaagaggggcacgggctgaggatgcagggcccacccttcctgtgggggccagagggctcctctgcctctcccaggaccacttccttcctcccacatggatgacccgggggtccaaccctggaaaatctgagcagcttggctgtggttcaacctcctctttccactagcctgcacctgggacccacttcctgccggctgccactgctggcaggtccagggcagccctggccattggtcagccctgcagccagcagcccacacagaaaccacgctgcctccagcttggacctcagcatgcggggagctgtgggggcctaggcatctggggaggatctgccagacttgagaagccatgagggccaggcacagtggctcaagcctgtaatcccagcactttgggaggccaaggcaagtggatcacctgaggtcaggagttcaagaccagcctggccaacatggtgaaaccccatctctattaaaaatacaaaaatcagccgggcatggtggcaggtgcctggaatcccagctactcgggaggttgaggaaggagaatcacttgaacctgggaggcggaggttgcggtgagccaagatcgtgccattgcactccagcctgggcaaaaagagcaaaactccatctcaaaaaaaaagaaagaaaagaaaaaagaaaaagaaagagaagccagaaatccacaccatacaagggatctcaagggaacagaagtccagctcctcggcctggcccccagagactggacagttgcctggacccggtgcccaggccacgctgtcctgctccctgtccctcccaaagacccaggcaccgagtcccgagggctcctgcggcggctctgtgctcaccccgccagcccctcctcggcctcctccggctctggcttcaaggctttatccctggtgctcacaatcagccccccgcccagcagttacctccatccaggcacacacggccctcgttcccctctctgcccgtggggcgcctccacagatggctggaggacccatgcagaccctcggcttggtagcctgctgcccattcctgtgcccacagccggggctcctgtgcccacagccggggctcctgtgcccacagccggggcggcctgacctcgcagcacagggtgtcagccgggaggatgcgggggaggcggctgcccagcctcctgtgatcccggcaggtcctggccctgcactgggcccggtttcaccacctgtcagcctcagggtaggattttatgcagagtcacgcagtttacacacaaacacacacacgctggtatacacacgtatgtgcacacacatgcacaggcaagcatatacatatacatgccgttatagattgaactgtgtctctcccaaattcacatgttggagtcctaacccccaggatctgtgaataaacttatctggagatagcatctgcagttaatcaagtacaaatgaggtaattagggtgtgtttgtgtgtcttttaaagggggaggtctggacaccgtgtggagacagctgtgggatgcatctgcacactgaggagccatgatggctgtgggacgcccagaagctgggggaggcctggagcagcctctcccttacagcctcagggggaatcagcctgctgtgagataataaatgtctgttgtttaagcccccagtgtgtggtggcttattgtgacagacctagcaaactgtgcacacagacacaggcacacaggcaaaggcacaggcacacagacacatacacacagacacaggcacacagacacaggtacacaggcacaggcacataggcacatacacagaggcccagacacacagacacaggcacacagacacacaggcacacaggcataggcacacaggcacacaggcacatacacagaggcccagacacacagacacaggcacacagacacacaggcacacaggcataggcacacaggcacacaggcacatacacacaggtacatatacacaggcacaggcacacaggcccaaacacacagacacaggcacacaggcacatacacacagacacaggcacacagacacacaggcacacagacataggcacacaggcacacagacataggcacacagacacaggcacacaggcaaaggcacaggcacataggcacctacacagaggtacaggcgcacagacacaggcacacaggcacgtacacaggtacaggcacacaggtgcacacaactcacccgtagtcagtagcatcaactttaaagtccagcatagcagggctcaggacctggctggaccatattccatctgttcgaccttgaaaaggtaatttaatgattctgagcttcagttttctcacctgaaaactaggaatcataatagtctcttcttcatagggttgttgcaagaagccgggacattttgccctgggtttggcatgaggggctgcagtgtctcctgtacatgctttaaatattttttaaagtctcaactatttgtacactaaacaacacacgtctaaataatgtgtgggtcaagaagaaatcgcatgccaggcaaggtggctctcgcccatcgccccagctactcgggaggctgaggtgggaggattgcttaaacccaggagtccatcagcctgggcaatgtagcaagacttagccacaaaaaaaaacttttaaagaagaaatcttgaagaaaatattttgaattgaatcatcatgaaaatgcagaatgtaagaatttgtggaaatgcaggcaaagggtgcttagagggaaatttatagctttaaatacttaagattagaaacaaaaaaaggcttaacatcaataatataagtttccaatataagtagcataaaagagataagcaaattaaacccaaaaagtagaaaataaataatgaaagtagtagcagagattattgaaatacaaaacagataaaaagatcaacaaacccaaaattgatttttttagttgttaaaattgttatctgtcaagcaagatcgatttaaaaaagagagagaagacacaaattgccaatatgtagactgaaagaaagaatatcaatgtggatccttgagacagcacaggataataataaaactttatgagcaactttgtcagtaaatttaacaacgttgggtgacacaaatttctgaaaaacacaacttaccaaaatcagcatgaaatgaaatagaaaatctggatagccttatgtctacttttaataactgaattcattatcaaactccttccacaaagaaaactgcacgccctggtggttttatggtgagttgtatcaaatacgtagggaagaaataatgctgatctttcacaaactcattcagaaaacagaagaagggagaacgtctgccatggcctgaatttgccccctccctgctgccaaaattcataccctaaccccagcatctcagaaggtgactgtatttggagaggggatctttacagaagtcattaagttaaaatgtggtcattagggttgccctggcccagtctgctggcgtcctcgtaagaagagcagatgagggcacggacacacacagagggacggccctgtgaggacacagggagaagatggtgtctgcaagccaaggagagaccccaggcaccagccctgcccctccttgatctcagaccccaggctccgggactgtgagaaggaagtgcctgttcaagccaccagttctgcgcattcttaaggcagcccaaacaaactaataaaatccctagtgcgttgtaccaggcggatgtaagcctgagacgacacctgacaaagacattatgataaaacacaattggggaacgtcccgcacatcaacacagacacaaaacactcaaccagatgttagcaatcacggccagcaagggaagtaaatggtacaccacgaccaaacgtgcttccgccgggaatgcaagagccgtttactgtttgagcatcaatcagtgtcattcacagaagcagaaaacatgatcattcaataaatgcagagaaatcattcaacaaaaaagcaacacccattatcacagataagaactcgagacaggctaagaacaaagtgaaactttctccatatgatatggccacgtatgaggagcctacagctaaaatcagatgtgatggtggaatgccgaccttacacaaactcattcagaagacagaggaagaggggagaattcctgctctgtcctgaatttgccccactccctactgccaaaattcacatcctaaccccagcatcttggaaggtgactgtatctggagaatgggatctttacagaggtaatcaagtgaaaatgtggccattgggctgggcctccctaacagtgtccctctcactctgtgaacggggtgaggctgtctgcctggccacttctgttcaatgccgtactggaaattatagccaatgccacaaggtgagacaaatgagagtcgtgcagtttggagagggtgcctgttatgaaggtgtggtcttccacccaaacccaccctccggaccccatcctgagctgccggggctgggaccccacaaaccacatctctgctcagcctgccagcatccccttagactgccaataaggggcgctggagagaccaccaaggtccaaaaggacaggagagttcaggcgagtgttctgggttcagggagattggagacatgacggttaaattccacgcgtgctcctgcactgcacccttgggtgggaaggaacattactgggacagtggacaagaatgggaaatggactgcccgctagatggttgtatcacatcattaggtgattacaccaaggggcgttccctgcaggcacacgctgaggtccacagtggggagtggacatggtgaccccgccttgctggggctcagaagctggtacctgagatacagctttgatgtgaaccgaggcagcctcaaggtctctctgacctccctgctcctgtctctcccaaagcacgaagttgttccctgaatctcccttatctgcctgaagtccctaccggccaaagaagaaaacaatgacccggaatcccctccctgcgtttccattaactgagcttctatcgcaagaagaaaggccgaggtttgtcaacacacctggcaaatgtcacaaccattgtctgctccagcggactttgttccaggccattgtccgtgcttcaagcccattgaattccctaaaaatcatttactaccaccctaaagtcacccacactgccccatctcctttcccccaagaagaagggtgcatggccgtctgtggccccccggggtttggggtaatcgtcctcctaagatcctccatgctatgcacattagaacacatgtcagcctttcctccagttaatctgccttctgtgagttgattttccagtgaaacttccgagggcaaaggggaagtttttcccttggcctctgcgcgcctacttgtttttttttttttggttctaaaaacacttttgagtgagggagaggaagtgtgataaagaaaatggggcaaaatgcacaaagttagtgagtccgagtgaggtgctccctctctatcctcgcaactttgtcttctaagttttaaatttcaaaatatagcagtgaaaagaatgagaacgttaagtcccggaaaagccatgatttctcgctcagggaagtggccacgtgtccgcgatcgcaatcagcgaggctccgactccaggactgtgaagcggttccactgtcaaacacgccgagccggcgcgtttcacagctgccctcagctcctgcagctgggagcatgtttttccaatcagacgttctttcgcagaacaagaatgttcagttttttgctttcggtctcactgttggtgacgctttccggctgcgtggggccggacacacacaggcccacaccactcatttctctcttcaccagccagcttaggattgcttgaccactgaatgcatattcccacacgccgggcactctcagggcacggggggtgtcaggagcaagacagcgagctggcccctgccgcacctgtgggctgctgggtggagagtcctggtttcacagcatgtccaacgtggaaggaatagacaggcccccggggtcctgtggttttcaaagtcttcaatccgtttcgtacacggcagcactgggataaacgaggcccaatatgtgaagcgaaaagcagccctgatctgcctgaagggggagctgccccgggacctcctgagtcccatgccctctcctgagccccttg

SEQ ID NO: 28243 - DNA, 4767 bp, Homo Sapiens
ggagtctccgcgtcccgctcgctgggagagaggtacctctccttttccctctccctttccctaagagttgtctgctggttctcagcttgaagaagattctgcagtccttattgatcctttttcttggcgttaccatttttgaagcaaagttaacctagctttctagtttgagctttctttttggccgtctttaaaaaaatttttttttttaatctataaaatagacaagagctagttctacaatgtccaagtcattccagcagtcatctctcagtagggactcacagggtcatgggcgtgacctgtctgcggcaggaataggccttcttgctgctgctacccagtctttaagtatgccagcatctcttggaaggatgaaccagggtactgcgcgccttgctagtttaatgaatcttggaatgagttcttcattgaatcaacaaggagctcatagtgcactgtcttctgctagtacttcttcccataatttgcagtctatatttaacattggaagtagaggtccactccctttatcttctcaacaccgtggagatgcagaccaggccagtaacattttggccagctttggtctgtctgctagagacttagatgaactgagtcgttatccagaggacaagattactcctgagaatttgccccaaatccttctacagcttaaaaggaggagaactgaagaaggccctaccttgagttatggtagagatggcagatctgctacacgggagccaccatacagagtacctagggatgattgggaagaaaaaaggcactttagaagagatagttttgatgatcgtggtcctagtctcaacccagtgcttgattatgaccatggaagtcgttctcaagaatctggttattatgacagaatggattatgaagatgacagattaagagatggagaaaggtgtagggatgattctttttttggtgagacctcgcataactatcataaatttgacagtgagtatgagagaatgggacgtggtcctggccccttacaagagagatctctctttgagaaaaagagaggcgctcctccaagtagcaatattgaagacttccatggactcttaccgaagggttatccccatctgtgctctatatgtgatttgccagttcattctaataaggagtggagtcaacatatcaatggagcaagtcacagtcgtcgatgccagcttcttcttgaaatctacccagaatggaatcctgacaatgatacaggacacacaatgggtgatccattcatgttgcagcagtctacaaatccagcaccaggaattctgggacctccacctccctcatttcatcttgggggaccagcagttggaccaagaggaaatctgggtgctggaaatggaaacctgcaaggacctagacacatgcagaaaggcagagtggaaactagcagagttgttcacatcatggattttcaacgagggaaaaacttgagataccagctattacagctggtagaaccatttggagtcatttcaaatcatctgattctaaataaaattaatgaggcatttattgaaatggcaaccacagaggatgctcaggccgcagtggattattacacaaccacaccagcgttagtatttggcaagccagtgagagttcatttatcccagaagtataaaagaataaagaaacctgaaggaaagccagatcagaagtttgatcaaaagcaagagcttggacgtgtgatacatctcagcaatttgccgcattctggctattctgatagtgctgttctcaagcttgctgagccttatgggaaaataaagaattacatattgatgaggatgaaaagtcaggcttttattgagatggagacaagagaagatgcaatggcaatggttgaccattgtttgaaaaaagccctttggtttcaggggagatgtgtgaaggttgacctgtctgagaaatataaaaaactggttctgaggattccaaacagaggcattgatttactgaaaaaaagataaatcccgaaaaagatcttactctccagatggcaaagaatctccaagtgataagaaatccaaaactgatggttcccagaagactgagagttcaaccgaaggtaaagaacaagaagagaagtccggtgaagatggtgagaaagacacaaaggatgaccagacagagcaggaacctaatatgcttcttgaatctgaagatgagctacttgtagatgaagaagaagcagcagcactgctagaaagtggcagttcagtgggagacgagaccgatcttgctaatttaggtgatgtggcttctgatgggaaaaaggaaccatcagataaagctgtgaaaaaagatggaagtgcttcagcagcagcaaagaaaaagcttaaaaaggtggacaggatcgaggaacttgatcaagaaaacgaagcagcgttggaaaatggaattaaaaatgaggaaaacacagaaccaggtgctgaatcttctgagaacgctgatgatcccaacaaagatacaagtgaaaacgcagatggtcaaagtgatgagaacaaggacgactatacaatcccagatgagtatagaattggaccatatcagcccaatgttcctgttggtatagactatgtgatacctaaaacagggttttactgtaagctatgttcactcttttatacaaatgaagaagttgcaaagaatactcattgcagcagccttcctcattatcagaaattaaagaaatttctgaataaattggcagaagaacgcagacagaagaaggaaacttaagatgtgcaaggagatttaatgatttcaaagaaaataatggttctttgtttttaatgttaaccttttttaaatacaatactgatagttagaagaaaactattgtactcttttgttttagtggagaaataatagatgtctgttcatgtgttaagtgttatagcaaaaaaaatacacatatggttaagttaatgaatagtttttgttttatcagaatggcaacagacagaagtactttgtagagattgacttcctaagctacttaagacaacttgcaccactaagaaaaaaatgtagaaccatttggaaaaatgaaatttagtagttccaagtttcaaagaaatgtcaacattttattccattcaataaagaacaaaaccaatagtgtttttattactttcatctgaaacattccatgttttaatctgagccttgcagactttcatttggagtttgaacccgttttggttgcatttcatttttggagaacttaattaacgtgagattggcaattgaaatgcaggtgcagttttctgttaatgtcatgctgttgtttaggtaataagaaatattaagtaattggctttagattttgtaatttttttccctgagttcctgctagatttcgtattctagtagtcaatgtattttcagtgaaatgcaaaaatattcccgttatctttgaccagtattaatttttgagatcttactgcttgtcacttgaatcccgtgattgtcatacatctctggtataagcaacatttgatttttgaagtgtgtagaccatctcttcatattttcaagatgtaattttacatttctgcatttttaaaacagtttggccataatcctagatgcacgcttctaattcatgtacctgcacatgtgacctttgtgaacagaaatttgcatgtataatttgtgtttacttgtaactttctggttatatactgcttatatctgtggattcaagttactgaagtgaataccaataaaaagaaagccctaggccatgttaattggttatacatgtttggaatgttaaccaacgtatttgtcagttgtggtttttattcgctcttaaactttgtgcatgctttaacaatttattacttttaaatctagagtgaattctaaagactgccgctaaagatctgagttttaaaaatgttgttgctggtggatttcttgttcctgttacataactaaaagtgaggccatttgtggtttttaaaaaccttatgaattaaaaatgctacaggtgaacaaacagaagcttatgtttagagatattgatgacttaacagtacaattggaagtaatacggatgagcaagaattagttctgcagcttttcaaataattacgtagagactcttggtatattggattatctgttgtaaacaatttttttttcttccctgacacagggtctcactctgtcacccagactggagtgcagtggcacagttctctgcaacctcagcctttgggctcaaatgaccctcctacctcagtctcctgagtagctgggactacaggctcatgccactatacctggctagtttttggtttttttgtatagatggggctttgccatgttgcccaggttgatcttgaattcctgggcccaagtgatctgctcgcttcagcctcccaaagtgctgggactgtaggcatgagccaccatccctggccaagaaacaaagttttaatttcaaaaaaatctacaaaaacaggataggcattgtctttcaaatgttcagaccccagtttattaaaggatacttcaaatagttggctaaattttatgatctctcccgttgaaaagtaggtgatgattttaatgtgacatgcacaaaaaatccttgccagtttacttctgcaatttaattttagcctttactaattacccacttctgtttaattccaatttttaacagcaggtacataaagcattatgtgcaaaaaaaaaaaaaaaaaa

SEQ ID NO: 28244 - DNA, 5037 bp, Homo Sapiens
gacagaatcccggtacatcgaggcgggacggcgtggaaggggcggtggtgatgcctgctgtcccccctcccggcgcggttgggtggcgcctcagcggcgcgatgtacaatacggtgtggagtatggaccgcgatgacgcagactggagggaggtgatgatgccctattcgacagaactgatattttatattgaaatggatcctccagctcttccaccaaagccacctaagccaatgacttcagcagttccaaatggaatgaaggacagttctgtttctcttcaggatgcagaatggtactggggggatatttcaagggaggaggtaaatgacaaattgcgggatatgccagatgggaccttcttggtccgagatgcctcaacaaaaatgcagggagattatactttgactttgcggaagggaggcaataataagttaataaagatctatcaccgggatggtaaatatggcttttctgatcctctgacatttaattccgtggtggagctcattaaccactatcaccatgaatctcttgctcagtacaatcccaaacttgatgtgaagctgatgtacccagtgtccagataccaacaggatcagttggtaaaagaagataatattgatgcagtaggtaaaaaactgcaagaataccactctcagtatcaggagaagagtaaagagtatgataggctgtatgaagaatatactagaacatcccaggaaatacagatgaagaggactgcaatagaagcttttaatgaaacaattaaaatatttgaagagcagtgtcacacacaagaacaacatagcaaagaatatattgagcgatttcgcagagaggggaatgaaaaggagattgaacgaattatgatgaattatgataaattgaaatcacgtctgggtgagattcatgatagcaaaatgcgtctagagcaggatttgaagaatcaagctttggacaaccgagaaatagataaaaaaatgaatagcatcaaacctgacctgatccagctgcgaaagatccgagatcaacaccttgtatggctcaatcacaaaggagtgagacagaaacgcctgaatgtctggctgggaattaggaatgaggatgctgatgagaactattttatcaatgaggaagatgaaaacctgccccattatgatgagaaaacctggtttgttgaggatatcaatcgagtacaagcagaggacttgctttatgggaaacctgatggtgcattcttaattcgtgagagtagcaagaaaggatgctatgcttgctctgtggtggccgatggggaagtgaagcactgtgtgatctacagcactgctcggggctatggctttgcagagccctacaacctgtacagctctctgaaggagctagtgctccattaccagcagacatccttggttcagcacaacgactccctcaacgtcaggcttgcctaccctgttcatgcacagatgccctcgctttgcagataaagaggaagtgggaagagaggtggttctctggcatttttttctacagtttttattagactacgatgagggcattctttctacatagactgcttgttttgcacaagaagtgattttgtgaatgtgaagtggagaggccgagcagcagccggccgggatgggggcattagaggcctgaggttctctaggactcagccatgccgctgcactgacatactaagctggaagcagatgttttttttgaaagtctgtttcattggggtttttgttttgtttagccagacaccctcaacagaatattaggcttgatggttatagcgggtggggttgtatttggaagcctctgaagagaccatgtctttttaaaatctaactcttgagagtgcagcaggggcatggctctgctgggagttgtgttttgctttggcagtctctcttccccccacgaagaaggctgtttaggttttgtgatagaatgggatttgatgaaaaagacaaccaaaggaaaatggggaggcttgggatttcatttaaataatctaagccaagatgataaaaaaaaccttcaactgaaggtattttgtttcttaccaacataatttaggcttcagcatctcaccagcccctccctctgaagaagtattatgttcagaagccaacaaaacagtttgttgccagaccaatgtttgatggggaaacgtggcactcatagttgaatgtatacttctgtaccaaaacttgaacataaaaagactagaatttgtgagttttagcaaacgctaaaattgatcactgtaactaaccccttctgtccttcctgcctgtttctctgagatgaggaatagcattctttttgtggggatggtgagctttgaatcataaaatgaagttggtgcttgtatggtgtttccttagcctaaagaatgatctgttgtttgaaacctttgtaacttgtttgtatgagtaaagaaaaggtgcaatgcagtgcttttagatggcttgatataccaaataacaatatagaacaacattattatatgtgcttccccaagtttaaaggccctgcagaaatagtaaacatggtttaatttcccttcatttccccctcctttgctggatggggttttgggagctataggttgctaaggaggggagtcagattgtggtcaggtgcctcagtaaatcacagacccaggggccctgtggtccagggtgagagtcacaccacattacacatgtgcttccatacagtggtttctgaagcttttgcagggagagaagatggcttagtgtttagactgttagtagaagccatctggaagcttttctctttgcctttttttgtgatcctgccattaaggctatgtgcagtctgccctcctgctccagtggccttgattttaggccaggaatcttctgctccatgtggcttaagccttccagctgagtgaagctaggcaaatggagtgggggcaggcatctattcctgcccccatcatgccccacacccatcagtcaacactcatttgacaaatagagtccagctgcctctgagccaatcctgggaccataataggctcagagtgagtcagctgtttgaacccaaagctgtgcagtcaggcaccctggctgagctagagaagccagtacctgcatcttggtttataaggcttacagctaggaaagctctagttctgggggtgaaagaaaaatattagtttacctgagcacttatttccatgacagggtctaaaatatggaccatgatgtagacacagatttttaattttggaaaaacctccagttactagtgacgaggatagaaagggaagtgcttctctttggctttttcttggttacactgcagtttcaggattgggtgagacagagacaaatgaacccccctctaaagtcatttaactaatagccagcacatcccttccccaaactgtcaattgaaatcttaactgaaagttttactgaataataccaagctaattgctgttgggcacacctggatggctttgcacctggtgttgaacctgctgaagcaggtggatgctcaagattacgtgcaaggaatccctcccatctggtactaaaatttcagtgtgttctgagtgtcttttaaaccaaaatggaaatacagatacagggctgtagtattcagtaatgtgtctgctccttgttgggcagacaccagcggtgtgcagggagagaccaagtaccatctttatctacacttgggctggcttgtggagaagggctgctttttttcagtcctacattccttcattttttttttcattcttgaattcattgttttgtgggatctaagacccaggggtcatttgagaggtttgacagtatcttttctgaccagttgccacatgacttgcttgaccctgagcctgtggaaatggcatagggaccagtctactacccactgggcctggtgtgtagagggggagagggtagcaaggtgcttctctacgcccatgacttgggagcaggtcttggcctccttcatgagagtctagtgccatgtcctgtcccatgatctggaccctgggactgtcttggcatcttaactgcagtttcaatgaggcagagggcaaagagagaccaagatcagaggggttcattatacccctggctagagaacccagctactgacatgcaagcagcttggggctggctggacacaggtactaggcccattgtttccaggtgaagctttcatcacagaacagtgttgtctccacctggccttagatggcacgccatgattcgggcctggatagactgcctgcgtccttaccactgatctggccaagaatgaggccctcccaacactttcactccctctccaagccttgatgggacctccacttatttaggcctcatgtgctttgaagaagctttgagagccaatgtgtcttccacgggtctcttttttgctacaagtaatcagccccatgtgttctcttaaactgagaattgcacctgggcaattcctgttttctaaggtggtctctgctgctatttaacaacccagagtaggcctctgtgaggcttcagtggcctcagaaaccagagggtccagatagggggcctgcttgggccctctgctgccaactgctcaaacctgctttagctccagccacttgtggcaaacaacctcgtttccttacaaattccagcatgtgactttggtgccgttacttgtgaaaaatctattctgttgtctttgatgtgtccaagaaaattcgtgtagtttacgtaaaaatatctgactcacaagaaagccaactgtatgtcttgtgatgggacagttcataatgtagttgctagaccactttacaaattgttcttgtcaccagatgtgttcagacattgctgtgcaattgttggggagggtagggggaaaggcgagaggagatacttattggtctttttgtttaataccttccccaagaggggacagtctggccaacttgctccagtaatgcaataaagacattgcaataaagtaaaaaaaaaaaaaaaaaaa

SEQ ID NO: 28245 - DNA, 4836 bp, Homo Sapiens
gggggttgacgatggctgtgttgttgaagggcctgtagccggggggttcctggccggatcccggtctacccttagcccagactcgttccggaccccagcccggcccggaacactctgggcgagacggcggtggcaactctccccttgccgccatgcacgacgctttcgagccagtgccgatcctagaaaagctgcctctgcaaatcgactgtctggctgcctgggaggaatggcttcttgtgggaaccaaacaaggacatcttcttctctataggattcggaaggacgttggttgcaacagatttgaagtgacactagagaaatccaataagaacttctccaaaaagattcagcagatccatgtggtttcccagtttaagattctggtcagcttgttagaaaataacatttatgtccatgacctattgacatttcaacaaatcactacggtttcaaaggcaaagggagcatcactgtttacttgtgacctccagcacacagagaccggtgaggaggtgttacggatgtgtgtggcagtaaaaaagaagctgcagctctatttctggaaggacagggaatttcatgaattgcagggggactttagtgtgccagatgtgcccaagtccatggcgtggtgtgaaaattctatctgtgtgggtttcaagagagactactacctaataagggtgggtggaaaggggtccatcaaagagctctttccaacaggaaaacagctggagcccttagttgcacctctggcagatggaaaagtggctgtgggccaggatgatctcaccgtggtactcaatgaggaagggatctgcacacagaaatgtgccctgaactggacggacataccagtggccatggagcaccagcctccctacatcattgcagtgttgcctcgatatgttgagatccgaacatttgaaccgaggcttctggtccaaagcattgaattgcaaaggccccgtttcattacctcaggaggatcaaacattatctatgtggccagcaatcattttgtttggagactcatccctgtccccatggcaacccaaatccaacaacttctccaggacaagcagtttgaattggctctgcagctcgcagaaatgaaagatgattctgacagtgaaaagcagcaacaaattcatcacatcaagaacttgtatgccttcaacctcttctgccagaagcgttttgatgagtccatgcaggtctttgctaaacttggcacagatcccacccatgtgatgggcctgtaccctgacctgctgcccacagactacagaaagcagttgcagtatcccaacccattgcctgtgctctccggggctgaattggagaaggctcacttagctctgattgactacctgacacagaaacgaagtcaattggtaaagaagctgaatgactctgatcaccagtcaagcacctcaccgctcatggaaggcactcccaccatcaaatccaagaagaagctgctacaaatcatcgacaccaccctgctcaagtgctatctccatacaaatgtggccctggtggcccccttgctacgcctggagaacaatcactgccacatcgaggagagcgagcacgtgctaaagaaggctcacaagtacagtgagcttatcatcctgtatgagaagaaggggctccacgagaaagctctgcaggtgctcgtggaccagtccaagaaagccaactcccctctgaaaggccacgagaggacagtgcagtatctgcagcatctgggcacagaaaacctgcatttgattttctcctactcagtgtgggtgctgagagacttcccagaagatggcctgaagatatttactgaagatctcccggaagtggagtctctgccacgtgatcgagtcctcggcttcttaatagagaattttaagggtctggctattccttatctggaacacatcatccatgtttgggaggagacaggctctcggttccacaactgcctgatccagctatactgtgagaaggtgcaaggtctgatgaaggagtatctcctgtccttccctgcaggcaaaaccccagtcccagctggagaggaagagggtgagctgggagaataccggcaaaagctcctcatgttcttggagatttccagctactatgatccaggccggctcatctgtgattttccctttgatggcctcttagaagaacgagctctcctgttggggcgcatggggaaacatgaacaagctcttttcatttatgtccacatcttgaaggatacaaggatggctgaggagtactgccacaaacactatgaccgaaacaaagatggcaacaaagatgtgtatctgtccctgcttcggatgtacctgtcgccccccagcattcactgcctggggccaatcaagctggaactactggagccaaaagccaacctccaggccgctctgcaggtcctcgagctacaccacagcaaactggacaccaccaaggccctcaaccttctgccagcaaacactcagatcaatgacatacgcatcttcctggaaaaggtcttggaagaaaatgcacaaaagaaacggttcaatcaagtgctcaagaaccttctccatgcagaattcctgagggtccaggaagagcggattttacaccagcaggtgaagtgcatcaccacagaggagaaggtgtgcatggtgtgtaagaagaagattgggaacagtgcatttgcaagataccccaatggagtggtcgtccattacttctgttccaaagaggtaaacccagctgacacttgagcccagcatcctggggatccagcggatggacagcttggctctcccagagaggtgaaggagcacctggccttaggaatcctggctgccaccaccacaaggctccccatttggacattactggctatcttgtgccctggaacaactctgaattaattagactcatggtctggcattgccagctttttaatgggaaaagagattagttataccttataccattatgttgtgggcaattccagagaattcagtacctgcttggtcaggaggatgtgcaccatcttgcctttgcacaccagtcacctgaacaaggaaacttgtcacaagtgtttgtaaccatggggttgttcatcaagggcttttctattaagtacatgacttcacaaggaccgctcagcatggctcactggagagttccatgagagaacagcactcaagcttctggccgcatggacccgatggctcgcattctgtgtagtgttttacgtctccatggtaactgtgccctgcacccctcggtagccgccctgttagttttcagtctccttttctttctcaccatttatcacttccctcactgccctacccaggctttctctcccacttccctgactctgggaataactaatatttaagcaaggtaagatgagaagcaaggggtctcagttctaggaatacagtgctagttgattgtcaggtatgttgtaaatagaccctctttggccatacactccatgcctagatgcctcggagagcatcattctctgcctaggcaaggccctgcatcccttgcctcaggccgggctgagtgtgactgcagctcctgaggatgggcctgccctgtctggggtatgcgtgatccctagatacatgttcccacagaggtgcctgctccgtcttcgctcaccagacactcaggcaggctggcttagtctttgtgcgtggcgattttgtgctctgggccctttctctttttccagccagtttccattcacttgccttacagcctgccctggccgtcactccccagctttgttcagcaatggtgtggttggagagttgtgctgggatagcgcaggaaggtgggtcccggcaacacgcaggggatgagtggacctggaactgacaatggcgtgctgccaagtgttcctgagaggtgtttaggcacagcagaggggacgcggggggcaagaacagcaggacgctggtttaaaaataactcaccgccaaacctgtggagcagtgtggggcatcctgccagaggtgcacaggctggagtttcaggcactgcaggctgatgacacacagggagagtggccctgcctcctgtcctccccggggtttttgcagactcgaagtctcactgcaccagtgtctttgatggtggtgagggtgggtgatggtgcccagcaccaacagttttagtggcctgtccttgacctgccgtggtcctttgtaaactatggctccatgctgtgtgacagatcaacgtgctgatggtaagtagactaggcttccccaggcatgccgtccgtgggggcctgaagagacagtgagtgccattggccccattcgcagatgtgggagactctgctcaggcctgtgaggctgggcagcccttcaccagagttcggaggagcagtgtgtggcgccacgtcccgactggccatacccacacagaagcagtgctgcccggggcctcatctgggccagcttggactctgcttcctccaggagcagcagggaagctctgggccacctccctggatagcaggaacttgacctgccatgtgtgccctgccttcctggccagctgtgcttgttatcttccattctcacaaactgtctttgaagcaatagaataaagaatgtgtgttttctttcctggtatacatacatgatcccatgctcccaagctccattcttccttccctcaactctctgccctccacagagctatggagaaggctggagatgaaagctttgtagtgaggactgataaagatctcatcactgctccttataataaacctaataaagcaaaaaaaaaaaaaaaaaa

SEQ ID NO: 28246 - DNA, 6280 bp, Homo Sapiens
gggactcccaggactcccggccggggtagctcttcactcctcagcgcgacgtcgtgtcgagttcccaaaaagctccgcaggggctgtagggaggcatacaagaattaaattctgaataagtctgcaggtaggatggacagttattttaaagcagctgtcagtgacttggacaaactccttgatgattttgaacagaacccagatgaacaagattatctccaagatgtacaaaatgcatatgattctaaccactgctcagtttcttcagagttggcttcctcacagcgaacttcattgctcccaaaagaccaagagtgcgttaatagttgtgcctcatcagaaacaagctatggaacaaatgagagttccctgaatgaaaaaacactcaagggacttacttctatacaaaatgaaaaaaatgtaacaggacttgatcttctttcttctgtggatggtggtacttcagatgaaatccagccgttatatatgggacgatgtagtaaacctatctgtgatctgataagtgacatgggtaacttagttcatgcaaccaatagtgaagaagatattaaaaaattattgccagatgattttaagtctaatgcagattccttgattggattggatttatcttcagtgtcagatactccctgtgtttcttcaacagaccatgatagtgatactgtcagagaacaacagaatgataccagttctgaattacaaaatagagaaatcggaggaatcaaagaattgggtataaaagtagatacaacactttcagattcctataattacagtggaacagaaaatttaaaagataaaaagatctttaatcagttagaatcaattgttgattttaacatgtcatctgctttgactcgacaaagttccaaaatgtttcatgccaaagacaagctacaacacaagagccagccatgtggattactaaaagatgttggcttagtaaaagaggaagtagatgtggcagtcataactgccgcagaatgtttaaaagaagagggcaagacaagtgctttgacctgcagccttccgaaaaatgaagatttatgcttaaatgattcaaattcaagagatgaaaatttcaaattacctgacttttcctttcaggaagataagactgttataaaacaatctgcacaagaagactcaaaaagtttagaccttaaggataatgatgtaatccaagattcctcttcagctttacatgtttccagtaaagatgtgccgtcctcattgtcctgtcttcctgcgtctgggtctatgagtggatcattaattgaaagtaaagcacggggtgattttttacctcagcatgaacataaagataatatacaagatgcagtgactatacatgaagaaatacagaacagtgttgttctaggtggggaaccattcaaagagaatgatcttttgaaacaggaaaaatgtaaaagcatactccttcagtcattaattgaagggatggaagacagaaagatagatcctgaccagacagtaatcagagctgagtctttggatggtggtgacaccagttctacagttgtagaatctcaagaggggctttctggcactcatgtcccagagtcttctgattgttgtgaaggttttattaatactttttcaagcaatgatatggatgggcaagacttagattactttaatattgatgaaggcgcaaaaagtggcccactaattagtgatgctgaacttgatgcctttctgacagaacagtatcttcagaccactaacataaagtcttttgaagaaaatgtaaatgactctaaatcgcaaatgaatcagatagatatgaaaggcttagatgatggaaacatcaataatatatatttcaatgcagaagcaggagctattggggaaagtcatggtattaatataatttgtgaaacagttgataaacaaaatacaatagaaaatggcctttctttaggagaaaaaagcactattccagttcaacaagggttacctaccagtaagtctgagattacaaatcaattatcagtctctgatattaacagtcaatctgttggaggggccagacctaagcaattgtttagccttccatcaagaacaaggagttcaaaggacctgaataagccagatgttccagatacaatagaaagtgaacccagcacagcagataccgttgttccaatcacttgtgctatagattctacagctgatccacaggttagcttcaactctaattacattgatatagaaagtaattctgaaggtggatctagtttcgtaactgcaaatgaagattctgtacctgaaaacacttgcaaagaaggcttggttttgggccagaaacagcctacttgggttcctgattcagaagctccaaactgtatgaactgccaagtcaaatttacttttaccaaacggcgacaccattgccgagcatgtgggaaagtattttgtggtgtctgttgtaataggaagtgtaaactgcaatatctagaaaaggaagcaagagtatgtgtagtctgctatgaaactattagtaaagctcaggcatttgaaaggatgatgagtccaactggttctaatcttaagtctaatcattctgatgaatgtactactgtccagcctcctcaggagaaccaaacatccagtataccttcaccagcaactttgccagtctcagcacttaaacaaccaggtgttgaaggactatgttccaaagaacagaagagagtatggtttgcagatggtatattgcccaatggtgaagttgcagatacaacaaaattatcatctggaagtaaaagatgttctgaagactttagtcctctctcacctgatgtgcctatgacagtaaacacagtggatcattcccattctactacagtggaaaagccaaacaatgagacaggagatattacaagaaatgagataattcagagtcctatttctcaggttccatcagtggaaaaattgtctatgaacacaggaaatgaggggttacctacttctggttcatttacactagatgatgatgtttttgcagaaactgaagaaccatctagtcctactggtgtcttagttaacagcaatttacctattgctagtatttcagattataggttactgtgtgatattaacaagtatgtctgcaataagattagtcttctacctaatgatgaggacagtttgcccccacttctggttgcatctggagaaaagggatcagtgcctgtagtagaagaacatccatctcatgagcagatcattttgcttcttgaaggtgaaggctttcatcctgttacatttgtcctaaatgctaatctactcgtgaatgtcaaattcatattttattcctcagacaaatattggtacttttcaaccaatggattgcatggcttgggacaggcagaaattattattctattgttatgtttgccaaatgaagatactattcctaaggacatcttcagactatttatcaccatatataaggatgctctaaaaggaaaatacatagaaaacttggacaatattacctttactgagagttttctcagtagcaaggatcacggaggattcctgtttattacacctacttttcagaaacttgatgatctctcattaccaagtaatccttttctttgtggaattcttatccagaagcttgagattccctgggcaaaggtttttcctatgcgtttaatgttgagattgggtgcagaatataaagcatatcctgctcctctaacaagcatcagaggccgaaaacctctttttggagaaataggacacactattatgaacttacttgttgaccttcgaaattaccagtataccttgcataatatagatcaactgttgattcatatggaaatgggaaaaagctgcataaaaataccacggaaaaagtacagtgatgtaatgaaagtactaaattcttccaatgagcatgtcattagcattggagcaagtttcagtacagaagcagattctcatctagtctgtatacagaatgatggaatttatgaaacacaggccaacagtaccactggccatcctagaaaagtgacaggtgcaagttttgtggtattcaatggagctctaaaaacatcttcaggatttcttgctaagtccagcatagttgaagatggcttaatggtacaaataactccagagaccatgaatggcttgcggctagctttacgagaacagaaagactttaaaattacatgtgggaaagttgatgcagtagacctgagagaatacgtggatatctgctgggtagatgctgaagaaaaaggaaacaaaggagttatcagttcagtggatggaatatcattacaaggatttccaagtgaaaaaataaaactggaagcagattttgaaaccgatgagaagattgtaaaatgtaccgaggtgttctactttctaaaggaccaggatttatctattttatcaacttcttatcagtttgcaaaagaaatagccatggcttgtagtgctgcgctgtgccctcacctgaaaactctaaaaagtaatgggatgaataaaattggactcagagtttccattgacactgatatggttgaatttcaggcaggatctgaaggccaacttctgcctcagcattatctaaatgatcttgatagtgctctgatacctgtgatccatggtgggacctccaactctagtttaccattagaaatagaattagtgtttttcattatagaacatcttttttagtgaaagaatgtgccatattacatattgcaacctaatttgttaaaactaactccagcactaaagctgaaatgccacaaacactaaaagtataaatatgtctgatttttgaaacacataagctttgctctttaggcaggaatgatcttttcaaatcattagcacaatatttaaatatctaaaaatttaagagatccatactttctgtagctttacaattaatttaagtactaaaaagacaaggatttcttttaagaaatttatagcatttactgtgttatttaaatgctaagccaaagtatctgcacttaggtatacctctttatgccaataatgattttaatgaaggctcttttcagatgtaaccttatgaaggaaatatctgctttgtgtatatgccagttagaatactggtttctaaagtctgtcaaattgtatttcagtggcacaaaaaccagttttgaggtcttagacttataattctttgaataaaactgataacttatttgtataattggagtggagacctacctccataattagataaactctttttggattataatcagaattttgccttttttcttctcaaattattacatatgtatgtattatatatccacatatatagttttccctgattaaatggatattaaaataattgcgggtgcttcaggactttttgcttctatatttaagtatattgtttttatagcaagaacatattctgaatgttttataaatctttaataatttatatgtaggtaatatttttgtatcacaatgcattatttttttcctcctttccttccaaactataccactgtatttaccacttctaagagtgactgacgacgggccagatgacccttgaagtagtcattatgtagcaataaatgaagcctgaaacaggtttttttacttccactttaatccttagaaatttcttggcaacttcgcatattttcattgacaccggtgtataagtataaatttaaatgaactaattacttttgcatattttaaattctttatatggtagttattttttataacaggatattaacataagttaaatcctatgtatttgaaattgttacagagctttcctctttacttcaaacagcaaaaaagtggggggcatattgtagtcctgtcatttaagttatgtaaaaaatttaatcattattttgatgctttaaacattctcatgtgtaatatatgtttttgtatcaaaaacactcatatatttcaagaaaaagaaattatgttaaatagccctgttttaagaaaaatatttatgaagcatctcaacttgaagatcaagtcaaagttataactcaggatctgaggtctcaagctaggagagactgagaattttaatcagtttgggcatatagtttggactgaatcacatctgtagtacttagccaaagacaatttggaggagaatatcagccttctggaagtagctacttcctgaacaatgtaaagtgtcgcagatattcaataaaatggcaacctgttaaaa

SEQ ID NO: 28247 - DNA, 6299 bp, Homo Sapiens
gaaggttctagaaaagcggcggcagcggctctagcggcagtagcagcagcgccgggtcccgtgcggaggtgctcctcgcagagttgtttctcgagcagcggcagttctcactacagcgccaggacgagtccggttcgtgttcgtccgcggagatctctctcatctcgctcggctgcgggaaatcgggctgaagcgactgagtccgcgatggaggtaacgggtttgaaatcaatgagttattgaaaagggcatggcgaggccgttggcgcctcagtggaagtcggccagccgcctccgtgggagagaggcgggaaatcggaccaattcagtagcagtggggcttaaggtttatgaacggggtcttgagcggaggcctgagcgtacaaacagcttccccaccctcagcctcccggcgccatttcccttcactgggggtgggggatggggagctttcacatggcggacgctgccccgctggggtgaaagtggggcgcggaggcgggaattcttattccctttctaaagcacgctgcttcgggggccacggcgtctcctcggcgagcgtttcggcgggcagcaggtcctcgtgagcgaggctgcggagcttcccctccccctctctcccgggaaccggatttggcggccgccattttcatggctcgccttcctctcagcgttttccttataactcttttattttcttagtgtgctttctctatcaagaagtagaagtggttaactatttttttttcttctcgggctgttttcatatcgtttcgaggtggatttggagtgttttgtgagcttggatctttagagtcctgcgcacctcattaaaggcgctcagccttcccctcgatgaaatggcgccattccgttcggaagccacaccgaagagcggggagggggggtgctccgggtttgcgggcccggtttcagagaagatatcaccacccagggcgtcgggccgggttcaatgcgagccgtaggacaaagaaaccattttatgtttttcctgtcttttttttcctttgagtaacggttttatctgggtctgcagtcagtaaaacgacagatgaaccgcggcaaaataaacataaattggaagccatcggccacgaggggcagggacgaaggtggttttctgggcgggggagggatattcgcgtcagaatcctttactgttcttaaggattccgtttaagttgtagagctgactcattttaagtaatgttgttactgagaagtttaacccttacgggacagatccatggacctttatagatgattacgaggaaagtgaaataacgattttgtccttagttatacttcgattaaaacatggcttcagaggctccttcctgtaatgcgtatggattgatgtgcaaaactgttttgggcctgggccgctctgtatttgaactttgttacttttctcattttgtttgcaatcttggttgaacattacattgataagcataaggtctcaagcgaagggggtctacctggttattttctttgaccctaagcacgtttataaaataacattgtttaaaatcgatagtggacatcgggtaagtttggataaattgtgaggtaagtaatgagtttttgctttttgttagtgatttgtaaaacttgttataaatgtacattatccgtaatttcagtttagagataacctatgtgctgacgacaattaagaataaaaactagctgaaaaaatgaaaataactatcgtgacaagtaaccatttcaaaagactgctttgtgtctcataggagctagtttgatcatttcagttaattttttctttaatttttacgagtcatgaaaactacaggaaaaaaaaatctgaactgggttttaccactactttttaggagttgggagcatgcgaatggagggagagctccgtagaactgggatgagagcagcaattaatgctgcttgctaggaacaaaaaataattgattgaaaattacgtgtgactttttagtttgcattatgcgtttgtagcagttggtcctggatatcactttctctcgtttgaggttttttaacctagttaacttttaagacaggtttccttaacattcataagtgcccagaatacagctgtgtagtacagcatataaagatttcagctctgaggtttttcctattgacttggaaaattgttttgtgcctgtcgcttgccacatggccaatcaagtaagcttcagctttcagtaattgttatcttagagattatgccacgtgaatgtattttattgtacatatggttaagctgagtaattcatattctgtattgtcatatatcaaatatagacatgtccaccaaaaattaaactttttaagcttcgagtgctgctggtcataaaaattaatttgtcctggttataagagtaatttttaaggttatttctaatgcatatctttaaatattttcgtaactgagagtcatatggagaaacttagtgtttgttgtaaaaagttgtgtttttttggctgagatacttagaatcaccaccagagggggcagttaagggaaaataaatgatacttttcagatattgaatagtgaaataaaaactttgggtcataagtaatgaaccaagagttattttctgatgtttaaaaatagaaatttgcgtttttaggttgtagggttgaaatttttggtaaagattctttaataatcctttgataatcacggtctacatttgtttatttttccttagaaagtttttttttttaattaataatttaagataatttaatgttgagtaaatttatatcaagcattaatgactttgaaacttgtgtagatcagctgaggcaattttttggtgtaacacaactaatatgcagtttagcatatggtttaaatttgatgtaagttttttttttccccccagaaaactttagaaactgttcctttggagaggaaaaaggtactctgccagcaggtcacctcatatttaagaatttaatttcctgcatacaaagaggaaaatgtaaataaaaattgaaatggtattttcctttgcagagagaaaaggaacagttccgtaagctctttattggtggcttaagctttgaaaccacagaagaaagtttgaggaactactacgaacaatggggaaagcttacagactgtgtggtaatgagggatcctgcaagcaaaagatcaagaggatttggttttgtaactttttcatccatggctgaggttgatgctgccatggctgcaagacctcattcaattgatgggagagtagttgagccaaaacgtgctgtagcaagagaggaatctggaaaaccaggggctcatgtaactgtgaagaagctgtttgttggcggaattaaagaagatactgaggaacatcaccttagagattactttgaggaatatggaaaaattgataccattgagataattactgataggcagtctggaaagaaaagaggctttggctttgttacttttgatgaccatgatcctgtggataaaatcgtattgcagaaataccataccatcaatggtcataatgcagaagtaagaaaggctttgtctagacaagaaatgcaggaagttcagagttctaggagtggaagaggaggcaactttggctttggggattcacgtggtggcggtggaaatttcggaccaggaccaggaagtaactttagaggaggatctgatggatatggcagtggacgtggatttggggatggctataatgggtatggaggaggacctggaggtggcaattttggaggtagccccggttatggaggaggaagaggaggatatggtggtggaggacctggatatggcaaccagggtgggggctacggaggtggttatgacaactatggaggaggaaattatggaagtggaaattacaatgattttgggaattataaccagcaaccttctaactacggtccaatgaagagtggaaactttggtggtagcaggaacatggggggaccatatggtggaggaaactatggtccaggaggcagtggaggaagtgggggttatggtgggaggagccgatactgagcttcttcctatttgccatgggtaagtagcttttgagttttacaattattattatcttgggagacatagctgcaggagtaaaagctttttaggatcatgttatctttccttaaaatctggttagatggataatttcataacctattttttttttactctttacttctgttgaaacaggcttcactgtataaataggagaggatgagagcccagaggtaacagaacagcttcaggttatcgaaataacaatgttaaggaaactcttatctcagtcatgcataaatatgcagtgatatggcagaagacgccagagcagatgcagagagccattttgtgaatggattggattatttaataacattaccttactgtggaggaaggattgtaaaaaaaaaatgcctttgagacagtttcttagctttttaattgttgtttctttctagtggtctttgtaagagtgtagaagcattccttctttgataatgttaaatttgtaagtttcaggtgacatgtgaaaccttttttaagatttttctcaaagttttgaaaagctattagccaggatcatggtgtaataagacataacgtttttcctttaaaaaaatttaagtgcgtgtgtagagttaagaagctgttgtacatttatgatttaataaaataattctaaaggaaattgtgtaattatagactttttattttaaataagttaaggagtgggtagtataattaaggtccgttgcaaagctgttgttatatttgtataagataaatgctggtcagatgtaagtgtgttgtctgcaattcatcaggattaaattatgtagataacttaagggatatctctgcaaggagaaacacctttttagatcttttagatgctgcttcttcaatgcaaggaaaggaaataaccccagcgaggtactcttcagggacacaggtctagtacaagagaactcttgacggctactaagttcagccagtcttaaaaaactgtgctgtttctacaaaactttaactacagtagtttataaggatgccaacgaaagctgagggtgtagagcaaaatagttctaagcttcagttaaacttctttaggtaagatcttatttacttttcctttcttaattttcctccctaaaagataaactaatactcttaaatggtctttcagtatagtggttcttacgtagtttaacatagctataaattgagtttaacaatttataaactcaagagaataatttttataaaccctgttttccaatctgtcatttacttaaattattttggttgtttttccctttttttccttcttttcccaccccctccccctccatgtgaagatttgggtgcttaacatatcatttttttccctgccggaattttagcattgatatgaaccatggacaagtatattctgctgccacaaagactgtaaagtgcttcatttcaacagctgaggcaagccaagtgatcattaataaagcttttcttggttccttcagtggtgttggtagtaaaatggtaggtaaaagttaggctgcaagttcaataaatcatgagatttcccatcgttacacccttgtgtattcacatttcttggatcaaacattttgagtgaactaggggtttttattaaagacatttgttgtatttatggttgtaactgtacatgcttatcaggatgagactgaaagaaggtagggcaaaaatggttgaatctattttcagatagtagttcatacttgagtgaagtgtcttgtctgcattatgaagcctggtatgtatccagtactaaataggtgggttaaatgtggtaattctagttcagtgtcttaccctgaagagaaagttgtaggttggctgttgaaattcattccttagatatgatcagtttgattgcccggctttattgcctttacaggaatgtgatactcagggcttactctatacaccaatgagtcttctttgatcctaagaccaccactgaagttgtttaggttcttttggacaaacatgataaacttcttcagatactttttttttcctttggcaggaaggtgtcttgctgcaggtaactaatgaagaagtggtcaaccacagagtcttcaagaaataagaaattctgtaccatctgaaagtagttcttgttggtgccttcatttaaaaagcactctttaaaataaaagggaaatgttttctgataaaaaaaaaaaaaaaaaaa

SEQ ID NO: 28248 - DNA, 5154 bp, Homo Sapiens
ggctctcgtggaggcagctagcgcgaggctggggagcgctgagccgcgcgtcgtgccctgcgctgcccagactagcgaacaatacagtcaggatggctaaaggtgaccccaagaaaccaaagggcaagatgtccgcttatgccttctttgtgcagacatgcagagaagaacataagaagaaaaacccagaggtccctgtcaattttgcggaattttccaagaagtgctctgagaggtggaagacgatgtccgggaaagagaaatctaaatttgatgaaatggcaaaggcagataaagtgcgctatgatcgggaaatgaaggattatggaccagctaagggaggcaagaagaagaaggatcctaatgctcccaaaaggccaccgtaagtgactataggattcaagataacaattaataccttttcttctgcttggaggatttggttttttggtcgtcctgtatttcatttcaaaatgaaatattttttaaaagatacttaaaagatggcaatacctctgcaaaccattctgtacttgggctttacgatgcagtgccagcgttgtctgtggttaaggctgaagtgtttgtgggctgtgcttgcacattcacagtggttgtctgttggcctttccattgtgaaggaggcactctagttttggttgtcagggtccttgaagtatgttctttatgcctttcctagtaattgaaagactgggacagcaccatatatatatgcgcgtatatatacgcatatgtattatatatgcatacacacacacagagcaccatatatatatgcgcgtatatatacgcatatattttatatatgcatacacacacacacgcatacatatttgagatggagtttcgctcttgaccaggctggagtgcaaggtgtgatcttggctcactgcaacctccacctcctgggttcaagtgattctcctgcctcagcctcctgagtagctgggattacagacatgcaccaccatgcccggctaattttttttatatttttagtagagacggggtttctccatgttggtcaggctggtctgaaactcccaacctcaggtgatccgcctgcctcggcctcccaaagtgctggaattacaggcgtgagccgcgcaccacatatttttctaaccttatatattttagaacctacaactttgtagcattgtatatggtatcatagattacttcactttagggagaagtcatagtggtaggagggagatgcttctcaggaatgtgggatttcaactttaactcaaattttttgtggtttctcatgtaatgtatgtaattcttccaaggtctggattcttcctgttctgttcagaattccgccccaagatcaaatccacaaaccccggcatctctattggagacgtggcaaaaaagctgggtgagatgtggaataatttaaatgacagtgaaaagcagccttacatcactaaggcggcaaagctgaaggagaagtatgagaaggtaaggtggggctggaagcctggactggtgaacaggcagtggttctgctatcagtaggttgcagggcatgtggcagctttgctgggctgagtacttagcatagcgctcaagggcccatccccctgcaaggtagctacgggtgctggtgttcatgcttttttttgacaggtctttgttttggggacaacttcaggcttgaaaaattttccttactctttaaggaaaaaaaaatgttaacagaggatttgatagtcctactaatgtgacttgaaggacacttgaacacccactaacttttaaattcgaatggctaagaaccaaattcatatatggaaacacttcagatatatatgatagcagcactgtcttacttgatttcaattcctgtcctcttacctgagatgaggactgcatgtttctactttgtgttaaaacagccgcatactcatttgaaatgtgtccctgttcctctaggatgttgctgactataagtcgaaaggaaagtttgatggtgcaaagggtcctgctaaagttgcccggaaaaaggtggaagaggaagatgaagaagaggaggaggaagaagaggaggaggaggaggaggaggatgaataaagaaactgtttatctgtctccttgtgaatacttagagtaggggagcgccgtaattgacacatctcttatttgagaagtgtctgttgccctcattaggtttaattacaaaatttgatcacgatcatattgtagtctctcaaagtgctctagaaattgtcagtggtttacatgaagtggccatgggtgtctggagcaccctgaaactgtatcaaagttgtacatatttccaaacatttttaaaatgaaaaggcactctcgtgttctcctcactctgtgcactttgctgttggtgtgacaaggcatttaaagatgtttctggcattttctttttatttgtaaggtggtggtaactatggttattggctagaaatcctgagttttcaactgtatatatctatagtttgtaaaaagaacaaaacaaccgagacaaacccttgatgctccttgctcggcgttgaggctgtggggaagatgccttttgggagaggctgtagctcagggcgtgcactgtgaggctggacctgttgactctgcagggggcatccatttagcttcaggttgtcttgtttctgtatatagtgacatagcattctgctgccatcttagctgtggacaaaggggggtcagctggcatgagaatattttttttttaagtgcggtagtttttaaactgtttgtttttaaacaaactatagaactcttcattgtcagcaaagcaaagagtcactgcatcaatgaaagttcaagaacctcctgtacttaaacacgattcgcaacgttctgttattttttttgtatgtttagaatgctgaaatgtttttgaagttaaataaacagtattacatttttaaaactcttctctactataacagtcaatttctgactcacagcagtgaacaaacccccactccattgtatttggagactggcctccctataaatgtggtagcttcttttattactcagtggccagctcacttagggctgagatgaaggagagggctacttgaagctactgtgtgattttgtttgtgtctgagtggcattcagatgaagtctggaggagttaggagaacgacataggcaaggttcagcagccttccaaggtataggaaggtgggtgattaggactgaggctatctaggtttaacttttgtcccacctccaccccctattttgtggggccaaatgcattgctaaacagcaatttcagagtgtatggtgtgtcaaaaattaaggccttattgtttttctctttcacccctaccccccgtgctcctggcacatatcacattatttgtggtgcccaacatttggggtcttgagcctgctgctggtctcctggatgccagtgagggtatgtgggatggggtggtggggtaggggacggtatcctttttttgctcctacttggaaacaccaaacaccccaaggaagatgataggctccatcttgggccacctgagctatagggcaggctaatggaatcaaccatttctgagcactaaatgtatcatgaaaagttgaatggcctgctcataagtttagctcattcactggaaatgtagattgatgttcaatgttaaactggaaggagcttggtttgtgtgtcagtggttatattagtgggtagtgtaacattttatccaggttggggtgaggggagatggccacagtagcaagtggtgacactaaataccattttgaaggctgatgtgtatatacatcattactgtccgtagcaatgaaggatacagtactgtgttgtgggtgagtgttgctattgcccagcattaatatttgggtgtgtatgtttgaggctatgaaacacgcaggagtgtttttgtgctattaattttaagagaaagcagctttttcttaaaattcactgttgagaaacttgcatgtctggaggcggtgtcctctccgccctgtcgggtcctggatgggtacgagttatggtcacggtcacagcctgatctcttatgtgttcatagccattcgctctcccatcagaactgtttgtcctgaatgtgttcctctagttctagaaaatgaccactaatttaaaaaactcggttgtgaggtttgcccagaggcacttgttccagaatttcccctcctgcttcagccatgtccttgtcacttggcattctaagctaaagctttagcttcccaattcgtgatgtgctaggccaagattcgggagctgttgccagcctcgtcaaatatggaagagaaacaacctgcggtcaaaagggagtgatttgttaagtggtgcgcgtctatctcataactagatgtaccaaccagggaagggccaaggatggaaaggggtaacttttgtgcttccaaagtagctaagcagaagtgggggagcagtttagccagatgatctttgattaggcaaacattgagttttaaagaggctgtcaagttgaggccacttggtccattagctggggcagcaagatcactactcaacgttttcacactgtggcaagattgctcttctagtggaataatgccctagtttctctgagatgatgtaagtggcatgatgttacctaaggcttaggcttagcttgatttctgggcccactgtctgtgttcttaagatgccaacctgttgctttttttttttttccccccatttaaaaggatagtacctactccctctaaccacctcaccccattcttgaatgacattttatccttcggaaagaacaaggctgtgatgtagtgactattgtctgtgtctcctgtgtgtgtctgttcttgtcacaaatgtatttggggacgttggatgcattcattttctgtaataaagtttcttaatcactcttcccaaaaagtaaaaaaaaaaaaaaaaaaaaaaaaaaaaaaaaaaaaaaaaaaaaaaaaaaaaaaaaaaaaaaaaaaaaaaaaaaaaaaaaaaaaaaaaaaaaaaaaaaaaaaaaaaaaaaaaaaaaaaaaaaaaaaaaaaaaaaaaaaaaaaaaaaaaaaaaaaaaaaaaaaaaaaaaaaaaaaaaaaaaaaaaaaaaaaaa

SEQ ID NO: 28249 - DNA, 4190 bp, Homo Sapiens
tcttgaggtagttgctgcaatgagtttaccaacattgtggtcacccaagagaacactgtacttttggagtataagagagtcagtgttttctaaaacagttgttcttagagaataataatgatatctaccattactgaaagatattttatttcaccctaaccataactatatgaggtaggtgttgggttctctagaggaccaaataagtgacaacctcattttctacctgagatctgaatccatggaaatcttttttaaaagattaaaagattgagagattaaaagactgctttataaatgatgttaaaagaatgtagctttttatttgttggcaaatgcacttcctaaccctgaacttcccctcccagtcacagacaatgttgggccaaggtagacctccttcacagaaaatcctgctcttgccaaacaagagtattggaataacagagtgaactgtgcttcctatgagcagtttgctccaagtgtaatttggaagggcagagctacacatccctagttccttattctcatcaaaagaatcactatgcatgagaggatagagagttgctacaagtattttgctgctggaagtccctttccacggaaaatatcgttaaaagcaggcacttttattatattttgggagaaagccacctatgtatatgatcactttcctcagagaatgacatttctgatattaatgctttcttgtaaagtttatgtggcagaggtgacagccccattgagcaggtcttacttgagatacctttctttccaatccaacatattcacaacttcttaattttcatcacctattcaggccttgatatgcagctttgagggtgggccagctttgcttaatgccttgtgtggtgtcttgccatctctgccgagcattttcaggcctgtgccctcatgactgtttctcttctacttgctattgaattgtttagaccggtgaaacctggccaatggggaggttgatctccctcttgtgtaactaacctgtcccaaaccaactgagactgcatgtgtgggatgatgactcttgagcctgtgggcaagccgtattaattcaagccacaatcccctctttagctctgatgcagaatggaagttggggtagctaattaagggctgcctgcctagtccaggtactgccattgtaatgttagaatctcacgtgtactctaaagagcaggtggaactcagtggccctccagtttaaaggcagccagtaccatcttcctcatcaatacctacagacttctcatccttcctcagcatagcctacattgacagactgacctccatagtaacagaccatgctgttccagatcaaagctgcttctgaaaagcttatcacatggaggaatagacacagaaggtgtattttttagtcagcctggctctcaggagggaagcaggaaagaaggagctaggctgtgcatgctcagttctctttctagactcacaaattggattaaggtgtttcttctctcccggggaaaagaatgtgtcctgcagagagcccaagaatattaaactaatagatatcctttcagaaggagaaaacacaaagagtagaggcaagagtttcatcctctcttccctattgaaaaagttcatccctataggcaaatgcttgatcaaacgtgctgtgttacatgcagctcctttgtttgtttgacataaccattgagtgagtaatggcagcttcttcattaaatggagaagttccagtattaaataagcaaatcagcaaaaactgagccagaaggcagtggagactgccaattcaatttaattttttttagttcaatttaatttttaaaaccccacagaaatcttctttggatgcttttgcctattagcctttaataaaagaaaaaaatgtaatgagtttctccaagtcaggtgtggtgtggtggaaaaaagaacgtgaggcttgaaagacaagttgggtattgaattctggctctgccgcttactggctgtgccgccatgggcaagtaatttaacctctgtaagccttagcactttgaagataataagaccaacctcagaacctgaggattaaatgtatgtaaagcacccagcctagagcctgatacatagtgagtaggcagtcaattcctgatagttattgtcacattttgctgctgctgaaggaaacgtatctgctggtaccccccttgcatgggtttgggtttatgggagcagcttttgctgcaagtctcctcctgtgctgcattgtgtggcaggatgactgggaagactgggcctggtcagcctctcatgctatgaaccaatgctatgcctcttttttttctcaactcaggttagagcacagtgaatgggactcttcccggactcctatcattggctcctgtggcactcaggagcaggcactgttaatagatcttacaagcaacagttgtcgaagggtaagaggaagaaggataaagagagggtgttttattatctgacagggctggctatactgggggcaaggagctgaggagaaggaatgtggaagtccagccactgagcagcgaatgagtctaaggctggaagggcgtggaagattagaacctggtggaatttgccaagttgttgactctgaggcaactttcctctcagaatacccctttctacagtggttgggtcagctttgcttaagtgcaagactagtaggagggaaagcaacatagccctatagggtgaaaactctctgactttcacatttttctttcagacccggagtggcgttggatggaagcgagtcctgcgttcactctgtcattcacggacccgagtgccacttctagcagccatctactttctaatgattcatgtcctgctcattctgtgttttacgggccatctatagacttagttgttactctttggaccactcccctcaaaacttggaattctctcacctctaacatcagaacatcaattccagtggaacagtcttcccatttacaggtcttctctccaactcttcacggaaagtgcctgcaaaaacagaggtggatacgaggacaggttggagctgcagggactggcgagtctgctttcttctactgccctgagcctgaacgcttctgcttaatctgagaatcacatttggtttgttgagcctaatatttgttgagattttgcaggaccctgatcttttgtggtcctgtaaaagatactgaggaatgtctttcagccaagccaagaggatggtttcaataaacctaataatctgaagttcagtatcattttgattgataactttctttgccttgtttgcctgtattttctcctgtttcagggggaaggtggctctgccataaacagagttcagggaaatgaacatgtcacctcataggacatctgatttaggtctcttgcagaatagggtggtgaaagctgaaggaactccctaggggttttagctgttagatcacatgggaggacagcatcttcttccctgccaatttcagatataattggagggagaatttcaggtcttagactataaggatagaatccctttgcttttgcccttgatcacatgtatactaaggtattaagtggcccaagtctttcctttcaccaaagggcagggagaagtgtctatggacagcagggttccaattcttgtcattccaggaatatctgaatattcctggaatgtggaccctgagacagtgctcaggggccactgggagccaatattaggcattgactctcagccaggagtctgactggtctaacaccacactgcaactcctgacctcttgaagtactaagctactttgctgttagtgacagttattacagtttctcagccccattgtctctgccctctgtggcaatggaaggagaatatagagaagacaaaattaaatatagatagacctgagaaggacagccaggatagaattccatttgtgcctattccctgcctcccctcccctcccccatcctaccagttggttattttctcattgcatacgtgatgtgttcactgcctagcctctccctaaagaagagagaagacaagtgggctgactgatctgctctaaatctactgtggtgattaaatcttggttacaacatcctgggaagtttcctgaacaactgtaaaataataaaattattttcagaatgaaaaaaaaaaaaaaaaaaaa

SEQ ID NO: 28250 - DNA, 8909 bp, Homo Sapiens
catgtgctttggatggaagcacatctggcatatgatgctaatcagtggttcccatacccctggcttcctaattttaatgtttgctcacagcatagtagattgacatcaaatagtggccgatgatgatgaaaataaaggtcaaataagttgagccaataacagccgcttttttccttctgtctgcgtatacaaagcactgtcatgcacacaatctattctgaccctcacaacaacccataagggtgtaaatagtatttccattttacaaatgaggatcacacaaactactacatggcagagcagatactccaactcatgtcttctggttgaagcctattgctttttcttttctaaacactttccctcagcaagttggaattagacttcacaagtctccttcagagaacacaaatcttttcttattccattcctgtttggttgcctacgtccaatctccccctccccagagatgccaaaaaaaaaatcctttaaggtatttgggagccaaactcaacttgttaaaatctcaaattatggagacaatcagcagacacaacctaaccccaattattttggcaggaaggttggtttagaggcagatccagcaatctgctttgggccactctgggtggggtaggtgaaataagattggtcactgttaactaattttaatattggattggccattggttatcactgattaccattctcccctggattttcacccaggactcaaaacttggttctgctaaccctgttcctttatgaggaaccttttaaagattcctttataaggtgggagttttttttctatgaacctataggggagaaaaaagatcagcagaagtcattacttttttttttttttttttttttttttgagagagagtctcactccattgcccaggctggagtgcagtggtgctatctcggctcactgcaacctccgcctcctgggttcaagcaattctcctgcctcagcctcccgagtagctgggattgcaggtgcccaccaccacacccggctaatttttgtatttttagtaaagacagggtttcaccatgttggccaggctggtctccaactcccaatctcaggtgatcctattgcctcgggctcccaaagtgctgggattacaggagtgagccaccatgcctggccagaagtggttacttctgtagacaaaagaataatgctacttaatcaggctttctgtgtgacaagaaagagaaagaaaataaagaagtttcaattcatccaattcttaataagaaatatgtaaataaaattttttaaaattacacttcattttaatgttgtatcagtcaaggtccctgcaagagatggatggtatggtacactcaaactgggtaacacaggagagttttcagaaagcaactaaatccaaaatactatcaaggaatcaatataaaaattgttaatatttttctcatactaaattttcaaaatattttgtgtctattacatttacagcacatcttaattaggactagctgtgtgttcacctcacatgtggcttgtagctaccatactggacagcacatgtccaaaaaaaatacacgtaaagttaaagtttaaaagacacaggaactaagccctcattgtctttcccttgggaggtagtttaaagagctatagatgctgtaacattcttgctattatttattatatatgacattattcctaaaaaagcttttgagatcctaggttgtattcctcaggttttgttgccttcccatgaagatgtgaaggcagggatgcctgttattcagtccaagatgcatgacaagagaccttgggaaagtttcatctggatttaaagattaattcttgatgcttacattccatactcaaaatgtaaatttgaatattaaaataaagatgatttttttttggagctagtcttgctctgttgcccaggctggaatgcagtggcatgatcatggctcactgcagcctcgacctcccaagctcaagcaaggctacaggtgtgcacctaagtagctaggactacaggtgtgcaccaccatgtctagctatttttttttctgtagagacagggttttcctatgttgtccaggctggtctcgaactcctgccctcaagcaatcctcctgccttggcctcccaaagtgttgagattacaggcgtaaaccactgcacctggccaagatgaatattttaatagctcacagaacaaagtttgccacataatgataaaattactatgaaaatatattccctttattgtcagtttaaaagatgaactgagtttcacccaaactggtctggcccctctctgattcaaataccaatagttgctctgattcaaattccaactgttagaacatgacagctgctcataactagctttgcttactaaccatgtttctttccatttgtattaggtcctttactttttataacagcctcaaagtttcatgaattgctgcagtaaacattgattttcatgtttgtgagtctgcaagccagctgggcagctctacttcaggtggtaagggtggatcagacctattccatatacctcttgttctccttgtccagtggtttctagggatatgttctcatgatgaaccccgcagaggctcgtgaaagtgagaggaaactaggatgcctcttaaggtcttggtcaggatggggtctcctgtcacttctgtcacaggctattgtaagtcatatgagcaagctcaataaaatataaacaagtcagataaacagtgggaggaatggcaaagtcatatggccaaggccatgagtgattaattttaacacaggaaaaaagtaaagcattaaatgcgattatttaatatacaatgtcttattaactgaaatataaaatgtgtttactgtaaaatataatctgtttatctcaccaaagaaatattatctttaaaaaatgtcattacttctaagacatcatcagtctgcaacttctttccatagccttaatcaggatgctgtggcagctcccacattagcctcgcattctaaactggtagatgtcctaggaaaccatacatctatgtatttttcttattttatacgtttaggacaatgtatagctaattacccaactttttatttgcatacaaatctaatacaactgaacacaatcagttttatcacaggtataatggatttttcaatagtgaggaggtgcctccatgagccttctctttagaaaagtggcattcaagactcttcatttgaagtgaagattgctatgtcttttgcattgctctattttacataaattaagttataaattgacactataatcaactgacaccatgatcagtgatgatgatcaccctcatcagcactagagttgacttgtttttataacccctttgcatgtatgttgaatagcaaagttcatcagagaacatgtattagtcaatggtaagtaagatactctcatctaagaaataacatcacctcttctaatgaagttctaagaagagagggaagaaaaagtcttgggagctagtcagggaatagtgtgtatttgcaattacctaaactgaactctaccatcactcctaacccagttcctcctcctgtgttttacatgattaatgccacccctgcctcaatgaaccaagatcagctccatcactgggacctccccattctgcctgtgcaatatttttcttttttatttctccttctaatattactgttattgctccagtaaagagctgtaatatattttacctggactgataccaggaatggtggtgttgcttccaatctgttgctgctagattaatctttgcaaagcacaggcttaatttcattgctgctcaactaaaaccactggtggctttccattgcctacaaaataaagtcaacctccccatcagacattcaaggctttcaatgatccatggccgccagctctctccaggctcatatcccactccactcctctgatgtttcctacactacactacactatactacactacagccaggtagaatgactgttcacccaacaccactcaggttgtcttctcaacttggaatactcttgcaccttcaaagctcatttcaaatgccccttcatttgtgaagccttctccaaatttccaagtcagaatgtctcttccttgtgctaccacaaccctttaactgagcctccattagtgcactgagaccattctgttcagtgtctgggtgaagcttcctggtgaaaaatatgttacctatttctttctgaaaagttggattcagggatattatcacggacctaaggtaatagttctagccaacccccctgtccactgccaggccgactacaaacccttctgttgctggcgagctggtccgcaccactagttctgcttcactctatttatctcttgatgtaaccatcttctttctccaggttttaagaaccagcccaactcctggttccctgatgaagcttttattcccctagccacatggaacttttcctttttggaacatgcctttagtttctgtgtagtttgccatgcagcacttcattgtacacattattaaaacagaattttaaggattagaatgaaccttaaaagatcatgcatctcaaaatttaatgtacatacaaattacccagggattttgttgaaataaaaattatttaattttaattaatataaataattcagtaggtctggggtgaggcctgaggttttacatttccaacaagctgccaggtaaagccaatacatctgtccaggaatcacactttgcgtatcaaaggtctagatgacattatcattccaaagagtttcttttacaggctctcagatcagtgttcatccactacctgactactgtcattcacaggcattctgttccacagcaggccagctaacgtggtatttacaaagctcactcctcttatacaacaatccaagtgtttcttttgtcagttgtctgtgccccaggagatccctctctgccttgccttgccctctgcctttggagaccagcacctcatactcagtgaaggcctggagtgcttaagagggatttcttccagctctcttgccctggtcttcagtgtattagatgtattacctccatgctctcagtagaggcccataggaaagagtaggtaggttatgccagctcacacgcatcctttaaaaatggtttagaagtttagctggtttcttattactcctgtctatggatgtttccttctgtcactctactagggatgaaacagctaatcatgttcaatagttacatttagattggtttttaaaaactatgattgtattagttcgtttccatgctgctgatagagacatatctgagactggaaacaaaaagggtttaattggacttacagttccacatggctggggaggcctcaaaatcaggtgggaggcaaaaggtacttcttacgtggtggcatcaagagcaaaatgaggaagaagcaaaagcagaaactcttcataaacccaccagatcttgtgggacttattatcacgagaatagcacagaaaagactggcctccatgattcaattacctcccactgcgtccctcccacaacatgtgggaattctgggagatacaattcaagttgagatttgggtggggacacagccaaaccatatcattcctccctgggctcctccaaatttcataatcctcacatttcaaaaccaatcattccttcccaacagttccccaaagtcttaactcatttcagcattaacccaaaagtccacagtccaaagtctcatctgagacaaggcaagtcccttccacttacaagcctgtaaaagcaagctagttacctcctagatacaatggggggtacaggtattgggtaaatacagctgttccaaatgagagaaattggccaaaacaaaggggttacagggtccatgcaagtctgaaatccagtggggcagtcaaattttaaagctccataatgatctcctttgactccatgtctcacattcaggtcatgctgatgcaagagataggttcccatggtcttgtgcagctccgcccctgtggctttgcagagtacagcctccctcctggctgctttctcaggctgatgttgagtgtctgtagcttttccaggcacaagatgcaagttggtggttgatctaccattctggggtctaccattctggggtctaccgttctgggactgtggccttcttctcacagctccactaggcagtgccccaacagggactctgtgtgggggctctgccccacatttcccttccacactgccctaggagaggttccccatgagggctctgcccctgcagcaaacttttgcctggacatccaggtgtttccatatatattctgaaatctaggcagaggttcccaaatctcaattcttgacatctctgcacccacaggctcaacatcacatggaagctgccaatgcttggggcctctaccctctgaagccacagcccaagctctatgttggctcctttcagccatggctggagcagctgggacacagggcaccaagtccctaggctgcacacagcacagagaccctgggcccagcccacaaaaccactttttcctcctgggcctctgggcctgtgatgggaggggctgccatgaaggtctctgacatgacctggagacattttccccatggtcttggggattaacattaggctccttgctgcttatgcaaatttctgcagccagcttgaatttctccttaaaaaaaatgggtttttcttttctactgcatcatcaggctgcagattttccacatttatgctcttgtttcccttttaaaacagaatgtttttaacagcacccaagtcaccttttgaatgctttgctgcttagaaatttattccaccagataccctaagtcatctctctcaagctctaagttccacaaatctctagggcaagggtgaaatgctgccagtctccttgctaaaacataacaagggtcacctttacttcagttcccaacaaggtcttcatctccatctgagaccacctcagcctggaccttattgttcatatcactatcagtatttttgtcaatgccattcacagtctctaggaggttccaaactttcctacattttcctatcttcttctgagccctccagattatttcaacacccagttccaaagttgcttccacattttcgggtatcttttcagcaatgccccactctactggtactattagtccattttcatgctgctgataaagacatacctgagactgggaacaaaaagaggtttaattggacttatagttccacctggctggggaggcctcagaatcatggcaggaggtgaaaggcatttcttacacggcagcagcaagagaaaaatgaagaagcagcaaaagcagaaacccctgataaaaccaccagatctcgtgagacttattcactatcacaagaatagcatgggaaagaccagcccccttgattcaattacctccccctgggtcctgtgggaattctggaaggtacaattcaagttgagatttgggtggggacacagccaaaccatatcaatgattttgtactttaaccagctgaatggaagtacaatctcttgctatatgacacaataattatttgcaaaatgagtaaacatatcataaggaaattatttttacaaggtttgaaacctgaaatgcagtctattatcatacataactaaaaatagagcctcaataaacagattcccagttttgaaaatgcaacatttgtactccacattgtcagttttcttaggtatatttataaatactcctataaaaatgtaaagaaacacataatgtagattgctaattttataataacacaagttgattttgacatccaacttattaattatgaaatgacttttggcctagtaacaatgaaaatgggggcaaatacagataaatggtaattcttagaatgaactactcagcaccaattctaagtttttcttgatggtaaatcataatgttccctttctcctcggttctgcaatctataggcataccataattgtaatcaatagcttaaaaatatgtctctctgtcctattctgtatctgtatctcttggatttttacctttgcaatagtcaactgaaccatcttcttggagtactcatgaagatggaagtctacatggagaatacaggatgaatccactctgtctcctgcagtgaagtctgtttgaaggatgtatttggctgtcttctggacaggccattctaataacagaaacaaacaagttattttaaaacttattggaatattcaaatattaaccaaagtagaaaaatataatacacatccatgtgcccatcacagaacttcactgattatcatcatttagccagtcttgaagaagcaagtgctaattacaatcacaaatgaaacaagattcagacttcatgaagagcactgcgctataataaaagaagaaatgagcacatacattcttttactgacagtcaaatggtgaaggtgggcagaatcattatgtgatgcaacatggcaaaagtatacagacagtgcatccagaggaaggcaccttgctgaatgactagaatggaagtaggagacattttgcaggcccccttcatcctgcagggagaaccagaaccacagcagctctatttgcctattcctctttaaattacaaagttaaaatttgggagtagtagaaaatcaattggttatcttatagagtctcctagaatatttcattggcattgagaaggtggaaaatgcaaattatatactttaaaatgtaatttttgcttttcacatatgcttaaagcctaaaacctcttaataaacttcttctgaaataaaaaaaaaaaaaaagaaaaaaaaaaaaaaaaa

SEQ ID NO: 28251 - DNA, 8476 bp, Homo Sapiens
ggggcggtggcgcagagaggggtgcggagcgggcggaagaggcgtctgtgtcgcagcttggtctcagaggagcatcgctgggaacaacgactatcgtctattccacaagatgagtaacagccaccctcttcgcccctttactgcagtgggggaaattgatcatgtgcacattttgtctgaacatattggtgccttgttgattggggaagaatatggcgacgtcacattcgtggtggaaaagaaacgttttcctgcccacagggtaattttagcagccaggtgccaatattttcgagcattattatatggtggaatgcgagagtctcagcctgaagcagaaattcctctccaagacaccactgcagaagcattcacaatgctactcaaatatatctacactgggcgggcaacgctgacagatgagaaggaggaggtgctgctggactttttgagcctggctcataaatatggatttccagagctagaggattctacctctgagtatctctgcaccatacttaacattcagaatgtctgcatgacttttgatgttgccagtctctactcacttcccaagttaacttgtatgtgctgcatgtttatggataggaatgctcaggaagtcctctcaagtgaaggtttcctctccctttctaagacagcacttttaaacatcgtgttaagagactcatttgcagctcccgaaaaagatattttcctagccttattaaactggtgtaagcacaattcaaaggagaatcatgctgaaatcatgcaggctgtgcgtttacctctcatgagcctcacagagcttctgaatgttgtgaggccttcaggactgctgtctcctgatgccatcctggatgccattaaagtgcgatctgagagccgggatatggacctcaattatagaggcatgctcataccagaagaaaacattgcaactatgaagtatggagcccaagttgtaaagggggagctgaaatcagccttattagatggtgatactcaaaattatgatttggatcatggattttcaaggcacccaattgatgatgactgccgttccggcatcgagattaagctaggtcagccatccattatcaatcacatacggatactcttgtgggaccgagatagccggtcttactcatacttcattgaagtgtcaatggatgaacttgattgggtcagagtgatagatcattcacaatatctgtgtcgttcttggcagaaattatattttccagcccgtgtctgcaggtatattcgaattgttgggactcacaacacagtgaacaggatttttcacattgtggcttttgaatgtatgtttacaaacaaaaccttcactcttgagaaggggctgagttcccatggagaatgttgcaacaattgctgattgtgccagtgtgattgaaggagtcagtcggagccgaaatgccttgctgaatggggacactaagaattatgactgggattctggctacacatgtcaccagctaggaagtggtgcgattgtggttcagttggcacaaccgtacatgattgggtcaatacggttactactttgggattgtgatgatcgaagctatagctactacgttgatgtttctaccaaccagcaacagtggaccatggttgctgacagaactaaagtctcctgcaagtcctggcagtcagtaacttttgaaaggcagcctgcctccttcatccgtatcgttgggacacacaacacagcaaatgaggtgttccactgtgtccactttgagtgtccagagcagcagagcagccagaaggaggaaaatagtgaggaatcggggacaggggacaccagcctggccggtcagcagctcgactcccatgcgctgcgggcgcctagtggcagctcactaccctccagcccaggctccaactcacgctcccccaaccggcagcaccaataaaggaggcagcgggcctggtgtgacttggtgggctcgggcaacggcaggaaacggtctcctccctgagcaggggtctctgttgactgcccccacctctgcccctttccagggaggagccgacctagctgcaaaagcagacaccgaacaggttttctcccaaggacagaaaggggctgctttgttcttctcaatttatccaaatcaggcaggtctcaagggggagaaaatgggtcttcaatcttcatcaagtccaccattaacaccctacctctctaatctagcccaggcgcagggaacaggaggaagtcatagacaggcctgtgttggaatacaaaaatggcacgcaaacactcaggcggaggagaaagccattgggcctttgctacctggaggcaccctttaggaatgggcctccatagagtgttcattctgctggaatacattgccctggcaactaaatgattttttatttgttttagttattctccactcagtgaatcataggtgttccggatctatttgaaatgctcaaacagcaaatcactagttttaatcccttttgatgttataattttccttccttggttttgaacggttcagcttgcggggacagagacccatcgtgcatgtctcctaaatgagacacggatgcagctcatcctggcacttgggccacagaggaagtgccacaaatgcacacaagcaaatcaacctgtggacactggagttaatagtcactcgtgtggctgagttactcacctgtcattcctgacatggatccagcctttaagcttgggaggctgacaaggaaatagttactatgcccgctgctaattcactgttccgaagtccatgtagataaacatataccgagttctggcgtggccaaacctgccggggactgccgtggcttagctgcccctccagttgtgtttatcgaagcattggagaggcagccacctgcccatcagcgtcaggaacgcagaactgggactccgtgcttcccccacaccacagtactcaactggggactgaaaaatagcagttccaagaagcttttctcctaatcctcatcaaaaggacctcatttgacgatggtggcttgatgtggctccgtctcctacttagtgatttccattccagtgctgcctgccctgggtaactgcgcacaacattgcctgcccctccgctgtccccagagctccggcctctgtcgccatcagcatcagcctgggagtctccccaggacggcatggcacgtgagcagcactgcagtccttgggtcttcggcgccaacctgcaaccctgatcaaaggagggtgagggcgtgggagtttcctttcaggtgtgtcaaagacatatcagctgcgctctagaaagagccaacgggtcagccgcttcctcctagtttaacttgattttgagtgatttgtccatatggaaatagtagggtagcatcaaactgcgtgattaaattggaagactgtctttccgtgtgaacacaggatggcagacatcagagggctaccggggcagggtggacacgttcctgaggagaagccagggtctgcagctctccatcctccccggtagctccagctgcagggctgagctgcttcctatcccctcagctctgatctctgccacttccctgttgtgtgggagagtggaacactcctgggatgccaggcatttcataatgggaggaggctcctgtaaggaacggtgggcgcccgcttacagtggggggccctccagcatggttgctgactctgtcagcccccagccccgggttgccaattagccagagagctcctgcacacacagcacttccttccccagtgtgttttctacccagatggggacaaaggagccagacagtcatatcaagggcagagttcaaacattttgaaatgagccattcacatgcttctttttaaacatgggcatcacctgcccagaggcccttggcctgaagcagcatgctgctgaccttgggaagagacggtgggctggtgggggtgctggaggagctgcccggccctgcatctgcaaccctccagtcccctgcccacagagcacgcagagccctcctgtgctccaggaacgagatagcagcttggcaactcggcctcgcatctgaaaaggaatacgctgcaaagcctcggccctagacccacatctgcagctccctggcctgtggcggttctttccttcggggcatgcccttccagatctctgtccctcctgtcttccagcactttaaagatgccccttatcatcagataaagagaagtatggggacgatggggtggcactaacagtagatgtcattggtgaggactgatggcaaagtctcattccctcacagccgcgctgccagctcgcctccccctcgctttgctgggagcctgccctggactccaaaaggacacgggttcacctcctttcccaggctggaggggtactgcccttccctgaggggccttctgactggggcaggaactcttttcgtgtgtccagctgggcctggaggccaagtcaaggtgtgtcacaccacacaccagggcaaggacctcatctccagggaacagggacaagtgagtggctaccagaaagtccccgggcagcctggagttccccagagcctggctggtcctacagagcacttctcccctgggccaccaggaccaaagcgacctaaacacttgaagctaaaagcaagtgctgatgatgggatgggctggcacgtggctgggagggctcctgggcaccacagagccctcagcccagcagagagtggaggctcagtccgcggggagtgggggttgtgaaggagacatggccaagcccctggtcggggagataagctcccccatgcccaggccagccccaggggcaacaagccaacatggagagaggtggcaggtgaggctgacaggtgggtgcctgtggcctgggcccatgagggcaatggtcctcagtaaccaatggaaaggacacaagggcgccgtggtcaccaccacccaggcaatgaaatgggaggtggccagcacccccacccttcacttttcattattattattattattattattatttttttttttttttttttggagagtagaaaggcaacttcattggagcttttggggaaaaaagccttcaaagtcaccttctggcagctctggggagggtcatttggggtggactgagagtgtagggcaggtagggtgtgtgccgggcagcagctgtgtccgtgcagccagcacccagcagggcagtctcacaggagccgttgtgagcactttggacttgaagcagctatgaaccaccccccgcccccaccgtctctccctctcacacacacacacacacacacacacacacacacccgttttaccattttctcagtgctttttctgctttcattcctttgattttagttagaagcacaagccatgatggatgtgggactcttctcaattgctctttaaattgtcactttttaaatcctattaaatgaagtgtcgattcctgacaaatacattaaaagtgttttattcctagaagagttgggaaaagaaattattttcagcaagagtaggatgtttgttaaactgattccttggcaaaaaagagaaaaaaagcttttgaattgtgcaaaaaattgcccagtattatgctgtcgccccagttgtcaaactgctgtgcagatggctccagcccagtcaacttcaccttctttttaatttagaagataacaaagttgtaatcacttatcctttccagagccaagggggaaaaggaaggtataatctacaataaaaagcgagcgttctgtgtactgaggccacttggtgataaagaaatggagcgctcccctcacagacttcaattaagaacctccctttggacagggaagagaggtgtcaaagaggaaaagaaaattaaatttgcttccttccaggagtttttcctcattagtgcttgcttgtcggtgttattattttaatcttaccttctatgtggtgaccagctcctccgagcgatgcccaggtcgggcacggcccgggcagggcaggtctgcagcgatgccgtggcagaggtgggcatactccatttgttttggcagctgcagccattgattctgcatatttttcctgacaacagccccggcaggagttcagttaggaatttaaagtgcagttcatggttctgtgccaccgtggcttttattattataatattaaattagaagttgtcctagtgcctggtgtttgctcagagtttccagaagagagggaagggcaaggtttaaatggcatgcaggacaactggaatgcctccatctctctcgctgacacggatccagtcatacctggggctggatgggatttggaggccctggtcatttgcagagtgaatggtgaagggcgcggaaaaggtttgcttggaggaaagaccggttgcagaggcgaggcggagggaggaggggcggaggcagcaggtctttgtttgtggtaggtctctggcttccatcagggaggaggaaagaggctgtgcccctcctggctcttggctgcaccactgaggacgctccgagggacagcgtgctcacccatcctttgcacggtgctggccccaagccccacggccttccagctaggattttctgctgggctcatgcagaggcaggggacaggtgcatggaagagccgccccacccgacacaccattgtttgaaaatcactgttctctttactcacttaaaaaagtgtacagggaacacctgttcctggcataatgctccaacctcgcggaaggggccaggtgcccttcatctggctctggctgcttccgacctgggcccacgtcatcgttcacgtcctctgtgaccaccactggtcacggtgctccctggcccagcctccaacccacccagcaccctggcatctcccaggccagtctgctgcacccagcgagcttccagtcagaagccaggctgaacggccctcctgccccatcagcttcgtgtcttctttttttttaaagaactgaaatagtccccaagaggcctcatggcctgaagactcacaatcatccacctgtaatttatgataaatgtctgggagcatttaccatttgcgtccgtgagtatttatagccctgaatgggcgggggggagggggggtggaggaggccctgcagccaggagctacacacctgtccccactagtgtcccctggttggcagagccccctcagcctccccaaggctgtcactgcggctgtgacagctgaggagtgccgcctttgaaagccagtggacagtcgctccactagggggagaggccctggccctggcgcagaggaggcgttgcgaggcgggacgggggctggaggggctgagcagccttcagggcagggactgggccctgggtcactggagacgttgatattagtccatctgtctgctgccaaattgctccccaccacatgagccccaggggtttatgccccaggaaggcgagggtgcccatctgagcggaattgggaggggacggcaccagctcatctccctcagggcctttgcctcctggtgctgccctggtggctgctcctgcaccacagcccctgatggctgctgctagtcctgagttgctgggtttacccccagcccacacttcccacctaggcctgagggtgcggccagtgccctagtcctagtcactacaggagtcattctgagacctgctggaggccatggggtcttcccaggcccctcaatcagctgcttccagggtcagcagggcagggtgctgccagtaaggtcctcagggagcacagcccggccgcccaggctgggggatactggggcagagcttccaggtctgtggggcctgatctctccccaaggctctccaggccttggtgcgccctccacggtgaccttcagagaggctgcaccccctcagaagaacagtgagaaatccctccatcacacgctccctggtccttatgtccctgaggccacccttccccaccccccagtgcctggagaagcgtgagactctggaggggcgccaggaggccaggggtcctcaggactaggcctggagctcggcccaagagctgcttttgcgaagcctgtcttgaatccggattcaccagagaacaagagcctcccagcctttggcgtttctgggcctgtaaagatgtgtgtacctcccaggccactctgatgcaagggcagggaccatgccaggcctgggttgggaatggctctgtgactccagaagctccgtctaaaactccaaagatgcccaaaaggctgtgctgctatgtggaatgtgtattatttgtgagcacgatgcggcttcttcctcattttgcagagcaacctaagcgggcagatgtacaaaccgtgtgttcgaaacccctgagtccatgtgtgtgaaaatgcaggttttctcttagaaataaagtggtgacttgtgctgtaaaaaaaaaaaaaaaaaaaaaaaaaaa

SEQ ID NO: 28252 - DNA, 5650 bp, Homo Sapiens
gaagcactggtatcaacgcagagtgcccattatggccggggaagaatatgaaaataaccagccacagcaactggatgatgctcgcaacaaagctgacaatcaagaaaaggcaatacttaatattcaagccagatgtgatgctagagtacaaaaccttcaagctgagtgcagaaagcgccgtcttttactagaagacagtaaaaggttggtaaatgaattgaatcatttgaaagaaaaagaacgccaatatgaaaaaaagcaagcagaaagagaagtaagtatcaagaaaaataagtatttttcaaacttcctgaagtaaaatttaaagtaatatttggttacagctgaatgttggatctagttgaatataaaaaagatacatatgataaatatatctgctatatcagcttagaaacattccttttttccagcaagtcaaagttagaactgagagatgctttcctctgattaaagtcaatgtgtcacttataaaattttaagttataaaatgttaatatagactaatattaataatgtagtcttatactgctgaaataataattttaatgtatttatgttgcaacattttaagaccatgataaatcagatatatggaaatgctcatacctaaaatggtattttgaaattgattcaattaaatggggtactttgacagttaatttcagatttcctagatgaactgaagtgtattccctatttcataattacttttcttcagtagcttgaaatatgtctttgttggtaaaattttgtttttcttcatgtcaatttgacttaaatctgaaactatttcaatctcaaattatgtagagatatgatcattctattctttaaaggcgtctaattttacttatattataatatggggaaaatgcagtaaattttagccaaatcatgtttgattttatcttcccactggcatttataatttactttcagtttttaaacaaagaatttgctcataatttttatttcaaggctcaattactatcatttggatataactttgtccaggacaaagagaggcacagctatctgtgatttattagtttgacactggatccccgttttcagactaaggaggatttcagactaatgaggagtggcaggattcacgcagagtaggaatggagtgagtcagggaggagagatacagcagctgagtcagggcaggaggtggagggcaggttacttagagcatctaaggccactggagttttacttttcttctgagatagacatctattggaaggatttaagcagatgatttaatgtgaggaactctgaggttgatttgagtttgtaataaaaaaaagagggaaatcattccacaatgtagaatttaccaccatcagtctcacccacatactcatttctttttgagacttcagaaggtttttaagcattgcagattcatcaggggaggaatgactagtgggctgaatatgctatgtgaataacaataccagtttggcaggaagataacaccttctgtatccttaactggattcagtaatgaacagggacgtgtacacatgaggaaaagaaggtgaatcggtctgtgtggtggtatttttcaaagtgtatgctttagagttaaatattattaatggtttaataataaggtgatttgtaaaatcagtaacaaaaataacatcaggtagctgtgagacagctttaacaaaaatgagatgatgtcttaaacaaacaatcagcaacaaaagctttgctggatgcttcatcgcgtcactgcatctatttagaaaatgagatgcaggattcaaggaagaaattagaccagatgagaagtcaagtatgtatgcaactttgcacgccaacaactgttaatctgtagctggttaactaatataaagtgttttggggtactaattttagtggatggctttcttttgtatttttattataattaattttattaaaattttatagtggatggctttcttttgtattttccttattattaattttattacaattttattataatgccacctataccttaatctctggctttcattctgccgttttttatacatatgtttttttcttaaatatttaaccttaggaaagttgagaattatgcatcatttctcacataagttgagagagttttttttcctgttaaacagtctatttttaatgatttctctattggcatggtgaggcaagccagattaattcagaggataatgtctaatggaatgtttcagaaaattatcttatttttagtctctacttttctgaatgtataaagaacgtgtgtatacttatttcatagatttcaggttaacttgttcagaaaggccattttactgaataaatttttatttcgatgaaaatccttactctctttgtattgggctcagagagcacactctgtctctatatgaatatggacagtttagcatttgccaacatgtatctattttctcttatttatagaaaaagctaaactaaaatgggggttatagaaggtcagcaaaggatgggtttgagatgtttgggttggttgagtgggcatttagacaacaagccttctcctttggcgtgtttaatggacatctttgcagtttaagatgatgcttttaaattacttctctcctaatgatgacttgagtcctgctattcaatgggagagtcaataagatcctgtaggatcttatttggaactgactttgtcgattttaattttgttcctgcttgtttttaaattttcttgttgtttccctagaaaggaaagatgacgcttggttttaaatatttaaaaatgtgcaagttgctttgctataataaaactaaatgcatacatacaaaaaaataacattatagttgatgtggtagtgtttggaattcaaaatataaatgcttagcatgaggtaatcctttatctttccacattttaccagtttgtaagtttgagtatgtaactgataaaatgtaattcaaaagcaagaagaatgttgtgttttagtcctagagcaggggtcagtgaactttctgtaaagggccagatagtattatttaaggctttgtgaaccataagatccttgttgcaataactcagccctgtagttatagcacaaaagtagccattaacgatatgcagattgaaggggtgtagcagtgtcccactaaaattaattacaaaaaaacaggtaatgggatgatttctcctacattatgaccttttttaaataaaaaagattgtgatagtctaaaatattttatatatattttgttgattcattcatctactgatggacctttaggtcatttctaaatgtaattttttttaattctttgttttagcttcaagaaatacaggatcaacttacagctactataagatgtactaaggggatggaaggcgacgcacaaaagtaaaatttgaagcagcgcacaaaataacttgagtatttataaagcaaaagagcactgtagtatgaaaattgtatcagttatgataataagtatgtctttgtgaagccaaaaaagtttcatttgtaagctgtattgaaatacatcatttttctacattattcctaaattttgcatattatcgacaaaacacagttagaaaaatgacacagtagcccaatcatctacttttgtgatcgctaagaatttgtgtaattataccttcagaagtttgtttagaatttacatgataaaaaaaattatgtgtgagagtaattattttaaaatgcacattttaggcttgaagtagaaaatgccatgatgagaaaaactattaaaaaacaggatgaccaaattgagcgacttgagaaaatcctgcagcgttcaagtttggtaagctgatctcttaatttctgtcatactgaaaaggaattttatttttccagtaggatgggttaaatatcccttgtccaaaatgcttgggaccaaaagtagatttttttcagattttggaatatttgtatatacctaatgaaatatcttggggaaggtacctgagtctaaacatgaaattcatttatgtttcatatataccttatgcacatagcctgaaggtaattctctacaatgttttacagtaattttttgcaggtaacaaagtttttactattttcaccagagcctgtcacatgaggacaggtgtggaacgttgcagctgtggtgtcatgtccgtgctcaaaaagtttcagattgtagagcattttggatttcagatttttagattagggatgatcaatctacaatacagatgctccttgacttacagtgggtttacatgataatgtctcttgtttgactgaaacattataagtaatatttgctttatttcagatgccacaggtgttcaagagctagatgaaggtatgttgccaaaatttatgaattaaattcaaatcattgatttctgaaataaactctaagtagtgaacggtattcctctcaattgtttggttaataaatgctacattaaatattttttcttacacacatctagtgaaagatgtgaaaacataaacattcatagtgaagagtatacttatgctttgttaattcttcatgttccatagctttaaaaaaattgcaagaagtctgtgtatccctttttttctggccctacacttttcttctgccacccctatagaactgtcagcctgcacactgaaactgttctcagaaaacaaaggcttcatcaacttctcaaggttaaggtagtgatttaaggctaacagaccccacactcatgtgataataattagttaagcaattacaggtcacaagcagtcacttgtccagtgacattttaaatctctagtcatgactttgtcattggtttacttttgcccctgggaaaagttgaaaattccttagcatggaatcaaaactctcacatcagtgtggttcttgtcaggttattcagccttctctttcgccacttaccatactctgcacctttgttctatcatccagccaaactagactacatggagctccacagtgatcgtcttcacctccagctctttgcatttacttcttccctctatcctacatgtgttttccttccctttcagatatcaacctatgaattgcctctaccaaaaagcctacaatattgacacaaacctgggctagtatcccttctatgtcttctaataagtgctgtcttatgcctgtcactgtatgtatgactctgtatgggaattgcctgtttgttttttcagattatagcaaacagttgttgaggggtggaccatatcatctttatcttgtaattccagtgcttgtcctagtaccttagcacatggttgctgaatacatgaatgaagagtgagaaaccagaagctctgatatttaactgccgtgataatgaattcaatgtgcaactatgggcaaattgtatttaatagtaattgcatattgtacatatttttcattcttattaacactgataaacttttcaacttatactgactttaataaaattgtattactaggctattaacatgatattttgtttcccattaaatgtgacatgcaaagacgtttattaaatgaaaatatttttgtaaaaaaaaaaaaaaaaaaaaaaaaaaaaaaaaaaaaaaaaaaaaaaaaaaaaaaaaaaaaaaaaaaa

SEQ ID NO: 28253 - DNA, 2060 bp, Homo Sapiens
gggttgcatccatggagcgagctgagagctcgaggtgagcggggctcgcagtcttccggtgtcccctctcgcgcgccctctttgagacccacggcattccaaccttcctggaaatggggggaacatggccgaggcgcgtggcgaggcagccccctggaggccccggagtggcgacctcagtgttgcagcgatctcgtgccccttgggtgcgccttgaggccgagtacagaacctgctaaggccatcaaacctattgatcggaagtcagtccatcagatttgctctgggcaggtggtactgagtctaagcactgcggtaaaggagttagtagaaaacagtctggatgctggtgccactaatattgatctaaagcttaaggactatggagtggatcttattgaagtttcagacaatggatgtggggtagaagaagaaaacttcgaaggcttaactctgaaacatcacacatctaagattcaagagtttgccgacctaactcaggttgaaacttttggctttcggggggaagctctgagctcactttgtgcactgaggtgatacaatatttttatccactcacttgaccccttagagaaacctctctgaaaattaattggaatcattattattttcagttttctatctcaacatctcaacttctagcttctgaattctgttttgtctcgctgccaatctaagtcatagtacttctgaaatgtgagcaataaatgaatgaaatgaagcaaatagtattgttaaaaaaatggttacccttattaaaacagtaattctcaattttaacctaacatgtagataacaaatgatagttaccattggttttcattatcaatttttagggaaacatttcaccaaagcactatttaattatagcacagatatgaaatttttataaataattatatatatatatatatcttttttcttttttagacagagtctctctttgtcacccaggctggagtgcagtggcacagtctcggctcactgcaatctctgccttccaggttcaagtgattctcgtgcctgagcctcctgaggagctggtactataggcatgcaccaccactcctggctaatttttgtatttttagtagagacagggtttcaccatgttgaccaggctggtctcgaactcctgacctcaggtgatccgaccgcctcggcctcccgaagtgctgggattacaggtgtgagccatcatgcctggctgagttaaggatcttgcaacagagagattatcctggattgtctgggtgggcccagtccattgggtgagtccttcaaaggtggagacctttccctgctggccagagagaggctgccttgctggttttggagatggaaggaggtaccactagtcaaggattgcaagcagtctctagaacagggattccaacactccggacacagaccagtagtggtccatggcctattaggaagtggggtgcacagcaggttaggggccggcaagccagcgaagcttcatctgtatttatagccactccccgtcgctggcgttaccacccgagctccgcctcctgtcacatcagcggtgggcattagattctcatagcagcacgagccctattgtgaactgcacacacgagggatgtaggttgcacgctccttatgagaatctgatgcctgatgatctgtcactgtctcccgtcacccccagatggggctgtctagttgcaggaaaacaagctcagggctcccactgagtctctgtgatggtgagttgtagaattatttaattatatgttacaatgtaataatagtagaaataaagtgcacaataaatgcaatgcacttgaatcgtcctgaaaccatccctccccgaccccaatccatggaaaaattgtgttccgcgaaaccggtctctggtgccaaaaaggttggggaccgcttctggaaaagctggaaaaggcaagaaaacgcattctctccctcagcctctggaaggaaccagcactgtgggactaatttacatactgtagggtaataaatttgtgttgcttcgaaccactaaaaaaaaa

SEQ ID NO: 28254 - DNA, 3176 bp, Homo Sapiens
ggaggtccgcaggccgcggggaagccgagggctgccggagaaccctgcaggtgtcactcgggacgcggaagtgcgcttgccgaggtttgccttacaatacgcttgagactccccgacaagcgtaatttggtcgagttcgacgggaaagtactctccccaccccagcgccggccgcgtagtccgaggttactgtccccggcgcgtcctctgttgccccagtccagaggctgcccttgaacccgggcgcgcacgagcgcagggcatccgaggcgacagccctggcacggcccgacctgtacccagcctggcaggaagactgtaatcgtgggaatacagctacctacccaggcaatatgaagattttatttgtagaacctgccattttccttagtgcatttgctatgactttgaccggtccactgacaacgcaatatgtttatcggagaatatgggaagaaactggcaactacactttttcatctgatagcaatatttctgagtgtgaaaaaaacaaaagcagcccaatttttgcattccaggaggaagttcagaaaaaagtgtcacgttttaatctgcagatggacataagtggattaattcctggtctagtgtctacattcatacttttgtctattagtgatcactacggacgaaaattccctatgattttgtcttccgttggtgctcttgcaaccagcgtttggctctgtttgctttgctattttgcctttccattccagcttttgattgcatctaccttcattggtgcattttgtggcaattataccacattttggggagcttgctttgcctatatagttgatcagtgtaaagaacacaaacaaaaaacaattcgaatagctatcattgactttctacttggacttgttactggactaacaggactgtcatctggctattttattagagagctaggttttgagtggtcgtttctaattattgctgtgtctcttgctgttaatttgatctatattttattttttctcggagatccagtgaaagagtgttcatctcagaatgttactatgtcatgtagtgaaggcttcaaaaacctattttaccgaacttacatgctttttaagaatgcttctggtaagagacgatttttgctctgtttgttactttttacagtaatcacttatttttttgtggtaattggcattgccccaatttttatcctttatgaattggattcaccactctgctggaatgaagtttttataggttatggatcagctttgggtagtgcctcttttttgactagtttcctaggaatatggcttttttcttattgtatggaagatattcatatggccttcattgggatttttaccacgatgacaggaatggctatgaccgcgtttgccagtacaacactgatgatgtttttagccagggtgccgttccttttcactattgtgccattctctgttctacggtccatgttgtcaaaagtggttcgttcgactgaacaaggtaccctgtttgcttgtattgctttcttagaaacacttggaggagtcactgcagtttctacttttaatggaatttactcagccactgttgcttggtaccctggcttcactttcctgctgtctgctggtctgttactacttccagccatcagtctatgtgttgtcaagtgtaccagctggaatgagggaagctatgaacttcttatacaagaagaatccagtgaagatgcttcagacaggtgactgtgatttaaacaaacaaaaaaaatctatgaatgcacatatcatataccatgacttctgaagactataaatgaattccacaatcagtgcttcactgagaaccaattttacctatcttttcttctaaactgaacagtcagagagacagctcctggctttagcttcttgtggtaccacgcactttgagcactttgtgcgtatcatgcaatatacttgcaatacacagaacaaatttcaaatacgcctcacttttagacttagaagagaaacattaaaacttaagggtgtaaggagggatcaagaaacttgataaggtcaaaagcaataatctctctgacatattccaggctcttacactgagaccaaagagaaatctttacctcagtttcttcatcagcagaatgggtttctggcctctctcagggataattttgaaggcataatgaaaattatgatgaatcactcattggtaggaaaataatgatataagtttcaaatatgtataattttacctatacttggtaatgctttgttttatagagcctgttaagctgctattgatagtcggagcttatatactgtgacttctgaagactatacatgaattccacaatcagtgctttgttgatacaaaatccttaaaagggaggcactttaaagaatatgtatttttcacttttcttaatatgtttcatcggtgacaggcatgataatatttctatatgtaatgggtaattgggaaaaaatagatgataaataaaattgctctaaagaagttaaaaaactgaatgaacagctaatactggtataaagtaactaatgtttggagccaacatttgttccttgtgtcagcaaaaggatattcacattccatgatccctggctgagaattctgcctctagtctttcttacccagctgttgtctatccttgttcaattataaatactgctaagggcatttttaaaatacgatcttgtactccttaaatttgaatccgtcggcacggtcactcataggaaaatgatcaaacaagcaagccagtcatgatttgactccttcccatctcatttcttactgccttacgctcatcctgaggtccaccttggtctctaaaaacaccatgtgttctcatgcctccatgtcttttcacacactgttccatttgctcttcctcccacattacattgaaactttcaagcctcagtcgaaacattgcttcttctggatagcagccttcttgacatccctcctcactccccagtccctacagggcttccatagctctttatgtgcacttcgatcccagcattttccatcgacctgtaattgtttctgctacctgacaatcatcgccttgagtactgggacaacctttgattactcattatatcctcaataaatatttgttgaactaaaaaaaaaaaaaaaaaaaaaaa

SEQ ID NO: 28255 - DNA, 6546 bp, Homo Sapiens
gggtccctctagtcctaattttatacttaactttcccccacctccttcagcctcatctgtttcaatggtgcaactcttttcatccccttttggttaccagtcaccttcaggccattcagaggaggaaagagaggggaatatgaagtcagccaagccccaagtgaaccacagtcagcatggggaaagccagcgggccttgagccccctgcagtctactctgagttctgctgcatctccttcccaagcgtatgaggcctatattgaaaatggactcatatgccttaaacacaaaattagaaacatcgagaaaaagaagctcaaactggaggattataaggatcacctgaaaagtggagagcatcttaatccagaccagttggaagctgtagagaaatatgaagaagtgctacataatttggaatttgccaaggagcttcaaaaaaccttttctgggttgagcctggatgtgactactaaaagcgcaaaagaaggcccagagaagggagcacatgctaaaacttgaggctgagaagaaaaagcttcgaactatacttcaagttcagtatgtattgcagaacttgacacaggagcacgtacaaaaagacttcaaagggggtttgaatggtgcagtgtatttgccttcaaaagaacttgactacctcattaagttttcaaaactgacctgccctgaaagaaatgaaagtctgagacaaacacttgaaggatctactgtctaaattgctgaactcaggctattttgaaagtatcccagttcccaaaaatgccaaggaaaaggaagtaccactggaggaagaaatgctaatacaatcagagaaaaaacacaattatcgaagactgaatctgtcaaagagtcagagtctctaatggaatttgcccagccagagatacaaccacaagagtttcttaacagacgctatatgacagaagtagattattcaaacaaacaaggcgaagagcaaccttgggaagcagattatgctagaaaaccaaatctcccaaaacgttgggatatgcttactgaaccagatggtcaagagaagaaacaggagtcctttaagtcctgggaggcttctggtaagcaccaggaggtatccaagcctgcagtttccttagaacagaggaaacaagacacctcaaaactcaggtctactctgccggaagagcagaagaagcaggagatctccaaatccaagccatctcctagccagtggaagcaagatacacctaaatccaaagcagggtatgttcaagaggaacaaaagaaacaggagacaccaaagctgtggccagttcagctgtagaaagaacaagatccaaagaagcaaactccaaagtcttggacaccttccgtgcagagcgaacagaacaccaccaagtcatggaccactcccatgtgtgaagaacaggattcaaaacagccagagactccaaatcctgggaaaacaatgttgagagtcaaaaacactctttaacatcacagtcacagatttctccaaagtcctggggagtagctacagcaagcctcataccaaatgaccagctgctgcccaggaagttgaacacagaacccaaagatgtgcctaagcctgtgcatcagcctgtaggttcttcctctacccttccgaaggatccagtattgaggaaagaaaaactgcaggatctgatgactcagattcaaggaacttgtaactttatgcaagagtctgttcttgactttgacaaaccttcaagtgcagttccaacgtcacaaccgccttcagctactccaggtagccccgtagcatctaaagaacaaaatctgtccagtcaaagtgattttcttcaagagccgttacaggctacttcttctccagttacttgtagctcaaatgcttgcttggttactaccgatcaggcttcttctggatctgaaacagagtttatgacctcagagactcctgaggtaaaagaccaattgtcttaatttcttttgtatcttaaagaatagcagaaccagtttatcttatgaattacaggcatgattagttgaatgatgtaacatttatactttattaatgtattgctttctatagatattgtgatcttggaacttttacaggtaactttattgtagctttgccatataaatagatttaatatggtattgccttatctagtacaataaatgtccatttttaatctaaaaaaatgaaaagtgtaggtagcattaagtcaagttttccactatatttacactgaaggacttttaggagaaaagtctcttatttgtataaatgaaagctcaataactttattttattaatattagcacttattgagttggaatgagttacaatcttgttttggctaactttgtcaaaaatattttcggtcagatgcagtggctcacacctgcaatcccagcactttgggaggccgaggcaggtggatcacttgaggtcaggagttcaagaccagcctggccaacatggtgaagccccatctctactaaaaatacaaaaattagctgggtgtggtggctcatgcctctagtcccaggtactcaggaggccgaggacagagaattgcttgaacccaggaggcgggggttgcagagattgtgccactgcacttcagcctgggtgacaaagtgatactccatctcaaaaaaaataaataaataaaagcattttaacagtattatgtttgtgctttcaatttcaattctaagttacagtttttactaagtttgagtaaatccttgagatggacatagtaggatgaattttgaggagtaatttagcaactatcaggtattttttgttaactgttatagaagaatatgtattcattatagaatataagaaaatatagataatccttagtttttatggtgctggcttgatctgaatttaaattatctcattcctcattttaagaagaggaagaagtgattgttaccaagtaactcacagctgtctgcttcacaatctagttgagattggtttttggtattttttttaagcctttggatttataatctgttatgtcaagaacttgtggcttccttaggtaaggattacttaaattggatcggagttgttttctgttttaggtagctgacttagaaacctactaactaataagtctttaaaatagagaaaaattaacactaaacaactaatccaagttttttcttaaatccaattctgatgtataaattttgaataatattaggttcttaactggaaattaccatttcagggtttgaaaaggactaggtgcgtataaaaagttcagcccctcatctgttagactgattattggtaagactctttcacttagtcagcaagctgtgcaaagcaaatactggtatgcatcctcagcaattgagatttgaaattgtaagcaaaagctattcttttgcattcctgtgtccaaatgtcatcctaaagaacttgctgacttatgccagtttgggttttagagtaagttaactgcttgttatatggcaggtgattggctgatgctgcatttctcctccccaggcagcaattcccccaggcaagcaaccgtcttcactagcttctccaaatcctcccatggcaaagggctctgaacagggcttccagtcacctccagcaagtagtagttcagtaaccattaacacagcaccctttcaagccatgcagacagtatttaacgttaatgcacctctgcctccacgaaaagaacaagaaataaaagaatccccttattcacctggctacaatcaaagttttaccacagcaagtacacaaacaccaccccagtgccaactgccatctatacatgtagaacaaactgtccattctcaagagactggtaagatctttgcatatgatatttggaagacttagagggacagccaattgaatggacagcaagtctaggaagtctgtagtgacactttagaagtattttcctgaccagtaagcattatttctttacatgttcctccagtgttgagaaaacctaatgcccttttttgtgttaagtttacctattaattttaatttttgtagagatagaacttagatgacggatttaaccttgaagtaggtttgtatttttaaatctatttgctttgattaccacagacagtgattgaggtagatgggcactatctggctgcttatatgaaggttttgaaaccattctgttaatccttttaacaaatggttatctgtccttttctatcttataataaaagattgaagatatgacttagtatgctcattgtactgtttgcttagagatgggaggctattttgatttttcatgctgttctaaatcatgaaagaataggtaactttgtactcatttcttaatttaaatttaagaagcacttgtagattttttgtattggtatttcagatccctattgagtttttttaactgaagtcggagcaaatgaattgagcattctgagtacttggctaatcaagtgatgaagaggtagtaatatgaattctgggacctaggcatagatgacctgattctgttctcccctctactgttgaaagacagggcaggtgacttacgtaagggatatttttgtcaggtgccttctcagatattaattagaatccattttcttttactccctcatctggagtatttagcctgctttttaaaaattgtcgtaaagtatacataacataaaaattaccattttaatcatttttaactatatagttctgtggcattaagtacaaccaaactgttgtgtaattattaccactgtccacctccagaacttttcatctccccccaactgaaactttgtaatcatttaatactaactcctcctcctcctctccccccagcccctggcaaccaccattctactttctgattctgaaaatgactgctctaggtacctcatataagtggtatacaatatttgtgcctttgaaactagcttattttacttggcatgtcttaagggttcattcatgttgtagcatgggtcaaaattttcttccttttttaggctgaataatattccattatatatatgaattacgtatttgagtcatgtagatgaattatatacatgaatatatgtatctcctatttatttttaaaggcagcaaattgtattaatgattttgatatatattggcttttaagtataaagactattaccatttaactcttggaccctaaaatcgtttttcttaagcagcaaattatcatcctgatggaactattcaagtaagcaatggtagccttgccttttacccagcacagacgaatgtatttcccagacctactcagccatttgtcaatagccggggatctgttagaggatgtactcgtggtgggagattaataaccaattcctatcggtcccctggtggttataaaggttttgatacttatagaggactcccttcaatttccaatggaaattatagccagctgcagttccaagctagagagtattctggagcaccttattcccaaagggataatttccagcagtgttataagcgaggagggacatctggtggtccacgagcaaattcgagagctaactgcttcattatgagaaactcactgttgctaataaaacagcagggtggagtgattcttctcaggtgagcagcccagaaagagacaacgaaacctttaacagtggtgactctggacaaggagactcccgtagcatgacccctgtggatgtgccagtgacaaatccagcagccaccatactgccagtacacgtctaccctctgcctcagcagatgcgagttgccttctcagcagccagaacctctaatctggcccctggaactttagaccaacctattgtgtttgatcttcttctgaacaacttaggagaaacttttgatcttcagcttggtagatttaattgcccagtgaatggcacttacgttttcatttttcacatgctaaagctggcagtgaatgtgccactgtatgtcaacctcatgaagaatgaagaggtcttggtatcagcctatgccaatgatggtgctccagaccatgaaactgctagcaatcatgcaattcttcagctcttccagggagaccagatatggttacgtccgcacaggggagcaatttatggaagtagctggaaatattctacgttttcaggctatcttctttatcaagattgaaagtcagtacagtattgacaataaaaggatggtgttctaattagtgggattgaaggaaaagtagtctttgccctcatgactgattggtttaggaaaatgtttttgttcctagagggaggaggtccttacttttttgttttccttcctgaggtgaaaaatcaagctgaatgacaattagcactaatctggcactttataaattgtgatgtagcctcgctagtcaagctgtgaatgtatattgtttgcacttaatccttaactgtattaacgttcagcttactaaactgactgcctcaagtccaggcaagttacaatgccttgttgtgcctcaataaaaaagttacatgcacaaaaa

SEQ ID NO: 28256 - DNA, 5929 bp, Homo Sapiens
gggggaggtgcggttcccagtctctgtgacccagcagtcccccgctgccgtctccatggagacctaccacgtcactctgacactgccaccaacacaggtagaaggggatgtgggaaactgagttgggcaggggcggttccattggctcagcttcttccatttgtttcctctctgggatggaattcaggaagggagagtcctcgaattacgagtccttgggtaaatggggcaagtcagcccagtcactttgttcctgtctgtagttggaagtcaacctggaggaaatccctggtgaggggctgctcatatcctgggccttcactgatcgcccagatctcagcctaacggtgcttcccaagcttcaggccagggagagaggtgaagaacaagtggagctctccacaattgaggaactgatcaaggatgccatagtcagcacccagccagccatgatggtcaacctcagggcttgctctgccccaggaggcctggtacccagtgagaagccacccatgatgccccaggctcagccagccacccccagacctaaccggttattcctacggcagcttcgggcatctcacttgggaaatgagctggaaggcaccgaggaactgtgctgtgtagctgaactcgacaaccccatgcagcagaagtggaccaagcccgcgaggggtggatccgaggtggagtggacagaagacctggcactgtaaggagtaaccctgccccgaccccatgctccagagcagagaggatcaaacctttccagcacagtccttgcaggaatcagctctgttttcagtagcctttggcgtgagctcctattgtatgccaggccctggcgtgggtcttagggatacagacttgaccaagatacagcccccacccctgggtcaatgacaagcttgaggtagagacaggtgtacataaagaagatggaaaaccgctccagttgaggtttatgtaatgtgccgtcagagtgcctaggtgggggggagattaattcccatgagggaataaggatcagagtaggcttcacagaggagatgacatttaaaccacactttagagcaagagtaggatttcatcagagtgtgaaagtattctcggcagagggaagagctggagcaaatgaaagagggtggcttgcaactgagagactggcaagacaggacgagcaggaccagggaggatttgaatgcatagctgagaagcatggtttccactcaggccctgtccctttctcttgggacgagagagaatttggaggccaggagaatctgattggagcatttatgccgttttatttatgtacacagctctctgcctctggcctgtgatccactcaagtgtgggttcagcttgctaattttctccttcctgccccatctcctcttgtcccacagggatctgggcccccagagccgggagctgaccctcaaagtgctgaggagcagcagctgtggagacaccgaactcctaggccaggccacactgcctgtgggctccccctccagaccactgtctcgaagacagttgtgcccactcaccccagggccagggaaagccctgggaccagcagccaccatggcagtggagcttcactatgaggagggctctccctggaacctgggtactcccacctcctccactccacgccccagcatcacacctaccaagaagattgagcttgaccggaccatcatgcccgatggcaccattgtcaccacagtcaccactgtccagtcccggccccgtatagacggcaaattaggtaaagagaaggagcctgggagcccagctctagccaggggcccgggactgcagacccaaggcaggacagtgaaagaggagagagccttaattccaattccccctgttttcagacattccattccagtcctaccacatcttcctcccaatctttgtctcttccaaactttcccttacctcctgccatttccccagcaattcctctcactctgccacccttctggctcctcctgcccctcctcatacaggactgttgcactcctaccttccagcttcccctctggcttttcacaggtgtccttagccccagctgactataattgtccatcctgctaccctcagccctccagcaccccctggggtcctccaacaaacccagaggcctctgtggcatttctaccccactcagtgggcccccatggcacttctgccattataggggccccactgaattgccccaacttcagggagccccagtaccccctctgtccccgctccatattttcatagcatctccccacaccttcagcaggccccatggcactttcctacactcccattagctcctggggtgtcttttagtccccacggcatcttcctaatcacccttgtgattaatcaccctttaatcattcttgccctctgagtcacccaaagtctgcatctcaacaaagacagtaggggtgggggccactctgaagcacctcccagctcactgaccctcccccacccaccagactccccctcccgctccccgtccaaggtggaggtgaccgagaagacgacaactgtgctgagtgagagcagtggccccagcaatacctcccatagcagcagccgtgagtggggaatggggtgcatgagtgtgggttggccctggtgccccagcatcaaaaagtactctgggtgggataggaggagttccaatccagaaagagccagggagaagtcaggttattcattctctgcacccctagcaggggacagccacctttccaacggcttggaccctgtagcagagacagcgattcgccagctgacagagcccagtgggcgggtggccaagaagacacccaccaagcgcagcactctcatcatctctggtgtttccaaggtgcccattgctcaggacgagttggcgctatccctgggctatgcggcatccctggaagcctcagtgcaggatgatgcagggaccagcggaggcccctcttcacctccctcagacccaccagccatgtctccaggaccgctagatgccctctctagtcccacaagtgtccaggaagcagacgagacaacccgttcggatatttctgagaggccatctgtggatgatattgagtcggaaacggggtccactggtgccctggagacccgcagcctcaaggatcacaaaggtagggggacgttggcaggtgcccctcatctcttcttttatacacatatcatgacctgggggacctcgagccagtgtgccttctccttcctcccctaagagatagccggattcccagcctagttcagccaagctagcctagagggggatcttggtgccttggttcctggcctagatctgacatgcttgtgataggaagggatgccaaattatttccctttacctccattgttctttcttcctgagtctaagtgccatttttcctgccctttaaaaaaaattataaaaatttattcctaggcagggtgtggtggctcacaccggcactttgggaggccaaggcgggtggcttacctgagtccaggagttcaagactagcctgggcaacatggcgagaccccatctctactaaaaatacaataaattgcctgggcgtagtggcacacacctgtaatctcagctactcagggggctgaggagggaggattccttgagcctgggaggttgaggttcaaggaggttgaagcagtgagccgtgattgtgccactgcactccagcctgggtgacagagtgagaccctgtctcaaaaaaaattttttttttccatggctgggcacggtggttaatgcctgtaatcctagcactttgggaggccaaagcgggtggatcacaaggtcaggagttcaagaccagcctggccaacatgggtaaaccccatctctactaaaaatacaaacattagccagacgtggtggcaggcgcctataatcccagctacttgggaggctgaggcaggagaatcgcttgaactggggggttggaggttgcagtgagcccagatcatgacactgcactccagcctgggtgacagagtgagactctgtctcaaaaaaaaaaaaaaaaaattcttccctttcaatctgcaccctctccccaatgagtataagaaatcctacccttggattatccatctggcagcaagacaggcagtgaccagtggtggtagttcttctaactttaaaagatgagaggcttaccctaaaacatcttcattcctctaccagtgagactatcaaccatggatctatctatctattttttaagcctgcatcacttcttgagataatgaggtttctacctccaaagcctgctgggtgagcaccttgctcattatactggttctgaatttacctctttgaagtttctagatgcaccacttcctgctcacagcctggaattcggttaacaagtcagtgtcaacctacctttcccttcatgatttatagacttttgggagtaccttctggtagcttttgtcttcccataggaaagaggcccaatcccagtttgtcctcacaaagcggccagctccatgatatctcttttgcgggcagagttaagattgtacacagatccccacaagtaccacgatttttgcctcaggaaggataaagcacatgtttgtttctgctttcgttttcttttttctttttttcacgaagccttatggagaagtatgtttctgctttctttcctgaggaagcctagcttctgggccacgggactgatcctgtccacatcctctttccctccattctccatcgtgtctctgcccccgtctcaccccaccccgtgcccctctctgcctcagcttcccctcttcccctgcagtgagtttcctgcgcagcggcactaagctcatcttccgccggaggcctaggcagaaggaagctggcctgagccaatcacacgatgacctctccaacgcaacggccacgcccagtgtccgaaagaaggccggcagcttttctcgccgccttatcaagcgcttttccttaaaatccaaacccaaggccaatggtaaccccagcccccagctctgaggacctagctctgaaagggcacgagttctctcagcccattccccacctccccttccataccccttcctggatctccagtgcctgggccaggaaagccctctgggttccgggaagccccgtccaccctgggccatggggccggttggaaggatacttggaacgggaagcacatgagaggtgggcacccggtgccgaggacatggacgagggactggtggctgggagggagaggagggccctgtccggcatgtgtgggtattccccagaagcatttgcctcctgctgagcctggtccctgagcggagtcccagggtgctcagctcttcagctgacccttcttcccttatttattctcttttctatttatatgtgtggcttaggaccctccgtgaacagatgatagagggcatctctcccaggtgacccttcttttctgtcccaggagggtgggtaattccctttgggatggggctcccacacctccctcaggtccccactcagaccagcaccagtgtctgcctctgagaatgttggcagctcacagagagcagggccggcccgggatggggggcaggtactccccaccttcctgcctcccctcctgctcctcatccctccctccccctttattaccgttttttgtacttgatgccttctctgtgagcagtggctctgtgggaaggagggagccgggagcctggtgggaagccttccccagagagatggctttaggggctttatttaaagactgtgatgatggagccacgcaaggctgcacctctgtgtgttgggagacgatgatgatgtccattgctgtgtgatggcttggaatttaatttattaaagtcaaattggagtttaaaaaaaaaa

SEQ ID NO: 28257 - DNA, 5719 bp, Homo Sapiens
gggctcccgtgtggtagagccttcccagcctgagtccggtgctcaggcctgctggccagccccgagcttccaaagatacagcatgcaaggggaggaggcacgggctgcgctgctccgtccctctttcattccacaggaggtaaagctgtccattgaagggcgttccaatgcgggaaaatgaacctcttccccagaccaggactggggctttaccccagagcctcgcctcgccgccgtgagcaggcagaggatttgcacacgccgagcagggaatggctttcttggcagtgagatttgggggaaaggggaggcatgaagtcagcctcccaaggcaggatctgttgttcattaccccatggcatcctttcaggacaaccccagagggtgttgtgatggggagcagcaggcctggggcaaggaaggaagggggtgcacacaggagaagaaacattccaaaatcagggcctccctgttctttcctccccatccctagctcctgcaagagaaagtccaggctttgggagcagatggcagagggagggagtaaagaaagagccaaaaatgatgatccacagcttatagtagcagttaaactgtcagaagtttttttttcttttttgtggtagaagggcaggaggccccaaggttggaaataagagggttcccacccagaacccttcttgtgagagatgcgcactttaaagggtgattttgttccagatgtctatggctgggtgtgtgggggaggagcactctcatctgcaggactctgcttgatcctctgcttcatagcccttccccatctctcctcaccattctgcctacaaggcttctagcagcacgggggcccggagggagagccccttcagggttcagagtgaagtactaccttgccagggactcagtcaggggactttgggagaaagacttgatagccaggctgactgggttctaggcaggccctctggaaaggtagctcacctaacaaagctcctccaactcagcatgccagacccactttgaaatctcacagaatcttgctggtaatggtgactttagaactagtagaccctttttcccaggcactgaccccccacctttgtctgtgttgtgcccaagtgcctgcgccacccccaccctcctgctgcgctgaccgctgcatggtgtcgtgacctgggcctcatttgtagctgcactgcctttccttgtctgcaaagttggttttgtccactctgaccaagacctctagtttttggtgggtagggggtctctctggtttccccttcagctataatctctatttttaaaatctcaaaatcatgtcccctccacttccactgccaaacagcttggtgaagaaacaagaagggaactatgccctgggccagggcgaatgcgtggctgggcagtgcccatcatggcattttcacatgtcccatatgcccctcctgtcttattccactgcttctcccagcattctggtgcctccaagccatcccctcccaccaccagctctaagattctaggatagtcttgataacatttcagtacctgaatagatgtcattttgtgttggtatattcctctgcaaaaagtattttcaatcttggttgcattggcaccccccctaccccccaccaatgtcttaatcccacattttcttcacaacttttagcatcagctcagaccgtggggttccactgggtattgggaattaggctcccccactagctttcaggtgggtaagtttttttgtttgttttttgggggtctttagactcttgaaggcaactcagggtattgtccacgcagctctctggttagacttctcccaggctatgatcctggcatgtcctttataaggtatacttggattggccgagacctggcctggcatcaggagtccaaacctctgaggtctgatctctgctctgtcaaggactttcggcaagtctcgtgacctctggctctttcacttcctccccacctgccaaatggggataaataatcttacctacctcctggggggaggggaagttctgagaatggagtcattcttagtgttcaggtgctaaaggttgttctcctgggggaacagagtgactgaaactggcttgtttgctacaagccctaccctccactctttcattccttgaaagcagtttgcctggtcagtcagcttttgggggtccatcaaaggaggttgctgacctgaccgtgagtgcttcagtatctggtttgtgtcagaaccagacgccaactttgtactgcatttgggatcatatctttccccttctctgtcccccattctctgaatgctgctttctctggcttgtttcctacagtgggggcctgtggggttgagtcttgaggaatcccctcaaatgagaaggccttgggagaaggcctcatctctggctgtttcatgagcaactcattcctagagttcattgtttgcatgggtttctcacaagcgtccttcctcataggaaggctcatcaactgaatttagtgacatgtacacagtagatgctcaagcagtgtctgcaaggacacaagctgagctttctccttatggggcaaacctatgtctaaccagatacagaccaattagtttagatcaaatcaccttccacttgggctacttgtgactttccaacctggtaacttccactgaattctggaaagagaaattcttgaggaccctggcaagttgggccctgacctttctgttgctgtctcttgctggtgaagcaataccagcagttcctgtaataccacaatatcgttccatgcatatataacatattaatacttgattttgctgagctgcaaaggtatctgtcataaaatatggtccccaggaaaagaatctctgtgctctaaatctcggtcagagctgtggcctcccccttgcctttaacctctagtttagtcttttcctccaggcatgaaaaatatgactaacctgtggtgtgtccattcttccttataggaatttcctgagtttgcaggagacatgagagcagtttttagcgagtattttagtgggaagttgccaactttttaagaatgagcagttgacaagggccagagcctgtcccttgtcagcagtaggacatttccagctcttaggaatagaaaggaggactgctgactgtctggcgctgtataaaaatgtgtataccaatttgggaataggggaacccagtcatggatggataataagccaagtcttgaatcattcctatcaagattagtatacatgaggaagaggtggcatggggggaaggggctctgggagttcagagctgagtacttgtacctgagggagggcccccagccaatctgggctggtccttctatattcttggtcccagttggtcataacaccaagggctttgccctgcgctgctttgccactgctgctgtccgctcactgtcctgcctgctgtcctctacagctccctatccttccatgtctttggccatgtagattaagtgtaggcgtccggttcattcttacctgtgttaggccatgttattttatagcgaagtcatgttcgatagggatggtatgaaatgctgctggtggctggtaaatccaaagggataaggcttcagtgctgttgggagccctttggctccaaatgtctgactatcttgagggagaaacaagcaggtttctactagtggtgtcttctgttgtattaacttctttcctttgtggtatcttgtatcctgttttaaaaactaaatgaagggaaccacattagggcccatgccagcatcccagtgaagttcgtccagctccagttaggtggattctggagttcggagagggtttaaagtttggctgaaatagcacctcaagtggggtttagttttatttttacctgcgggcatcatgggcgatttagggggaagcacaggatggtggtgtggtttaaacctgcagcaagcaggcatgttgaagagttgagtgatcacgctggagatgaagggttggacatggattgactgggaaaaggcctgggtccattggagtaaagataacctagtcgattgaattggccatgggaagttaggtcacagtcttataaacaaagtaaataggacagagactaagttttagggagacatcttggcctcctaggctaagtttactaaaccacactgaagctatagtaccttccagatgggcaaaagtgtacactacagttgaggagctgaaccttattaggttggatgtcgatcaggaacctgtttgccctttgctgggaagccttcactctccagctttcctggggtagggaaggtctcccacattatgcaataataaaataagcatctgggtctttgcagctgtcagttgctctttcaactctaggatccatctttggaccagaagcctggtctgtgcctaggatgacactggccccagagatgctagagtcgactgcactctctccttagctgcagaccatgcacagtgcctggggcggaaggaggagaggtgttgcggtttgccctgctgcctccccagcaggaacaatagtcataaatgcacttttcacactaaaggtttctttattagttctccagttaaacctagatccctccctggtagattgcgaactcaaagttttgtgatcccaaagccattccactgcaaatgcccagcagtgaagatggcctcaaattgggttcttgcctgcagtgtgtgtggcagcagcccatgtgcctttacctgttgtcaaacttgcaagcatttatttgtctttatgactgtcatggggactgaggttcttcagagaaagagtgtgagctgatgacacagtggttttacacccaccccctgggcagggagtttgcacgtagttgtgagctgtgagtggttagtgcattgctggtattgctgaaggcagggttgatccctcacttgactgatacttggattcaagagaatctagattgtgttgggggagggactgactgtactcatggctaacttaaagtattaaaataaggctgtcccctacaaccttcttagtcacacaggatccctgtagccaaaacagtatatgatccagctgcagagagcagactgctctcagcttgcacagcaccttaggcgagggaagaatatacggatagggaatggggtggagaaaggatgggaatgttgtcatccaggtggctttagggtcctaaggagtggagaaggatggcactggggaggtctggatggatctgtgtaggagttccctgtagataaattactgatcccccatctactatccccagtatgtaatggctgaattaatatgtaatcaactgcattgtatctaaagccttagaactagtcaggtgctccctccacccaataccatttcttaccctctaatcctacctgatctttaacaaagcattaataattctaaggataatctctattttgttgtgcttttttgtaactgttttaaataaatcaatttgtactgtatatttgtacttttgtgagatcctttttgctgttttaccattttaagtctctgtacttggctacacacagattgtatttttattgttaatgctcttcttatggatacctgcatttaacttgtggactatgtaaacacaatatctatcaatatctatatatctatatatctatctatataaactactagcttttcaaaaaaaaaaaaaagaaaca

SEQ ID NO: 28258 - DNA, 4537 bp, Homo Sapiens
agttaaaattcaacatttaaagctttatcggttattgttttagatttgagatttttgtttttaagtatctataagatctttagaagtgagataaatttttcgctggttaaaaaaaatcaaactttcctctgcagtgtttttgccaagttttgtcacacttcatgtgtatgcattaactatacttcttagtgttactgcaaaaaaaaaaaacaaaaacaaaacaaaaaaaagccttgttctttaattgtgtttttcctcctgtgagtggacaactaaagccgcgtgatgatgcggatgaaaatattctggtctgtgtgtatacaatgaattgtcagtcttcagacctcatggtcgttaagaaaatagggaactcacaaaccctgctgcgcactacatttacttctttatctgcaagtacagggagtccatacagtcaagaaacacacagatacacataatgctattgaggacattgtcattctgtaagaaaacagaatattatctagatttccagagttagtgcagaccctgtgataacagtctgtgggtttgtggccagcgccaaaggtgtgtgtattttcagaaatggtccctatttgtcagtgatagtgttttttttttcttaagtttgacaaagggggtggtaatatcacattctttagatttgaaataattatcagctccaagaatctgtgaacatagtaataacaataaaaattcaacatcgaccctccctaacctgctcaccatacctccccaccccatgcctctgaagaaagaggccatgaacctacgaggtggtaaagggggacacaggtcagggagtggagagctactcctccagcagctcagcacccacactgcccgcatgcgtgtggccaccgggaccagatcccgagtgattgtggcatacccctaatatttgagtagtttttaagctgtcagtctcttgtcataacctcctaccgccacccaaaaaagtaacgaaagttgcagtaactgccagtgtttgcctcaccaaatttaaatcgttcccttttcagttagctatatacctgaatttgtttttaacaagaaactgtacatgaccaggaaaaatggtactaccttggccaaagggtctttgcaaaaagctcagtcttcagttcttcactgtgacaaatgcttatcttgttcatgggaggggaaagatcagataaataggcaagaagtactctgttttaaataaagaataaatagtgtccgtttaaagcactttgtgcctcaacttcatttttaaactgtaaatcattgctttggaaataaattcccaattataattgacccatatctagccaatatcaacaagttgggatggtttttgtttttttcttttttttcaaaaagggaaattcctctttactgctcacagtaagctgcaaaagaaagttgtcaaggtggcttatgatgctgttgtagcagagctgtgaaaggaagtgctttgctttctctcccgccttccggaatctggcgttccttccccttcggctactgaaaggtgtgtacaactcccagaggggtggctgtaaaagttgactggaggcaaagtggagtggccttattgccaggactagccctacagaagagctttacagagaggaggacagtacatcctatgtgtgttcgccaaaaatgggaaaggtgggtatttaggcaaaacaaaataaaaacctttggaaccctttaagaagttacataccttttaaaggtagtatagtttctcaccaagtgatgcattttagcatgacacttcttgccagaaattttgggataagttggaataaatgtgtttaaaacatcatccaccgccctttttaaattttgtctaaggaattacttaagtatagtatttctgaatgtgcctttgtgagtacagagaccgtccgttctaggaagaagctatccgttggatacaaacaaacagacggtcagctttagtcattagggaagtcaaagttcctcctggaagtcccaggagcagctgttgagatttcattagcatcaatattgcacagtgtagagttgagtggaagagattctgggacttgggagaggagacaggggaaggtacccaggcgacgcagacccacgttagtccaagagcgcaggtttacacatctgcattccctagttttctccgtctgtatgtttgtgctcatgtggctttggctgttttgttttttgtttttctgtaagcactggagaattggaatatggtgatacttgtgacacattcatgcatgtaaacaaggcattttccagcttctgccgtgtgcagagcgggcagcacgcttttaccctttgagtctgtgtcctgaggcggccattacattcccacatgggcgtcacatcacgttgctgttgatgcaaacagggtattacacacaaggaaaaggggttttgaagagttaagattgaagtgtttgagaaagaaaagagaaaaatctgaaatcatattttatttcttcagagctattatagttgaacacagaaatctgcagtgtctttatttgtttttatgttttaaacaatttcacctcttctccccactcctatcttctaaagaaatatcaagcaaatgctaagggccatttccatgattcctcagagctcccccaaagaggagaacagtccctcccactcgattccttcagcttcattcaggaagacacagggaggagagatgctgcttctgcgctttgctctcattcctctctcatggccttgaaatgtattattatgcaaatgtgaattttgatactgaatttaagaagaggttgttggatttttttttttttttttttttttttcaaaaaaaaaagtcccacatgtggtcatcgtcgcttctttatgttgtaaggtgaattgtaactatgcattctgcaaagggggtggggaggagagggcagaaaggggaagggagtagcgttgcatccttgttcttcagtttctgtgtccatggtgtccccgtgtcctggaggggaaggggagtgagagacgaatgtggtaaggtcagcacagtgagatagagacctctgagtcctcttgccactgttgctggcaggtctgatggccaggtaaattccagggggcctgcagttcctgtcaaccaatgtggttcaggattcttgatcctagccgtgcagtgttaatccagtgcagcaatggaactccacaggctccagtgttctctggaaaaagtactcatcctttcctgaattcagagcccttcaagctcaggaaaccacgcttcactcgtgctgacctgaaagttaatctttaggtcgattttgaaaaactccgcctcctctctcctttttaatatttctttcttcctttttaatcatgtttaagtgaacttactcttagttataaggaactgtcctgctttgtggggaagagggctgttgcttgtcaggcaaaaaagttttctcttcctacccaccatccctctctctgcttcccttgcatttggcaggctgtatgaagccaatgagctgcgaggtgttttgacaggggaggtctgcatgcagcctcttctttgtcctaacaattcctttgttgatcttgcctgtgatgaatcatagcgcctgcattgctctggtctaggcattatttgcaacacacagtatcgtaagcgagagattgttctgcctatattcagtgttttccatgcagcaattcttcttgttgacgttcacagtactgtaacgagtaacagacttgatcacagtctcctcgtgcctgtgcagggctgcacaggcatgatcttatcagggttccaatctgttagattgcctttaaacaaaaaaaacaacaaaaaaataaaatcctgacgtttcaactgtctcacacaaaataatacctcgaggtacatttccccctgcaatgtaaacccttaactcctctctcctttctgacatcagtggattatcctttttaaaatatgaacatgtaaatagcaggataactttaaaaaacattttctttgctgtgaaagtaaccctaaaatatgttttcttcttttgtattttttttggtttttgtttttaagccatcagaagtttcagatctttactctttcatgtttaagaagaaagagcagaggaggtcgggggagccggtttgcatttgtgttggaggggtgttatctccattgcctcccacacagtgacagcagaccagtatgtaaaccctgtcttggctgggcgcggtggctcacaccagtaatcccagcactttgggaggctgaggcaggcagatcatctgaggtcaggagtttaagaccagcctggccaacatggtgaaaccccgtctctactaaaaaattagccggacgcagtggcgcgcgcctgtggtcccagctgctcgggaggctaaggcaggagaattgcttgaacccgggagacggaggttgcggtgagccgagattgcaccactgcactccagtgtgggcaacagagcaagacttcgactcaaaaaaaaaaaaaaaaaaaca

SEQ ID NO: 28259 - DNA, 4143 bp, Homo Sapiens
ggcgcgtcggtattttgcgggcaactagctcttccagctgctgtaaattgctgctgcgggagaaactggagccgctgtagccggcgcgcccttcttcccctactgcgaggagccaccgcctctttcgcgctccttatacacctatcactgggagcggtggcagcaacattccctggaccaaccgccgcctcttcaggcggccgctttgccggtcattcccgaagcccggcaactgagggcggccccctttccttaacagtctcctcgctacagatcgtctgctccctcagcctcgcccgagacccacttccccagtctcgcccgggtggaggtcgacgaggaggagacaagagtcacccttcctccaggcggcgccggccccctcacccgcgggtgtgtcctataaatggcgtcggaaagcgacaccgaggaattctatgatgcccctgaagatgtgcacctagggggcggctaccccgtggggtctccaggaaaagttgggctttcaacattcaaggaaacagagaacactgcatacaaagttggaaatgaatcccctgtacaagaattgaaacaagatgtgtctaaaaagattattgaaagtattattgaggagagtcagaaagtactacagcttgaagatgactctttggattccaaaggaaaagaaccctctgatcaagctactgccagtcctattgtggctagaacagatctgagcaatatacccggactgttagccatagatcaagtactaccggaagaatcccaaaaggcagagagtcagaatacatttgaagagactgaattagaattaaaaaaatgctttccttctgatgaaacctgtgagaaaccagtagatgaaaccacgaagttaactcaaacaagttcaactgagcagcttaatgtgcttgaaactgaaacagaagtattgaacaaggaagcagtggaagtcaaaggaggtggtgatgttttagagcctgtgtcctcagactccttatctactaaagattttgccgctgtggaagaagtggcccctgccaaacccccaagacaccttactccagagcctgatatagtggctagtacaaagaagcctgttccagcacgcccacctcctccaactaatttcccacctcctagacccccacctccttctcgacctgctccaccaccaagaaaaaggaaaagcgaattggaatttgagactctgaaaactcctgatatagatgttcccaaagagaatattacgtctgattctctcctaaccacaagcatggcttcagaaagtacggttaaggattctcagccttctcttgatttggcaagtgctaccagtggagataaaatagttactgcccaggaaaatggaaaagcacctgatgggcagactgtagcaggtgaagtgatgggccctcagagacctagatccaactctgggagagagcttactgatgaggaaattttggccagtgtaatgattaagaacctggatactggagaagaaatacctttgagtcttgcagaagagaaactaccaacaggcattaatcctctcactctacacatcatgagaaggacaaaagaatatgtaagtaatgacgcggcacagtcagatgatgaagagaagttacagtctcagccaacagatactgatggtggaaggttaaaacagaaaacgactcaactaaagaagtttcttggaaaatcagtaaagagagcaaagcaccttgctgaggaatatggtgaacgtgctataaataaagttaaaagtgttagagatgaagtgtttcatactgatcaagatgatccttcatcaagtgatgatgaaggaatgccatacacaagaccagttaaattcaaagcagcacacggtttcaaagggccttatgattttgatcagatcaaagtggtgcaagatcttagtggtgaacatatgggagctgtttggaccatgaaattttctcactgtggccgattacttgcctcagctggacaagacaatgcagtgagaatatggctttaaaaaatgcttttgactatttcaacaatatgcgaatgaaatacaatactgaaggacgtgtgtccccatcaccctctcaggaaagtctaagttcatcaaaatcggatacagatacaggggtatgcagtggaactgatggagaccctgatgataaaaatgcaccctttcggcaacggccattttgcaaatataaaggacatactgctgatctccttgatctttcatggtctaaaaactactttcttctttcttcttcaatggataaaacagtcagattatggcacatttctcgaagagaatgcctttgctgttttcaacatatagattttgtcactgccatagcttttcatccaagagatgacaggtattttctaagtgggtctttggatggaaagctccgcctttggaacatacctgacaaaaaagtggctttgtggaatgaagtagatggtcagacaaaattgatcacagctgcaaatttctgtcagaatggcaaatatgcagtgattgggacatatgatggcagatgtattttctatgatacagagcatttgaaataccatacacaaatacatgtccgatctactagagggcgcaacaaggttggaagaaaaattactggcattgagcctttacctggagaaaataagatattggtaacctcaaatgactccagaatcagactatatgatttgagagatttgtcactatccatgaagtataagggttacgtcaatagcagcagccagatcaaagcaagtttcagccatgattttacttacctcgttagtggttcagaagataagtatgtttatatctggagtacctaccatgacctaagcaagtttacttcagtcaggagagatcgtaatgacttctgggaaggtattaaagcccacaatgcagttgttacatcagccatctttgcaccaaacccaagtttgatgttatctttggatgtgcaatctgaaaaatcagaagggaacgagaaaagtgaagatgctgaagttttggatgccacaccttctggtattatgaagacagataacacagaagttcttctctctgctgacttcactggagcaatcaaagtgtttgttaataaaagaaaaaatgtatcttaatttgaaatggcatttaaaataaacatatcagtaagtttctatatgtatcaaaactgaaaaaatagtgttccaggctaacatacttttttaatttttattgaaagttgttcaaatataatatattttttgagaggcagtgttaatgatctaggaaaccctgggctgatagagtagaaaggaatatggctagaatagcattgccaaacattaggctttatgttttgttatgtttgtgttttcgttgtataattatgaacatgcacaagtttctgcatgaaaagatatcaatatattaatcacatgtatgtgccttttggttacatgcattaaatctaacagagttaaattatttcagtggctcttttggcctcttactaggggggatagtcttgtttctagcttaaacaatttttttttttgcacaaaatttcatttttaataaaagtggtatcttttgactgagttattgttttgaaaatggtatataggtttccagtaggtcaacaaccatatgtaaatggtttttataaatttctcaatttggggacaagatttttttgtggtctaaattgtgggcttaagattcttttctttatatgtgtacatataatttttttttctttgccacactggagcacaatgtttctatgtaaagaattattttcattctttatccatgagcaccaggctttgctcacttaaaaaaaaattaagccacattaaggagtgagtcttcttttttacaataatgtaaaaattaaactgtttacatttttttaaagcattgtagtttttaaaaatcaagctgttttgttttgtgttgttgaatttgaaagcctttgtaaatatcaatataatgtaccaatgaaataacatctggggcaatgaaaccctgatcatgttgttgatggttagcatatgtttctgaaaattaaatatgtattattaaaagttggtctccaacacttgtttaaataaaaaaaaaaaaaaaaaaca

SEQ ID NO: 28260 - DNA, 2640 bp, Homo Sapiens
gaaagactacatgctcacggcatttctctctcctcctcctcttcggtctcaccacaacccaccctatcaaaatactgcacctccacacagccgcttctctttcattgggaaaggccagcacctggcctctttctctttgatgcttttgtaaattgagttttggggagagcgttcctggtctttgtcctaaaccagtgaagacaaacagtgtacttggtgtaagcagacactgaaggtttgtctaagctgtcagcctgctctcccaacacctgtgcctgtgctgagacctgatggtccaggaaagggcagctgccacactgtggatcccccgccacccacacacgcaccccccgcccagtgccctttgaaattctcacttgagtcttctgcagtcagagtccctggccacgcccctgtctgctgtctcccagctcagctcctcagggccctgggaatgtgtctgaacagcctgttcctacaggagttcagtctgcagggagctgcctgcagggacagtgctaggctgggtgaggggacaggtgggggttcatgtgtgtgctccagctgttcagggtagagcatctgggctcagttcctccctccctcccctgtccctcacactcatgccctcctagccgctgtagaacgggggcgggagcagcacgggagcccaagtgtagcatctgactctgcacggcccccagttgctggcgccctgcttctgcttcctggcctgtccgtccagcagtgaactggaagctgccggagtcccatccccttaccctggaccttggggtgggagtggaggggggacctctgccacttacttccaggcagaaaagggcctggagtaacgtgcgggggtgggtagatgatgcttgtctgagcattccacccttcatccccaagccccagagcctcccctgccgtttgtcctcagaactgggttccttttttcccctgtcccttcctctcccttctctcccttgctgcagactgcacagcgcaagatcagggaaattgtacaacaggtgaagcagcaggagcagaaataccctcagggagtcgcctcacagcgcagcaagtgaggctcccacaggcaccagcaaaacaacggatgaatgtagcccttccaacacctgacagaatgagaccaaacgcagccagccagatcgggagcaaaccaaagaccatctgaggaatgagaagtctgcggaggcggccagggactctgccgaggccctgagaaccccaggggccgaggaggggcggggaaggtcagccaggtttgccagaaccaccgagccccgcctcccgccccccagggcttctgcaggcttcagccatccacttcaccatccactcggatctctcctgaactcccacgacgctatcccttttagttgaactaacataggtgaacgtgttcaaagccaagcaaaatgcacaccctttttctgtggcaaatcgtctctgtacatgtgtgtacatattagaaagggaagatgttaagatatgtggcctgtgggttacacagggtgcctgcagcggtaatatattttagaaataatatatcaaataactcaactaactccaatttttaatcaattattaatttttttttctttttaaagagaaagcaggcttttctagactttaaagaataaagtctttgggaggtctcacggtgtagagaggagctttgaggccacccgcacaaaattcacccagagggaaatctcgtcggaaggacactcacggcagttctggatcacctgtgtatgtcaacagaagggataccgtctccttgaagaggaaactctgtcactcctcatgcctgtctagctcatacacccatttctctttgcttcacaggttttaaactggttttttgcatactgctatataattctctgtctctctctgtttatctctcccctccctcccctccccttcttctccatctccattcttttgaatttcctcatccctccatctcaatcccgtatctacgcacccccccccccccaggcaaagcagtgctctgagtatcacatcacacaaaaggaacaaaagcgaaacacacaaaccagcctcaacttacacttggttactcaaaagaacaagagtcaatggtacttgtcctagcgttttggaagaggaaaacaggaacccaccaaaccaaccaatcaaccaaacaaagaaaaaattccacaatgaaagaatgtattttgtctttttgcattttggtgtataagccatcaatattcagcaaaatgattcctttctttaaaaaaaaaaaatgtggaggaaagtagaaatttaccaaggttgttggcccagggcgttaaattcacagatttttttaacgagaaaaacacacagaagaagctacctcaggtgtttttacctcagcaccttgctcttgtgtttcccttagagattttgtaaagctgatagttggagcatttttttatttttttaataaaaatgagttggaaaaaaaataagatatcaactgccagcctggagaaggtgacagtccaagtgtgcaacagctgttctgaattgtcttccgctagccaagaacctatatggccttcttttggacaaaccttgaaaaaaaaaaaaaaaaaaaca

SEQ ID NO: 28261 - DNA, 3839 bp, Homo Sapiens
gcccactataatctcccttttacctctgccattttgctgaacctgtttctctatggtcattatctttctccctccatccagaggcatcatttgagttcttttttattctttctgctatgtattttttccttctgcaaacattcttctttccttgactgtttttatgcttcattgtttttatttgccttccacctttcttgcctctctttctttgccctttttggaacccttgtgccttctcttgtttcttaagtgcaggtgcattcttctagcctctgctctttgacttgccttttccaccattcttggctttatctcttagacagctatttagtctttctgtcctacactggcctttgggttttggtttgtctcttaattgcttcttagctgagtttccatttggatttatttctctttgcctcttcagactcaacatgtctaaagccatacttatcagacttccttggattagtagtacaccgttttcccatgcttgtaactgtagaatcctaaatatctctaatttcttcctcatgttctatgtagttgcaaaactagatgtagactttaaaatttttgctttttaaatatccattcctttcttcccgtttctgccgccttgagcttcagtaattataacagaggcctcattcagcctttctgcctccagaatctccctactcatatgtcttttgcattgctacctgattctttacttcaggccctgtggtcttcataaattaatttttccctaaaaattttcagtggctctctaagattatagaaagaatagtatccaaatttaatatccgcaggccaatcctaacctctctcattactgactgaccgcttttgctaaactggtttccctaagccacatacattctttctcttttacctccttaaataaagtaagcttggaatgtatttctcctccctcttcagttatatatagattttttttccctgtaatcccaatgaaatacttcttcccccgtatcagattgtgagaccacagtgatagctctttcatttgaatctcattcatttcttagttgccatgtatataaaaagtgtaagggagcataaatattttcctctgaatcctcaacagttcatagaattattagtatgtggaagattttcttacatttaatgatctctttaatgttattgacatccatattttatatgtgcaggggcttggcacttggcctttagttaataggtgctcagtcattcgatgataattggagaattaaatcaaattttcagttgagagttttgatatttgagatataaaatgccaatgttaaaaacctgagtttatgaatttttgtttccttttccctttcctgtctgtagtatgcaaggaacttcaggtgtgtgttcccttcatgttttctttgtatttgtagtcatatcatttttaggaaccccatcatgaacttaaaaaaaaattcactctaaatgtatatttattgaaaaaatgatttattcaaggcatgctcattaagcacctactttgtgtcaaccactgggaatacagtggtcataatgttatgcctttgagctgatattctagagctggatgtaggaagcaatctattacataatattatttcaggaagtgaaattctattaaaaatcaaagcattttaagggaataaagagcaattatgtgcaggtggctgttttaagaggttcaagtagtaatatatcaagtgcccttgtctcttccttctgtcattctgttgcccaaagctaaacattaactaggacgtagactgatttgtctttgtcacttaataaaatactgtggacatcattacatatcaacagttaaatttctcattttaatgtctggtgttctattttatagatgtctggtaatttatttaatcagtactgtgttggtgtcaacctaaataacagaggctctctgaaagaaaagatgatgggaatagagcattgcagtggaaatacatgtgccatagtagtctatggtcatattcaaagaggtaaagagagacaaaggtttttgaaggaaaaaatgaggaagattacataattgtttttgaaataattatccttggctacaaagatcactagtaaggatgacaccagtctgaggtcggacaagctggacagatgtccttgtggaaatatttttttggtttaaggttttgatgacctttgtgcaaggttgtggtttttgtagatttttttgtttatcaggcatacaagcatgagaagcctttcttcatggtctttcccagctcagggtgttttgggtttttttttgtttgtttttttgtttttttttaaatatataaacattagtgactccattttgattctcacaactttcacattgactacctaggttgtttcagtttttgaagtgtgagccccttatacgtatatctttacaaaactgtgtggatattgctatgggataaattcctaggtgttacaccactgttaatttgttgcatttccttaatttacctgatggcttactttgaactaaatgccagaaataatatactctctccttattctgatacttctgtctccttggcttatctaacatacacattgtaatcttaccagacctcacccagacatatttggcattaagattaggcagaaggcattgaatgaaatcaaacttagggtcttgcttttctgttttcctcctcatgtgcttttgaaatttctcttctgatttcttcccctgacaaaatttttctacgagtatatataggctctatagccagacttttgaggatgaaatataatgttcattatttactaagtgtatggccttgaataaataacttttgtgcttcagtttcatcctaaatagaggtaggataataatggtatctacctcataatgtcattgtgagtactaaatgagtaataaacatgtaaaacacttagcacagtgtctggcccattcaaggtacacagtaaatgttagctgttttccttatcattgtcccttcctcccactctcctagcaagctcttcctgattagcgttttattatgtgccttgtatttgattacaggctgatttctgtaactattcacaggtttcataatttgaattgtaaactcctcaaagccagggagcatttattaatcttcttattacctacaccatagtgcctagcacacaattgtgcttaatatttattgactaagtatgtagaattttggaggagctgtcatgaaaccagtatttataaatacaaatctggtttttagctgtataatttttatccttgacctggttgaaaacaaactgtaataattacatttcaggagatgacgcattcatggcctccccctctaacggctattcatacaccatgcaaaacagaaccttccaaatttccttttccaactaaggtaagtaaataaaatgtatctttcataatgtaagaaaactctaaatggcttgactaaaatcatatggattaaaaattgtcttgccattcctattctagtgggagacagacagtaaataagtgaataaatagataaattcagatagtgacaactgttatgaagataattagcagggtaatggaactgagagcatcttggatcaagaggtattaagaaagctttgaaggcaatatgcgagagagatttaaaagacattaatacagccggacacggtggctcactcctgtaatcccagcactttggaaggctgagccaagagactctcttgaggccaggagtttgcgaccagcctggtcaacatagcaagaccctgtctctaccaaaaattggaaggaaaaaaaaaaaaaaaaaaca

SEQ ID NO: 28262 - DNA, 5836 bp, Homo Sapiens
gagaagagatccctgttagagatgaaaatatgttctctgttttggaggggatatcctaaatatcacagataggcaaaacttcagatgctggacaatgtactctttggtgagtctgaggaatgagctttttcttactgtgagtgaacaacggtataaggtctacctgcaagtcggatttcccaggttattgttggagatgagcggcagcaatacctcttggtgattgggcaggttgtagtgatgtccagttagctcagcgtttggctcaggcgaatgaaattgtcctatcctggaactgctggatgctttgcaagcagtatatgtttgaagtggcaatcatgagggaggatgaagctgtgaaggtaggaggctagcttcctgtactgccattctgaaaaggccttcctagtacacagcgcaatgctctggtagtgttcacatattgcctggccaaaccaatgaccattggaactcaatttaggagggaggctgggaatattctcctatgaagatagatgaggtagaacagtgaggctgaggagataaaaggcaaacaagggcaatagaatcctcagcctttcttgtgtgggggcacagaattaaacagtttcctttctgtagttaagagatatgtggatcattgatccatttgattttgatgagcattttgacaagtgcctcaattatctaccacattaccgtacgagtgctggtaagttactttgtccttcctacctaagccccaaattttaaacattaattttccacatggccagggacattttgtttttcttttctcagagactcttaagaactgcactggaattggatccacactctgaacttgaccaaaagctgcagaagcacataatgaaaaaccttttgaagaagcttatttcctagttcttgaatcctcatagagtctctctctctctctctctctctctctctctctctctctctctctctgtgtgtgtgtgtgtgtgtgtgtgtgtgtgcatgcacatgcataaacaggtgtacaattataagtgacaacttttttatatttatccagttaatctccagcaacccattgtaattccagcaaatttacccatctgtgccaacataatactgtgatgaacatgtcttaaacctttagttagatttctcagtcctagaaagtagaagccatatttgttctttagtttgttctttaacaatttagtacactgtaagaagggtatagagtgtatgtttggtaaatataagttgactgattgtatatatatgaatatatgtgaattccttagtaagagatgtaatgactaatggatgtgtcaaattaattcttagagagtaaatcttgacagatttcatcagtgaattctgcctaaagtcagttttaattccaagttcattggtttgtatatcttctatactgaattttcttttaagtttttgctgagacccataagttgttttctcatacataccatgaaatacataattaaaaatgcctgaacatgatgttgatagttgaaaatacaggtaggtaactcaatgtgtctttatagattgatgaaggccagcctatagagtatgtatctgaattccgtacgatgactctggttttggtcagcctagagttccacaggacagcgtggatgttgcatttgtgtcatcttatccaggaggctgccttatacatctccacagtcattgagaaagggggcggccagctgagtcggatctttatgtttgagaaaggctgcatgttcctctgtgttttcggccttcctggtgataagaagccagacgagtgtgcacatgccctggagagctccttcagcatcttcagcttctgctgggagaatcttgctaagaccaactgaggaggaagatccctagatttgtttccatcagtatcactaatggaccagtattccgtggcgtggttggagcagtagcaagacacgaatatacagttattggcccaaaagtgagtcttgcggccagaatgataactgcttatccaggtttggtgtcctgtgatgaggtaacatatctaagatccatgctacctgcttacaacttcaagaaactcccagagaaaatgatgaaaaacatctccaacccagggaagatatatgaatatcttggccacagaagatgtataatgtttggaaaaagacatttggcaagaaagagaaacaaaaatcaccctttgttaggagtgttaggtgctccctgtctctctacagactgggagaaagaattggaagccttccaaatggcacagcaagggtgtttgcaccagaagaagggacaagcagttctgtatgaaggtggaaaaggctatggaaaaagccagctgttggctgaaataaactttctggcacagaaagaagggcatagctacccttcacaggtgctttggaaacccactttattgtgaggtcctatgccaggaccttctctctaaggacgtgttgctctttcatgtcctacaaaaggagggagaggaaaacagcaagtgggaaaccctctcagccaatgccatgaaatccataatgtatagtatttctcctgccaactctgaggaaggccaggaactttatgtctgcacagtcaaggatgatgtgaacttggatacagtacttctcctaccctttttgaaagaaatagcagtaagccaactggatcaactgagcccagaggaacagttgctggtcaagtgtgctgcaatcattggtcactccttccatatagatttgctgcagcacctcctgcctggctgggataaaaataagctacttcaggtcttgagagctcttgtggatatacatgtgctctgctggtctgacaagagccaagagcttcctgctgagcccatattaatgccttcctctatcgacatcattgatggaaccaaagagaagaagacaaagttaggtgcaaagaatgagataaaaggataaaccatccccaattttagaaactcacaaggaagacaaacacatgtggcattgaaacagacatgaacaaagcaagatataaatagcttgcaatctcgaattatccacatgaaagaataagatggtagcatggactacccaaagcacatagaattcacaaatactttccctttgagtttgaaatatgtttgggccctatatttgaacagagaatttcctatgatttgacatttgtaataatttgaagtaaaacctcaatttaggagaaacaattaagaaatcagtggtaatcccagcactttgggaggccgaggcgggcggatcacgaggtcaggagatcgagaccgtcccggctaaaacggtgaaaccccgtctctactaaaaaatacaaaaaattagccgggcgtagtggcgggcgcctgtagtcccagctacttgggaggctgaggcaggagaatggcgtgaacccgggaggcggagcttgcagtgagccgagatcccgccactgcactccagcctgggcgacagagcgagactccgtctcaaaaaaaaaaaaaaagaaatcagtggtatagaagtacaggatttttttgtaccactgatcatttcttctctgttgtactttatacaagatatggtcagtatcactcttagaatggtgcaaaattttttatacaaaggaggcagtaatattagcttagagttgtaaatagaattttcttacacactagcagccatgtgcttgggagtttgccatattgaagcacaaaggattataaaggaaaatctcacttagattttcctaaatttcagatggtgggtcagcctctcttctcaggctacaagaagaattatccctaccacaaactgaggtgttggaatttggagtgcctctgctacgggcagctgcttgggagctctggcccaaggaacaacagatagctctgcaccttgaatgtgcctgctttctccaagttttggcctgccgctgtgggagctgccatggaggagactttgtcccctttcatcattttgcagtttgttctactaagaattccaaggggacctctcgattctgtacttacagagatactggctcagtgctaacacaagtgatcacagaaaaattgcagctgccttctccccaagaacagaggaagagttcctagatcaagtgaagaggaagctggctcagaccagccctgagaaagacctgttgaccacaaagccttgtcactgtaaggatatcctgaagttagtgctcttacccctcacccagcattgcttggtcgttggagaaaccacctgtgcattttattacctgctggaggctgcggctgcctgcttggacctgtcagataattatatggtctgtttcaacatgggacgtatcactttagccaaaaaattggctaggaaagcccttcgactgctgaaaaggaatttcccttggacctggtttggtgtccttttccagacattcctggaaaagtattggcattcctgtaccctgagccaacctccaaacgaccctagtgagaataagaagaatttggcagtcctgcagcagcaggtgcattgcctctccctactctggcagctctataacctggaggccacagccagtagctacaggtttgcctgcctggctactcttatgcagaagaattcagctgatgagtttgcaaatgaagcccaggttgtctctacctatgtggagctctctcagttctcccagagtgtgggcatcaaggacaagtggctgcactgtgagcagatggccattcagaaaagcagtttatgttggttctccagggaggggttgttggccacagctcagctcatgcaggccctggcctacaccaagctctgccttggtcatcttgacttctccatcaagctggatttggtctgtgtgtccatgtactggagagtcagtgggcgctcatttctcagagttatgatgtccttggcctggcctgcttttactctgcttgcttagatctgctgctctatggaaaaggattgctgtgtcggccctttagtgagtgtctgcgtttcgttcaagtctacgagcacagccgtgttctaacctctcagagcaatgtcatgctgggggtccactcctccctggccatgtggtttgcccaggaatcacagtgggacctgtttaagcactatttctccaacgcttgcagttggtgaaaagaaccaatgcctcgctatttggtgcacatggctttgtccgattcctagaatgccatgtgttaatgttacagaaaatgccagagggtatcttcatgcatattcctctagagcttcacagccaaacccttgaggcttattttgccatcagtaactccttcctgttcccccagccatgagtgaatatgctgaatgaggaccttttactgtaaggagttcttctctcaatgtgtgacctgccctgtctatcaccagtgggtatctgagcttaaggcctctgtaatgagatgtgaaaagagagaattgatgtccctgactaacagcatcagaccttttgacacctgcttgaccaggatttggataaaaggagaatttctgcaggaaaataactcttagaaaagaaacttaggaatacagagatttgacagagtggctgatgtcaaggagaacaaggatgcagaagaaactcaagatgtatgtattaaaacaaaagaacaataacctgaagggaccatgattctgttattgtatataacacaaggaaatgccccagattctcctttaaaagatataatgtacatattaagtatactagcctttatagttactgctatctacatgtttatcaaaataaaagactatttttttctaaaaaaaaaaaaaaaaaaaca

SEQ ID NO: 28263 - DNA, 3917 bp, Homo Sapiens
aactttgggaaactctcgcaactcctctgagcctctgcttccctatgtgtaaaacagggatagtaaatgccttcctcaggacccttaataggagaattcattgcagtaatgtaagtaaagcacctcacattaatgctttgctcatggtaagtactcaaatttaactctgatttcctctgtcaccattcttaaaagatattgagatagtttaattaactagatgaattcatttcccacaacccttttcaatcatcaattcctagatatttttctcatccattgttctgacacaatgcctgatacagcagcactgaaaaatgccacacaatgaaaaatggcaatagtacaaggaaaaggggtgcttttctttgggcagctcgctcgtccttcatgggacatcttactttccatttttctacctattggttctgctgttcactggctgtgtgatcttgggcaagatagtaatctaatatctcagagcctaggttgagtatctataaaatgaaaatcaaatctctatctcagtaggcgttgcaaggattcagtgagataatatacataatgcacttaacaaggcgtttggaccatagcattgaagaaatggaaactattaacagcccatttcccattggcagacagaagtagtcaggtgagtaaattttcaccatctatgtgtgactagaaggcggcaaatttctgaatcacatgagtctccaaaagatagccagaaagttaaattctattaatcctcctttaaaaataaaatttcagtaaacattcctttttctttggctttgaagaagccttagggaatatttgtcattttggagacttggcagaataacatgaggggattgtagggaatcaataaaaactaaacaacaaaatcagagtcagagaacattttcaaaaggaagaataggaggtttgatcccagcatgataaacagagcgaatttggcctggaagcacttttgattatactatagctcatttaccatcccagagtttggcacagctgaaattttaagttggaatgaatattcactgggcccaaaatgacagttcatatttgaataaaagtgacaaaagcctttttataagtaatcacttttaagtgaaatgttttaactgatttcatgtgatttagaatatgatttaatcaaattattttaatgatagatggaatggcagacaaaaacatgcctgtccttctagactgattttactttaccctctaatattcatctcagtagcagtgttttaaatattctctgggctgcaaaactctttgggaatctgataaaagctatgaacactccctgtgtcccgcttctacccccaaaattcatgtgcacacacacaattctgcaggtatcttcaaagggttcacagacctcccaaaggccatgcttgggccccagattaagaactcctttctccatagcaagttttaaacatttcttaccagcttacatttttagatctggctgatcagaatcaaaggctctgtgtaatacataaagttaccaagtgaactggaattggaacatcaccctccccagcctgctaggtgatttacttaacacatagagtaataaaatcatcgctgttgctttagatcacggattattttgctaataatgctaaggatgaagctgtgatcttattatcacctgaatcgggaggtgtggacactttaagcagttccactttccttctaattccccatccccatgcctttgctaaagctgtcccttttgctctaacacccttcctggaccttcctaccctagctgggctaagtgtttctcctcagcgttcccacttgtttcaaacatagcacttaccacttgtactaaaattacttgccttcttaattagatatgaacaaccctccccaactccagtatgggccttctgtcaataataatacgatatgacagctaccatttattaagggcctcctgtatgaaagaccttaggctaagcatgttttaaatgttatttaatcttcacaatctctgaaaaaaatgaagaaatcaacgtgcttttcttactacctctacccctaagccattattacttttttttttttttttgagacagagttttgctcttgttgcccaggctgcagtgcagtggtgcaatcttggctcactgcaacctctgcctcttgggttcaagcgattgtcatgccttagccttccaagtagctgggattacaggtgtgtgccactacacctggctaagtagagatggggtttcgccatgttggccaggctggtcttgaactcctgacctcaagtgatccacctgcctccgcctcccaaagtgctgggattacaggcatgaaccactgcacctggcctgttacctctttcctacaattttgctcaagtctcccaactggtcttctggattcctctcttctgcggtcctgttcaaagcttaagtcagacagtgtcacttcactcgtctgtttaaaacctttcaatggcccccatttcacgtagaccaaagtccaacgtatttacctggcctactgatcttgctcctagctacctctgacctcatctcctgtcaatttccccctcattctgttccaccatcctgactgccttgacttcctcaacagaacaagcctgctcctgcctcagggcctctgtccttattcttcctcttcccaggggtgtgctggtaaaatatttaacaaatagttctccgggacgggggagaaaaccctcatttgtagcatttgcaggtatctatgtgtaaatactctcatcaaggctatttttgagccactaatttgccttcactgaatacagagtttgggaagagatgcatgccatcagaacaaatgcaagccagcaccagcacaccactgcctctacctgcaactcttgtccatacacaacctcatggctggctggctcacttcctgcaggtctctcctcaaatatcatctgatgagagacacattccctgactatgctttctaaaataggccatatgcccccacattcataccccatctgctgtcattctttattctttttataagtgcattattttcatagcacttatcactacctgttgtatattaatcaatgatcttttcccattagaatgtaagtttcatgaacaggtacttgttttaatactgtatctccagtcctaatgtgtaacaggagcccaataaatgtttgctttcaaatggagaggttaagtaacctgctcaaatcacacagctattaagtggcagaacaggttttcaagcaatgcatctggtggttttaactaagtcgagatagtttttattcctaatgcctaaatcagggcctaggtagtgagctgtgggcacatattaagtattggttaaactaaaaataataagcaaaatggacattatctataaaagcttttgtggaaatggctagagctagggtaaggaaacaaatttggttccccatacctgccctccaagaaaataaagctgtcaaggaaaatctgggctaagagtaggatatgagggatgatggataaggcatgagacatgagaaataagggggattaaattattattactattatacaaatgatgcctgagtagatttttaaaatgattaaatacccaatgatgtaaaaaacatttataaaataggaaagtaagactgactcaaccataatttgttgagtcaacccaaaaatctatttggttattttcaaacagaaatagcctacagatgatatctgagattgttccaaactttttctatgaatatgtatactttttttacataattaacataatactgtatattaatttgttacctgctttttcaattaacaatatatcataagcatctatgccaataaacacaattctgcataaaaaaaaaaaaaaaaaca

SEQ ID NO: 28264 - DNA, 5565 bp, Homo Sapiens
gcccctcgctgttctgccctttgtcttccacgcctgccccttcaactcctcttgccctgcaaaccctgggtcgccacctccacatcccttccacttctacctgcctgccttggcctgcattttattttcaaccaaggttgaaatggtagccccacgcaaaatccgatggtgtgtggaggaactgcccagtcattgcagtctgcacgccttcttaagtgccagatgcgagcaaggccgaccaggaactgccgatgggcttcacctgtcagactggactgccacctgccacacattcattgaactttcaataagcactgccgctgtgcttggcgttttgctgggctccagaaataaaaaattcagagaggccaaagttcttcagggatgcagacaggtgatagaaccatcatttattgagcacttgctaagtgctaaatactcttacctgcgttatcttgtgtaatcctcacaaccacactcaacgacggcctattgaatgctctctaggtgtctggcagtgttccaaacagtttatgtgtattactttgtttgatcttcccaaccaccaatgagcggatattcaactcctttgtttacactgagaaaatctcaaatggagaaagtgaagtacagcagctagccaaaaaaatccgagagaagttcaaccgttacttggatgtggtcaatcggaacaagcaagttgtagaagcatcctatacggctcacctaacctctcccctaactgcaattcaagactgctgtactatcccaccttccatgatggaattcgatgggaactttaataccaatgtgtctagaacaattagttgtgatcgactttctactactgttaatagccgggccttcaatccaggacgagacttaaattcagttcttgcagacaacctgaaatccaaccctggaattaagtggcaatatttcagttcagaagaaggaattttcactgttttcccagcacacaagttccggtgtaagggcagctacgaacaccgcagtagatttctgtgttaactgtggcagataccgtccggacttgctcactagaccagtgctataagaccttcttgtctccagccaccagtgagacaaaaaggaaaatgtccacctttgttagcagcgtgaagtcttcagacagtcctacccagcacgcagtgggattccaaaaggcatttcagctgattcgaagtacaaacaataacacaaagttccaagcaaatacagacatggtcatcatttacctgtcagctggcattacatcaaaggactcttcggaagaagataaaaaagcgactctccaagtcatcaatgaagaaaatagctttctaaacaactctgtaatgattctcacctatgccctcatgaacgatggggtgactggtttgaaagagctggcttttctgagggatctagctgaacagaattcagggaagtacggtgtgccagaccggacggccttgcctgtgattaagggcagcatgatggtgctgaatcagttgagcaacctggagaccacagtgggcaggttctacacaaaccttcccaaccggatgattgatgaagccgtcttcagcctgcccttctctgatgagatgggagatggtttgataatgactgtgagtaaaccctgttattttggaaacctacttctgggaattgtaggtgtggacgtgaatctggcttacattcttgaagacgtgacgtattaccaagactctttggcttcctatacttttctcatagacgacaaaggatatacacttatgcacccatctcttaccaggccatatttattgtcagagcccccacttcatactgacatcatacattatgaaaatattccaaaatttgaattagttcggcaaaatatcctaagcctccctctgggcagccagattatcgcagtccctgtgaactcatccctgtcttggcacataaacaagctgagagaaactggaaaggaagcctacaatgttagctatgcctggaagatggtacaagacacttcctttattctgtgtattgtggtgatacaaccagaaatacctgtgaaacaactgaagaacctcaacactgttcccagcagcaagctgctgtaccaccggctggatctccttggccagcccagtgcttgcctccacttcaaacagctggcaaccctagaaagtcccaccatcatgctgtctgctggcagcttttcctccccctatgagcacctcagccagccagagacaaagcgcatggtagagcactacaccgcctatctcagcgacaacacccgcctcattgctaacccgggcctcaaattctctgtcagaaatgaagtaatggctaccagccacgtcacagatgaatggatgacacaaatggaaatgagtagcctgaacacttacattgtccgccgttacatagcaacacccaatggcgtcctcagaatttatcctggttccctcatggacaaagcatttgatcccactaggagacaatggtatctccatgcagtagctaatccagggttgatttctttgactggtccttacttagatgttggaggagccggttatgttgtgacaatcagtcacacaattcattcatccagtacacagctgtcttctgggcacactgtggctgtgatgggcattgacttcacactcagatacttctacaaagttctgatggacctattacctgtctgtaaccaagatggtggcaacaaaataaggtgcttcataatggaggacaggggttatctggtggcgcacccgactctcatcgaccccaaaggacatgcacctgtggagcagcagcacatcacccacaaggagcccctggtagcaaatgatatcctcaaccaccccaactttgtaaagaaaaacctgtgcaacagcttcagtgacagaacggtccagaggttttataaattcaacaccagccttgcgggggatttgacgaaccttgtgcatggcagccactgttccaaatacagattagcaaggatcccaggaaccaacgcgtttgttggcattgtcaacgaaacctgcgactctcttgccttctgtgcctgcagcatggtggaccgactctgtctcaactgtcaccgaatggaacaaaatgaatgtgaatgtccttgtgagtgccctctagaggtcaatgagtgcactggcaacctcaccaatgcagagaaccgaaaccccagctgcgaggtccacctggagccggtgacatacacagctattgaccctggcctgcaagatgctcttcaccagtgtgtcaacagcaggtgcagtcagaggctggaaagtggggactgttttggggtgctggattgtgaatggtgcatggtggacagtgatggaaagactcacctggacaaaccctactgtgccccccagaaagaatgcttcggggggattgtgggagccaaaagtccctacgttgatgacatgggagcaataggtgatgaggtgatcacattaaacatgattaaaagcgcccctgtgggtcctgtggctggagggatcatgggatgcatcatggtcttggtcctggcggtgtatgcctaccgccaccagattcatcgccggagccatcagcatatgtctcctcttgctgcccaagaaatgtcagtgcgtatgtccaacctggagaatgacagagatgaaagggacgacgacagccacgaagacagaggcatcatcagcaacactcggtttatagctgcggtcatcgaacgacatgcacacagtccagaaagaaggcgccgctactggggtcgatcaggaacagaaagtgatcatggttacagcaccatgagcccacaggaggacagtgaaaatcctccatgcaacaatgaccccttgtcagccggggtcgatgtgggaaaccatgatgaggacttagacctggataccccccctcagactgctgccctactaagtcacaagttccaccactaccggtcacaccaccctacacttcatcatagccaccacttacaggcggccgtcacggtacacactgtcgatgcagaatgctaacaatctcctcacctccacgccaagatgagatctgggagccacagaatgttctggaaagaaaaagaaccggcttaaaacccacagcaagagacctcccttgtgtttgtgctttgtgcagagttgtttgagtcatttcctgcctgtcgacatggttaaaaacgagagaaacaacaacacagtcacatttgtgaagatgtgaggctggttctgaaatggaggggaaataagcctgatgaacagacctgccataacactaatggaaggtaacagaaggcgaacctccaaacacagagacggaacctgcaagtgaagctgagccagaggaatgttccaaagagccagaagcattcagctctccttaactggaagagagaaaaatctgctcacccagagactggaatgtggcacatgcagatacaaatgtgtgcattgaagatttcgctttgtttcttagcggtacctggataccacagttgctgtatggaactcatgttatgctctaaacgatgcatctcagaatttctaagtaaaggattatttttctactatttattgaactttcaaacattctcaaactttggggaaaaggaaaggaaacacaggagaagttttcagcagttgccccgagctgttttgtgtgtaatgaagtggttctttgattaaggagctctatttcttatttaactgatatcccactgccccactccacaaaataggaaaatgaagaaatctttctctctgacttgtttacatcatttcacggaaacacatctttgtttgtaatgcagtattctttctctgtgtttgacagagatggggaggggcagaggaatttaagaggttttaaaagaaatgttatgtttcttatgacttgtttccactcctcgtacaatgctattcttaggtttctacgaaacctaatgttagaaccgcatcctttcagctaagggagggttggatttattttccttgttttagagactacaaatttttaaatatcccattttgactgagaatattgacatataagggaagaagttttctaaattgtgaaagtctggttcttaattaaagaattttttttttaatatcacggttaaaagctgctgccagttagccaagacattatccaccaaattgctttgtgatttatacagggattaatcaaatctggctactataacatggggcattgtaactttaaagtagtgttttaattacagtgatgtattttagactcacattttgtgattcaaatatgttataaaggcattcttgcaccatggtaaagaatgtgtgtggtaaatctccgtttatatgtagttggaaaaaattcactgaataatgttttaatgatagggtattatgatacaatgtaaaaaacaattggttcttcagcagtacagaaagtaaactatatatgtgctatcaggaaaccccttcatactgtgtataaaattgcaatctagtgaaataaactgtatgcaatggaaaaaaaaaaaaaaaaaca

SEQ ID NO: 28265 - DNA, 3892 bp, Homo Sapiens
ctaattgaatacctttggcaaatcatgtagctcttcagtgcctcaagtgcttcattctgcactttcatttgcagaatgaagatgatacttgctatttacctgctgatctaccttacaaagccattgtgaggaagttgaattggtgtttatgtactggagtttataactgtgctatttttcctagtgatacttgaaggtattggatggggaaatgatcatcccagaaatgggtccagtttcttattattacagaaaagtttacaagtacttaaagcaaaaacgcttttggactaattcatcaaaagtcctgtgaaagtagtgttgttttatttagtctttgggtttactttggaatagtttcttaagtataatgtttctcatcaggttttgtcatgaaattaagatgctgttgttgaaacagaagcagaaaaggaaaagaaattagccaattacttttataactaacttttataatgccctaagataaattggtaggaacgtgtaaggtaatgttaccactttcctttagtattaaattttttatggttataataattgaagtgtatacgtgcatacacttcacaaccagtatagattcctttatgactttcaagttatatttaaaatatttggttgtttcagtgattcagaatattcaactttaagcagaatttgtcttacagaatgttatatacaatcatataaaaatgttattttgttggataaatttgagttcagaaggcaatgacttgaccctggaagactcagtttattgctggggaaccaagttaatatttgtcaagccaccctgtgtaaaaaactgtaatgggtagaagttttctcttttgagaagcttattgaaatataatgacatctactgcaaaataggactactaaatacatatactttacatgcaaagtacatttcttaaagaattatttctggtaatttttgatgactttattacttgataataagtattagtttaaaattttccaaattattctttaaatagttgttaggtaagaatattcagtaagccagtaattcagaataactattgtagaaaataataataatctattaatttaatgaatcacctctaaattactaattaacttcttttacaacataaataacttgttatcaatagagcatttttgtaaaaaacaaaagaaagaataagtttaattattaaaatttgctctcttaccaaatgaatacaagggcttttgaataatctcattgcataagaggccctcatttcacagaaatggtaagaactaaatcaaaagattcaagggttttccctttataaagaatagatcagaaaatttgacaatccagacattcaaaaaaacattctgccagttgatttttttggactactatttgattagatgatcagttctgaaatttaagctgcatgtatgcccaaattaaattagcataggaaagtcaatgtgtgtggttttttaaaagtatattttagcatattaatggagcaatttaatttacattcagttacaaacctcattcttattaataggtttagggaatgttcttgctggtgtgctgattaccatattagagaaaaaataaactctccatattataattcacctgtttagtaaggtgagtttcttacttgtgatttgagtggattatgcctaaaaattacaagtatatttgcactaagcgacaaaatatgtccctgaaaaatcttagcgtacttgaatcatcaaatgtaatggattgtattgaattctaaatgttaagaagtaagtggatttagggttttgtctttcttttcttatgtcctctctcattcctttatacctttcttcctttctgaggcctatgtttatagcatgacttttaatgtgctgaaagattttccttctgttttgtgtacagagttgtttttgatgagtggtacgctcagaaggaactagttctgactacaaatcccactacttgaaatagcaatattgtacctaaagtagtcaaacagattttgctagacaactaagcaacatctgaatacaaatgtaaagtatgctggctcagtgtatcttttaggtcactaaagaggacacatcagtaaataaattgttttcagtgtaatatttttacataaaaatagatttcccccccaaaatttaagatttatttagattcttgagacatctttttatgaaaaggaattaataacatacatcatcaaaacttttcttaggagcgttgaaacaatataagaaggttacagaaggccttctaaaatatgaattcccatctgtatgaggtacttctttccaactcagtgactttttgcccagagacttggaagactgggcaatgttttctttcccctttcccaactcctggagacaaggccctaggagcaatttcctccagtagggcaggccgtagtcctgctctgtcttacttcccactgcagcaggaacatgtcctcgcctctgattccttctgtaccaagccattggtccattgaggtcaattgaggactcgctgtaaattttaaatctgttaataaagcaaggatattggcatgttcctcttctcatcaatatcctaaaagacatttattttttacacactccttgggaaaaattaactttttttcactgaaaatatttccttttttggttatcttgatctcagattattttgtgaaagaattttactgtacttagttcaaaagagaagaaagaatgatttactattgcagacatatgtagggtaaaatcataatttatttaaactgactgtacaacaccatttagagttgatattgacataaatgttattagcctactaatttggaactgcatttctcaacaatgctggcaagcatcttccgtacttagcataccaagttgtaggggagagactgtgtatatattttttaaaagcaatccaatggatttgtttttgttcatattttgaaaacaactcgaaggatttttcttattttagaaggtagaaaatatgtggacctgtgttttaaattaatatgtatttataaattataacattgaatgatacaacagagctctaatattgatgttctcactttctgatatttaatttttataaatgtttttgtaagtaactaattgtagtattgcttttaaatagttttaaaatctatctcaaataagttctgcccagacctatttccttaggacagtattctaaagttcagtagtccagtgtgagcttgaaatactcctagatcccgtcagtgatttttatatataccaatacacaagcaaattattaatataccaaaaacctaatttctgcattgcattaataaaatacttgttattttgcctttatccaattcagttgattaggtgaaatagaaaattaatcttttcaaatgtgcatatgatcataatttttcaaaatgttactgtggtcatttttggtgcatgatgccaagtttatctttagttagccattgccacctgatatgtaatgacaaatgttttactatctgatcattgggttgtagattaaactattttttttctctgtagattctcactacattttcaaatatgtacttggaaaaagctgcaaagtgctacctataagcaaattagtaactttggccttatctatgcatagtgttcgctcagtttggttttgataaattgattgacttgcagttcctttgtagtattttaacttattgtgatgtaatgaattttttgaaatgtttatttgattagctgttaaaatataggaaagaatgtagctttgcatgaaataaattacatttctacaagttaaaaaaaaaaaaaaaaaaaaaaaaaaaaaaaaaaaaaaaaaaaaaaaaaaaaaaaaaaaaaaaaaaaa

SEQ ID NO: 28266 - DNA, 3593 bp, Homo Sapiens
gaggtggtagttaacatgcacaaattctttagacatttctattcagattttctgatttatttctttcagctccattcatgttgtcacgataaagtaactgcacaagggcctatattcactacagcagcctcttaactccttacctctctcagcacccctgcccccatgcccttttccatcctgcacactgccacagctaaagtcagcttttgtactccacctgtctttttctcactttaggctccctagcatgctatgtgtgttcaactcgttctgtttctccctgtgtctcttgtgtgtcctttctctatctgataaaattatacttgacttttaaaacttggctcctgtaataccatgacttttctaactaaataaacattattatggacttgaaatagtattctattcagttgatgaatattcagttgattgaatattctattcattgaagccaatataagtgaatataaatataaagctacagtgcgtcttttaacctattcaaatcaagcaggcttaacttgattatgaaaacttttgagaaaaagaaccatatatatacaactgttatgatttctatagcaattagattgctgctacttggcttttaataaatgagaaaacaattatatacacttaaagatttgaatcctaattaggcctgctgtttagtgtaataaaaacataggctttaaacactgtaaaactgtaaaataaatctttcagggatgttaaattagaagacacctactttgatagagatgtggagaaggcatttatgaaggctagctctgaactcttcagtcagaaaacaaaggcatctttacttgtatcaaatcaaaatggaaatatgtacacatcttcagtatatggttcccttgcatctgttctagcacagtaagtataaatttcacctactacttaactccccttatttgggagatgttagatttctaagaccaaatctagtgtcaagcatgttggtggtagatcacagaaaattttatcttgaggctctctaatctgctattgtccattgacttgaaagatgtatgggttgaggctacagttcttccagaagtatttgttaatttcatactggctttcctggcttctgttttcatggttttttaattcttgacctacagttgaaccataaatacctggttgatgaagtaacttgttttgtggcatgactttcacaagctctgtcattccccacaagatgaaaactcacatgctgcaatattaaaactaagttatattccctactgcaatattaacactttgagttagatccttaaaactttaagttagattctacttttacttatagcctaaatttttattgctacttttatagcttcccacacgctgtagctttggatcagttaaacttctgaactattgttacaccctacataggtactcacctcagcaattagcagggaagagaattggagtgttttcttatggttctggtttggctgccactctgtactctcttaaagtcacacaagatgctacaccgggtaagtgctgaatctttcaacaagaatgtattgagaactgagtccaggcacagtggctcacacccgtaatcccagcagtttgggaggccgaggcgggcagatcacctgaggtcaggagttcgagaccagtctggctaacatggctgaaaccccatctctactgaaaatacaaaaattagccaggtgaggtggtgcatgcctgtagtcctagctacttgggaggctgaagtaggagaatcacttgaatccaggagagggaggttgtggtgagccaagatcacaccaccgtgctccagcctgggtgacagagcgagactctgtcaaaaaaaaaaaaaaaaaatgtattgagaactactctggggaagttgatttagcagtcttctcaagtgagcacctgaatctgtcccacagatcattacaatattttagtcttcattacttctttcagtaggtttttactctctgccctaaaatctatccaaaaaaaaaaaaaaattctaccttatctggataaaggataggactaagttatctaatttttataggcttatggtcttggctatatttaaggtcacttttgtgctttccctgagcaggaaagagcaaaaatgtagagataaactgatgaaaacttgacattactttttaaaattataccatgggccaggtgcaatggctcacacctataatcccaacacttcaggaggctgaggtgggaggattgcttgaggccagatgttcaaggccaacctgagcaacatagtgagaccccatctctataaaaaataataaaaataaaataattgtaccatggattaattgtagacaagttatttatagtttcaaattatgcctgtttcctaacttgtctagtggcagatactcaataatagatttctagtctgacatcataggagatttgtcaaataggtatcatctcatcttttaactaatcagtagccagtagttttaatgaaaatgaaaagttgttttgcctcatttggcaacattttacttaggcttcttttggacatgatttttcaaaaaaatcttttaatgttgaattattcactattttagggtctgctcttgataaaataacagcaagtttatgtgatcttaaatcaaggcttgattcaagaactggtgtggcaccagatgtcttcgctgaaaacatgaagctcagagaggacacccatcatttgggtaaaaatattaaatgttctttaagttaacccatttggagggctgatatcattaaggatgctacatatacgataaggatatcaagactttactcagtactaatctgatgtcagtgaaaattattgggatatatgaaacttatctttagctttattaccagatgaattgtatatcataactaattgtagatattctctccctttcctttagtcaactatattccccagggttcaatagattcactctttgaaggaacgtggtacttagttagggtggatgaaaagcacagaagaacttacgctcggcgtcccactccaaatgatgacactttggatgagggagtaggacttgtgcattcaaacatagcaactgaggtaaataaaagagttcccatctccatatcttagggtttaggagacctaactgggatttagcaacataaataaatgtcagtaaagaagagtaagggctctgggagtagattctagctgtactatttccaattgtataaagtgctttgcatttgaattattaatattttaagaatatacagtaaaggccgggtgcggtggctcacgcctgtaatcccagcactttgggagactgaggcaggcagatcacgaggtcaggagatcaagaccatcctgtccaacatggtgaaaccctgtctctactaaaaatacaaaaattagttgggcttggtggcacgtgcctgtaattccagctactcaggaggctgagtcaggagaatggcttgaaccagggagtcagaggttgcagtaagctgagatcacaccactgcactccagcctggcgacagagcaagattccatctcaaaaaaaaaaaaaaaa

SEQ ID NO: 28267 - DNA, 4086 bp, Homo Sapiens
gtggagatttgttcttactagggaattttggactgctgccatttaaaacttaggtttttatttaaagcagttgtgcatttttgagaaaatgtattgggagtaactagagaggatctcccaaatttttttgtatgtctctctaggagtaaacatggcaacagtttttctagaacgtggactcactgcagggactggacccaatggcattgttaagaccctaaaatctagccaccacctgcctcccccaagtttccacacacccagttggaaggcctttccctgcccttgtccctgtctcacacccatggaggttaagctacagagctggggaaacaggagattttgagttaatggcagcctcacaaatagtgcttctgaatttctctgagggtcagcatacctcatgggagtgtgttgctcagtgcaaccttggaaaagtgggaatggcaccagacgtttttcaggtgcctcttgcaattcaaacttacatcctctataccgtcctaaaatttgcctgatcttatttggtagatttcaagttgctttcagctgtgaccgtaataactgtttcaggaactggagaaatagtggaagtgctattgccgcgctgcatgtaaagcacaggagcaaagattcgatacaattagaccctttaagctacaacgtggttgcatttggggagtctgatacccacataggtatcacattttctctgcctggggttaatttgttcttattattctaggtaagaaattgatagcttgttatgcttggtactcattctgaaatccctatgtgtccaccaggcagacttcaagcaatctctacctactattatatctgccaaaactaccaattatttttcaatgtcagaagttattagagccactggcaaagctcatggttgaatatgacatttttctgcttttccctctaagaagtttttgagaatgttaatgttgaagtatgcaggctggacctaccagcaagtttaacacgttaattaggttaaaaagaatattaaaaggcaataattaaatatttcaattattttgtaattataatggtatcaaataagatgcaaaagaagttgatgcttattggtgcttaagagaatgacaatactggttttatgagcatcttttctctgcaacagttaaactgcctcagagtttgtgaattgctgcaattcctggaatggaaacaggaattagggtcactgattgattggcacaggatctttccatcgtttctgctcctgacctctctctcttgcctttccttcccccagacaccctcttggtttccattcctttagttccctctgctttagaacacagattacatgttggaaagaaaaatggattaatggtaaaatttctaaaagctaaattgtacagtggggtctcacttcctagaagaaactattggtaatatttctttctaaaggtaatagtattaattgtatctggttttcttcaaaacttaactataatttccttgtcagggtgctcagtagctcttggtttgactttgggctaagggatgtgaaattttagctccttcccaccacctgtttgccctcactcccacccccagccaatattcttcataagcaaaaattatggttaagctaagctgaatgggttatattcaaagtaagtacagacggcaaataggcagacaaatacaggaatgtctttacaattagcccaccatggactgttttgagtctctgcatggtttccataattcattatgatgtatctttatgctctttcactgctcttctgtgcgttggagtttagcaattcagtgagactggggagtgtctcaagaatggaacctttgccttcaaggttgggtcatcaaaaatccctctaaaggatctaactgtaatgaactgtttttatttttgccattagtgcaagtatcaactggcagcctcaaacagctttagactatgtctcaggtctctcatagttatacttagaactgctctttcttgaagctaaaagaggtttttggagtaaagatctgcttcatgtctgctagcatggtatctgctgttcaacctagtatagagcatgtgaaatgcaactgtcctttaatggaattcagccaaactccaaaaatactgagttgcttctagttatctaaagtagtacagaatcactatcccgatgaagaagtggggtttttcagaagattgtaaactcatttccatggcacagatacaaatcatcgtcaggacttgttagccagtccatgtctcattgataggatgtagcctgccatctgcatagatggtttaacatggtgctgtttttgaaaacttgctgtggaaataaatttgacagaagagtagttatttgtaaagctgtcctagaaagaggttaattcttttggtatatgaatatttctcctccaatccttttaattaggtggttcagcttatcttgtattttctgagtcataactatactctagggccaagacctactataaaatctggggtcctaaccagagagttgtttagatcaatatgatatgctttgccaacatgatctaagaaggtattcattctttctgggtttgagaagagttgacgaaagtgtaagattatactctcatgctaaaataaggtataggctaagtgaaatactgtaaatgggttggttagaattaaagtttagaactctaaatcttatgcttatttttaaagtaaaaagttgcctcactgtcatgaaatcctgttactttcattaaaaaaaaatcctgtaaaatggtcaaattggataatgtaagagataatgatggctttgaggcatttcatactttaccagtttacatttggctagcagactggtaaggtttagggttctctccacaaatggaaaattaaatgctaaacgtcctaagaattatgttgttttcaaggctttgactcagatttgtactttgatgtatgaaagtgaatatcaaacttgtttatagaaaagactatatagaaaaataagtctgtgttgtgtatagtgatacatgttttatgtttacccaatgcctgtactaaatcttgtgcttggctttgaattatatatgtgtttacctatgacttttttttgaaataaacagaacagtcatctaaaaacataaggttttggaaaggagatgctttttcaattcttaccatctgataaggtggaatgttttatagacttttggtgttgaaaaaaaaaagtttgataacaatgcattttgcttggaatatcccccaatccagaaaagttggtgacttctctccattgtatatatgtacatagttttcattactagattgtaagctcctcaagggcaggaattgttttatctttgttgttcctgcagcacctaatgtaaagtgccttgcacagggtaggtgctcatgacgtgtagaatgagtgagtaacttcctgcctcatcaggatgaaatgtggttcacttcccctgtgttcaacactacaaagctactcctgccagaagagggcagagttctttcttgggtttgaactggcttttttgggttgaaccagatcatcccacatccttagcactacttaaccttcttttcctgaagattacatatcagtgtcctgcgtttttatctgatattagagctgaggttcctaggaaaattttgaagtggggaagattatggagaaaatgaaatggaaatttggggacggtggtttgtcagtataaggccctgtggggtaatcatattttagttattacttgttaaaagggtaacagaacctctgtttctttaccaagtcgctggttggccatttctccaattgatgaactaccattggttttagctctttctcatttgggattcccctcaattgcttacatgattctggtacttagagtctaatagagttgctgtgaatatgtagtgctgtacataatggcagttttgtaaatgtgagataaccttgaatatgttgtggtttgtatacagagccattagtattgttattttggccacttttttattcaaaataaataacataattatttgtaaaaaaaaaaaaaaaaaaa

SEQ ID NO: 28268 - DNA, 3244 bp, Homo Sapiens
gagcctctgtttactgtgcaggcatcattttgacatttatgaatgtcagagaacaaatgacttcatctcgagctgcctaaggctgcaaagagttcattagaaagcaatcagaattcagaacgtcttagtacaggcttcagtttataaatatacaccagtgtttccaaaacacagtcctcagtgtgtgtcatggggtctgtggtgtgtccccagcctttgaagggtgacttcgtcgtctctttgcagcctacacagacgacctgggtgctgtgggtggcgcctgcctggaggacgaggccagcgccccgcgcctggatgaggacagcgagcacccgcccatgattcttcggactgactgaacttgacctgtgacctctgacccggggagcagagaacactggcttcacagaggactttgtgcattgctgctatgaactttgacctgagtcgggggagaggatggcagagactttattaaaaaaaaaaaaagattgtagtggtagtctaactccataacgctgaggaaatacatcattttcacttcagtggcttttaaatcctgcttatgaattttagctttttgtttgtttgttttctctttttgccaaaattaactgtttggtgaagcccgcaaaacctcctcgctttgcatgcatgaacgtgccaagccagcataggggagctagaagccactttccagccacctgccgttgggttttttcatatctgtacataatgccgagtgcgtaaggaaaccgtggcgtcgcgcacagtgggtctgcttgtcaaggccagttctgcagtgacaggcccaggggctgcccaccaggtgtgctgggcagacttcagctgggacagaagtccgatctccctagggccccacctggaccattttccctccgttttattttgttaattaaattctttccaaattggatcgctctgggatttcttccatggtggacttttgtttctgatcttgttttccctgtggatattggaggacagcgaggttctttctgatactaaaaacctttctttcaggcagcaaatgaacttgaaaggttgcctggactcgctggagcaaaggaaagcgattttgtttgtataattaaatgatctgttcttctacttcactcttcctgttgaaaaactgtgtgatttttttttttttttaagtaaagtttgtagctcctcccatgcccaggaaagcacagaactcaagtgtggtggccgtctgagctgtcctttcgctggccccgctgtccgcaggggcttcctacctgtgtgagaggtcgtagcgggagacagcaacagagagtaggcggctgggccacgtccttcacagggcgtcatgtgcctttctattttcatcttagaaaatttcctcagcaaaccgatgagagattgtggttgcaagcttcagtatttgcctcgcttcccttttcatatttacagaattaaaacaacctcaagtacctcagactctgcattccaaaccaaggcacccagcagccaaagtgtcgagggcatttaagtggcattaatggcaggagagatggttttagaatctatggagtggtggaagttacggatagaagggaaaaggcaaaaactatttaccctgcctttgcaggctggggtttttgaaccgaggaaggctgggacgcctgtttccagatggttgtcatggtcacgctgggcgaagagctggaggggagttgtcccctcagctgagcggctgcggtgaaatgccccagtgttcctgggttggctttacggcaaactaaatgcaggggacgctggagtccgactcacctacaccggcttcctcccagccgctggtgtgcggcacacacaacatctgcattaggcagaggtgcaagtgggctgattgaacttttccttcaaaacctgcttgtctgtcctggacctttgatgaaatgggatcctggtcacgcaggctgagacagtggggaccgccgaggccagagtgggctatgcttgagcagggatgagaagggccgcggcagcacgcagccttgacccacgcctgcgtcttgtggtgcaaggccagagggctctctctagaacctgaccgtgcactccatctcctgggagccacttttggcaagagtgagtgtggggggaaaaagtgtgcacaagagatacggaaccctgagctagggtttcctgtcaccaaagagtgagctgcatttccagttctgcgttaaagtatcgtttgttctggtgcctgcctgtggtggtgatttggagactcaaatttcctttgccaggtctcttttgtctttctttgggattggtagtatagaagatgctgggaattgtcttcctcgctcagcctcggcttcccgcactgtaagatgaggcagttgcagaggaggcctcggacgtcctgtgaccctcggcccacactcccccttgggtggccctggcagggctggctaggtgcgttccctgcagaccacgggaagccctgtgcttgcctgggtcagggctaagctgtgcgccctagaggagggaggaggactgcagattcttggtcgagaagaatgaagaggatttctgtgtttgctgagcagccattgtggagggttacccgcctccactttcccgttgcccatttcactgccaccagctcctcttcctctgctcgaacctatgagtcccagcctcactggcggcctcagacatgctcaggagtgacggggacagagggaggccgctgagttgcccgttagaactcttactgctgcgccagtgacccaggtggagagggaccctgaaccaaacagaacgtgtgctaattttccgaactccaaactgtacactcatattcatttttaaattgtatttttccaaacttcaaaaaggacgatgagcgtgggggataggaaacaaaacctgtaaacgttgtgaatgggctcagtggactctgggaccaaaccttctgtaatctctaaaacaatgggaccaagagctggatggaacctggagtcaaaaagaactgcttcagtccccgctgtaccgcctgcctagctgtgggagcaggcagggcgcctgggagcctgcgttttctggaccgttccatgggactcatccctacctcacagggctgttgtgaggtgttgtgtgactgcgtgtcctgcaaacgcccagctcggtgcccagccagcggtgggcacccaataaacgctacaacataaaaaaaaaaaaaaaaaaa

SEQ ID NO: 28269 - DNA, 6625 bp, Homo Sapiens
caacatcaacaatttttttgagttttcaaaagaagttgatgaaaaatcctccttgaagactgccgttatcagtatcgggaaccagcttcttcacctgaaagaaactgatacagctacactgagagcttctttagcacagtttgaacaaaaatggacaatgctcataactcaacttccagatattcaagaaaaacttcaccagcttcaaatggagaaattgccgtctcgtaaagcaatcacagaaatgattagctggatgaacaatgtggagcatcaaacttcagatgaagactccgtgcattcaccaagttctgcatctcaagttaaacatcttcttcagaagcacaaggagtttagaatggaaatggactataaacagtggatagttgacttcgttaaccagtcattacttcagctaagcacctgtgatgtagaaagcaagcgctatgaaagaacggagtttgcagagcacctgggggagatgaaccaccagtggcaccgtgtacatggaatgctgaatagaaagatacaacatttagaacaacttctagaaagtatcactgagagtgaaaataaaatacagatcttgaacaactggctggaagcacaagaagagagactgaaaactttacaaaaacctgaaagtgtgatctcagtgcagaagctgctcctggactgtcaggatatagaaaatcaacttgcaattaaatccaaagcactagatgagttgaaacaaagttatctgactttggagagtggggcagtgccattgttagaagatacagcatcccgaattgatgagttatttcaaaagagaagcagtgttctcactcaggtcaatcagctcaaaacctccatgcagtcagttttacaggagtggaagatttatgatcaactctatgatgaagtgaatatgatgacaatccgattctggtactgcatggaacacagcaagcctgtggtgttatcattggagaccttgagatgccaggtggagaaccttcagtctctgcaagatgaagctgagagcagtgaagggagttgggagaaactccaggaggttatcggcaaactcaaaggtctctgcccctctgttgctgaaataatcgaagagaaatgccaaaatactcataaaaggtggactcaggtgaaccaagccattgcagaccagttgcagaaggcccagagtctgctccagctctggaaggcctatagcaatgctcatggtgaagctgccgcaaggctgaagcagcaggaagcaaagtttcaacagctcgcaaacatcagcatgtctggaaacaacctggcagagatcctgcccccagccctgcaggacataaaggagctgcagcatgatgtgcagaaaacaaaagaagcctttctccaaaattccagtgtcctggatcgactcccacaacccgcagagtccagcacccacatgctcctcccgggccccctgcactctctccagagggctgcttatttggaaaagatgctgcttgtgaaagcaaatgaatttgagtttgttctctcacagtttaaggattttggagtccggctggaatctttaaaaggtcttattatgcatgaagaagagaatttggatagacttcaccaacaggaaaaagaaaatcctgactcattcctgaatcatgtgctggcactgacagcccaatcacctgatattgaacatttgaatgaagtgagcctcaagctcccacttagtgacgtagctgtgaagacgttacaaaatatgaaccggcaatggattcgggccacggccatggcactggagcgctgcagtgagcttcagggaattggattgaatgaaaagtttctttattgctgtgaaaagtggatccaacttttggagaagatagaagaagcactcaaagtggatgtggctaacagccttcctgagctcctggagcagcagaaaacctataagatgttagaagctgaagtttctataaaccagacaattgctgattcctatgtcacccagtccttacaactcctggacacaacagaaatagagaacagaccagaatttattacagaattctcaaagctgacggatcggtggcagaatgctgtccagggtgttcggcagaggaagggtgacgttgatgggctggtgaggcagtggcaagatttcactacttctgtggagaacttgtttcgcttcctcactgacaccagccacctgctatctgcagtgaagggccaggagcgcttcagcctctaccaaaccagaagtctgatccatgagctgaagaataaagaaattcattttcaaaggaggcgaactacctgtgccctaaccttggaagctggagaaaagttactgctcacaactgacctgaaaactaaagagtctgtgggtaggagaatcagtcaacttcaggacagctggaaagacatggagccccagctggcagagatgattaagcagttccagagcactgtagagacctgggaccagtgtgaaaagaaaatcaaggagttgaaaagcaggctgcaagttttaaaggcacaaagtgaagatcctcttccagagcttcacgaggacctccataacgaaaaagagctgattaaggaactagaacagtctttggctagctggactcagaacttgaaagaacttcaaactatgaaggcggacttaacccggcacgttctcgtggaagatgtgatggttttgaaggagcaaatagagcatttgcacagacaatgggaggacctctgcttaagggtggccatacgtaaacaggagattgaagacagactcaatacatgggttgtattcaatgaaaaaaataaagagttgtgtgcctgcctggtgcagatggaaaacaaagttctacagacagcggacattagtattgaagaaatgattgaaaagttacagaaggactgcatggaagaaataaacttgtttagtgaaaacaagttacagttaaagcagatgggtgaccagttgatcaaggccagcaacaaatcaagagcagctgagatcgatgacaagctcaacaaaattaacgatcgttggcaacatctttttgatgtcatcggatcaagggtgaagaagctgaaggagacctttgcttttattcagcagttggacaaaaacatgagcaaccttcgcacctggttggctcgaattgagtctgagctttccaagcctgttgtttatgatgtctgcgatgatcaagagatccagaagaggctcgctgagcagcaggatctacagcgagatattgaacaacacagcgcaggggtggagtccgtgtttaacatctgtgacgtcctactgcacgactccgatgcctgtgcaaatgagaccgagtgtgactcgatccagcagaccaccaggagcctggacagacgctggaggaacatttgtgccatgtccatggagcggcgcatgaaaatcgaggagacgtggcgcctgtggcagaagtttttagacgactattctcgctttgaggactggctcaagtcagctgagaggacggcagcctgcccaaattcctcagaggtgttgtacacgagtgccaaagaggaactgaagaggtttgaggcctttcagcggcagattcatgagcggcttactcagctggagctcatcaacaagcagtaccggcggctggcccgggagaaccgcacagacacggccagcaggctgaagcagatggtccacgagggcaaccagcgctgggacaaccttcagaggcgggtcacagccgtcctgcggagactcaggcatttcaccaaccagagggaagaatttgagggcaccagggagagcattctggtgtggctcacagagatggacctgcagctgaccaacgtggagcacttctcagagagtgacgccgatgacaagatgcgccaactgaacggcttccaacaggaaattacattaaataccaacaagattgatcagctcattgtgtttggggagcagctgattcagaagagcgagcccctggatgctgtgctgattgaggatgagctggaggaactccaccgctactgccaggaggtgtttggaagggtctcccggttccaccggcggctcacctcctgcactccgggcttggaagatgaaaaggaggcctctgagaatgaaacagacatggaagaccccagagaaatccagactgattcttggcgtaaacggggagagagcgaggaaccgtcatctcctcagtccctgtgtcatctagtggccccagggcacgagcggtctggctgcgagacccctgtcagcgtggactccatccccctggagtgggaccacacaggcgacgtggggggctcctcctctcacgaagaggacgaggagggcccatactacagcgcactgtcaggtaaatccatttcggatggccactcgtggcatgttcccgacagccctttcctgtcccgagcatcactacaagcaaatggaaggtgacaggaatgttccacctgttccccctgcgtccagcaccccttataaaccaccctatggaaagctactattacctccaggcacggatggtggcaaagaaggcccgcgagtcctgaatggcaacccacagcaggaagacgggggactggccggtatcacagagcagcagtcaggtgccttcgacagatgggagatgattcaagcacaggagcttcacaataagctcaaaataaaacaaaatttgcaacagctgaactctgatatcagcgccatcactacttggctgaaaaaaactgaagcagagctggaaatgttaaagatggcaaagcctccctctgatatccaggaaatagaactgagagtgaagagactgcaggagttactgaaagcctttgacacttacaaggcattagtggtctctgtcaacgtgaacagcaaggaatttctgcaaaccgagagccccgaatccacagagctccaaagtagactccgccagctgagcctgctctgggaagcagcacagggcgcagtggacagctggagagggggcttacgacagtcgctcatgcagtgccaggacttccaccagttgagtcaaaatctgctgctgtggttagcgagtgccaagaaccggaggcagaaggctcatgtcaccgatccaaaggcagacccccgggctctcctagagtgtcggagggaactaatgcaactggaaaaggagctggtagaacgtcaacctcaagtggacatgttacaggagatttcaaacagccttctcattaagggacatggagaagactgtattgaagctgaagaaaaggtgcatgttattgagaagaaactcaaacagttacgggagcaagtgtcccaagatttaatggccttgcagggaacccagaacccagcctcacccctgcccagcttcgacgaggtagactcgggggaccagcctcctgcaacatccgtgccagctccccgagcaaagttcagagcagtgagaactacagaaggcgaggaggagacagagagcagggtccccggcagcacacggccacagcgctccttcctctcaagggtggtccgggcagccctacccctgcagctgctcctcctgctgctgctgctcctggcctgcctgctgccctcctccgaagaagactacagctgcactcaggccaacaactttgcccggtccttttaccccatgctgaggtacaccaatgggccaccccccacatagagggcatagctggccacagtgctacaccacctgcctgattgccaagggtgcccagcacgtggccccagaccaatctgagtgacttagtgttggcaaggtcccgggacctgtgcagacttcttctgggcttacccagcacgggctccctggagcccagggcagctttcagattgtgttcctccccaggagcagggaacctgtgtggcaggtgccccgggtattttggtagaactagttgattagtttagggatctctggaaatgtcagtttcctgaagagccaagcactttgtgaattctggtttgtttgtaaaacagcattattataatgtaggtatggtcaatgagcagtggtgtccatcacatatattatagaagcaagcgaggacattccaccctagaaatggttcagaaactcataggcacccttagctgatggaaacaatcaatcatatttaatacgcttagaatcagttttactccaatcagctggcaattttgagctgccggttatacaccaaaatgttctgttcagtacctagctctgctcttttatattgctttaaatttttaaagaaattgtattgcatggatgtggttatttgtgcatattttttaacaatgcccaatctgtatgaataatgtaaacttcgatttttttttaaaaaaattagattttagctggagcttttgactaatgtaaagtaaatgccaaactaccgacttgatagggatgtttttgtaagttaattttctaagactttttcacatccaaagtgatgctttgctttgggttttaactgtttggccacggcgggggtgggggcggggggttggtacagaaacttgaagctgtttgtgatatgtacaactcagatgtttctcattaaaaaacaaaattagccagaaaaaaaaaaaaaaaaaaaa

SEQ ID NO: 28270 - DNA, 3587 bp, Homo Sapiens
gggcagaccacaatgcaccgctcacggcgtcggttgcccgggcaatgggccgcacgctacgaggcccacacacccagaaggtggagccccggccgggttacgaggaccacccagctgtctggagagatgaagaaaatgaggttcaaagagatgaagtctcttgcctaaggtcagtgacagaaagtgacagagctgggatgtgaatcctggtctgactctacagtcccacatggtagatggaacctccgagcaacacctaaacaaagggagttgatgcctccgaacagagtaatgtcgctggagacactaagcatcgtcggcccctggcaggagctccctaaatatgtgttggatggatggaagaaaggatggatagttcagagtacttcagccttgattcctccgcaacagacacctgaaacttgaccctacattggttcttggccatcgtgatcttccttggacagaatcacctttcagctccggtcatcagactttcccagggccctcagaaagcccttcagagttgttactcacaggcaggctgagggattccttacggggtctgcagctctcctcacctcatccacaagtaggaccgtggcctgttcctcactactgccccaggatcactctgttcccagcccagtccagcaatcacttgtctagctttctggaaccttgagtactttcttgaaccatgagtcctgtgaccaccctagcagccctaaccctcccttatctgaaaggaagtgtgaggtgaccttgcaggtcccagagttgattgaagaccccatccagaaagaaggcaccctgtgggagagattgcaaggcctaggtctgaatccggaagcttccaccccatggagaagggctggcagtggagctgagctttggagccaaggactgtactgcagtgcagggagagtgaggccagaaaggctgagacaactcagggaaagaaaacctcccttctggctaatagtcaagcaccgcctgagtagaccaacactctcctgtccacaggggcagcagatgaagacacaaccagagaggactaacagcccccctcagctctcagtcagagggcagagcaacacagaatagacattaaaggaacagactttgaggccaggcagccttgggtgtgcatctgtccctactaagccatgtgacattaaacaagtgagtccacctctctgagcctcaggttcctcatctgtaaaatggggattataagagttcttgtttctcagggacaatgtgaggattaagtgagatgatacacatagagaatgtggtgcagtactgggcacatggcaaagatcagtgatgctagctaccacttatcattagtgttcctgtagaccaggacttctcaaccttggcactattcaccttttgggccagaaagttttttttgttgttgttgtggggagctgtcctatgcatttgaggatgtttaacagcacccctggcctctacccactagatgccaatcacaccacacccccagtttcaacaaccaaaaatgtctgcagatggtgccgaatgtcttctggagggtgaaatcactccccagcagttgaaaagcaccaccctaaacaatctggactgaatttgaatgtcacagatcccaagctcacagctccatgtaaaggccacaaggcaggcaggcctacttgcagatgaaggaacggaaagagcaacaattacagatcaagcggctagctccggtgtagactaagaggcgggatctgtagtctgctctaggagctaacaaggcctctgtgactcagtaggtgacctcagtgtcactctttaattatatgcaaagtggtcttgtgttaactcttaattattctagggctccaaacaagaaaataggtagttggtatctgatttctggcatcaagatcctgattcattgactgggagaaaatctgactctccaaaactctttcagagttcatttagcccttcatttatgactctggggagatttctgagcgagagctaggtgtcaggccctgttccaggtgctggagatgcacaagagaacaaaataggcaaagtttcctttttatggaacttatagcaggagaataaagataaaaacaagcaaaaatatttatctctgataagggcaatggataaaaataaagtagaataggccaggcacggtggcttacgcctgtaatcccaaggtgctgggattacctgcgtgagccaccgcaccctgcatcattttttcagcagacatttgttgagcacctgcttgatacaaggcacccatctaggcacaagggacatgaaaggaagcgagtcagacacagttcctatccttttggagtttagattttatgtgtggagacagacattgaacaggatgcacacaggatcacaggatgtgacaaatgcagtggaggagaaagataggctggtgtgagagctgttaatgggggctctgctctagcctgagaggcaaggaaggcttttccaggagtcacattagaggaacaatctatacaagcagggaactaggctgggggaagtgcagggagctttttaggtggaaagaacagcatgttcaaaggcctgaagctggaaggaggctggctgacttggctccagagaagctgttgggggagtgtgggagagacaagacagggagtaggggtggggagaagccagacctttggagtcttgtaagcctggttaagacacgtggactgtcttctgcggccaccagtggctctgttgaggtgggaaattaaagaaaagcaaaattaaaaagaaagagaaataagtttttctgtatgagggtgacttgtcccagaggcagcaataggcacaggccagacccaggaaaattcttcatgatattatctaatgtgctctggagattctcccagtactccctcaacatagggagaagaaaaacaaattttcctttgttttatggaatgagtttatagattcctattctctgtaaccagtgacttcaagtattgttttatctaagcagtggagtgaaggtcatgagcctctgagctggcctgagttacggccacctgggcgccatagtgaaggttatgggataagtctgtgcctgggcaaacctagataacggacatctgggttgcttggcaacggtcacgtgcaatcctgagtttgtcctgcctctatatccctgctttcatgccactgtaagcttgcttcaagctagcccacccccttttgtgaagtgtgtatagaagtcaagtgctgtctttcttccgggcccagtcttttggacgttgagtcagctgggcctgagtgcactcaataaatgattctcctgttttagattgagaccatcctgactagcacggtgaggccccgtctctactaaaaatacagaaacaaaattagccgggtgtggtggtgggcgcctgtggtcccagctactcgggaggctgaggcaggagaatggtgtgaacccagtaaatactgcacatgtgtggtgagccgagatcgcgccactgcactccagcctgggcaacagagcaagagtccgtctcaaaaaaaaaaaaaaaaaaaaaaaa

SEQ ID NO: 28271 - DNA, 4487 bp, Homo Sapiens
cattggtttgagagtcaagagagcattggtttgggagctttaatcctctttctgcttcacactaagtgtgtcatcttggctaaatcacttggtctttctgcattttgttttcttatttataggatgaggaaattagattaaatggttttgaggtcctttcttgttctgatatgtccagtactcactggaaaattggatctataactgatgggtttagtaatctgctcatttcttgctctgaaaattgtagtcagcaaaagagatcatggaagaaatcactgtaatggtagtaatagtaacacatgccatttgtattgtgccttaggtttaccaggtgtttccaaatacattagcatatttgatatgtgcaggactagataccttgggacctgccacactccactttcaagatatgtattagcttcattagaattaaagggacttgaactcaggacctgcagcctattctttatccacatgtctctggtagggctacatccagatcacaccatgacttcttatagagcaagagaaaataatattattatatcttcctttgcctaaaatctctccacttattcttttttatgattctgcaccagttcactgggttattctatgattccatatttttttttaaaaaaatcatatctaaaatgaacttacaatgtctgaattttcctggccttgagtcacagaagtaatatgtttcagatggctgcccaatatgtattatcatgtaatacatatctgtgtccttttctgggatgaggaaggcttcaacttctggcactgagaactttgtattacagacacaggtttagtttctagcttagtcatgcctttagagtttagtagcacaaatccatgcaacccaacagaatacatggtgagggcctagtatgtagaatttgaaagtagttcaaatttgaattagaagaatgaagctaggacttatttggaaaaggagatagaaaaaaaatgatcagaaactgtggggccttattacctttgcagtaagttatcttcttcatgatatatgtgaattattttatgtgcagattgtgttttgggattgtcagatctaaacttatattcttgctggctaatgtgctgatagccaggtctgaaacttgatgtgctatccagacacatatgatcagaaaagatctagagtgcaaagaggtgtctgaggagcaaaatgtggttttaatgttgtggaaagatcacttgcaagtatataagactgtataaagaagaggactgtgtgcaagtggggtgaaaaaaaaggatacgcgaatgtgcatatgactgaatagggaggaaggtcagggctagaaaggaggctacataaaaaggggcaatggagagtgcacaggaaagacacaggggaaggtcaagtcgagcaaggtagaaacaggagtagctagagccattgggaatccattttgaaacaagaaggagttttgaaagggaataggaaagtaagtgtcttgaagtaaaagataaatatggatggagaaagaagaaattctggatgatagagatgataaaaatatttattaagaaatgaagtcaggttcagtgtatgaaatggaaaggaatttttcagaattttaagaaaggggaagttcctcttggaaaagatatagcaaccattggggaatgaccttttcatttcagaagtggatgaggaaggtggtgtgagcatcaggtatattctggaccatttcaagtgctggtgagaagaaaggaactctttgcctgaactgggcttggttttccaagtgctgctttggaaatgaagacccagagatgcagagcttatggtagttcataaatcttcatgtcctattatctttcatctgccaataaagttcattttcaataatgtccaccattgctgtgcccagaataaccacaggcaaacatcaaaacaatacgcataagttagacaagattaaatcttgtctgatatctgcacaaacagatatgcaccatgttggaaacatgtgttttcctagtcccatccaggcttcccacaagaaagccatgatgtgggtctaaaccatatgttttgagtaaaggagaatagaagaaggggagtgtccgcaaaatggaaagagatgaagatgttccaaggaaatatgctgaaacagaacagtgaatgttttgcccaaaactacaaaaataaaagaaaaaaagaaaattgcaatacatggctactaagtctttgatcataagtcgaatttatagacctggaatttgccatcctagtctttcctttttagtaagacttctgtcctctggcagtgcatatggtaggtctctaatgtttctgcatctccaggaagatgcagatccttatttttgctgggaaatccttctaaatagaaatgtaacatttttataaaaacagattaatgtgtttttcacttagtaaatgttttcaagagctgaattgagaaggaaagagactggagtggttaatggtgatttgatttctggcattctgagttttctgctacaattagctgcattacttggtgccaaagagcagtggggaattgttgagttgctgtatcctttaaaaaaaaacaaaaaacttgttattttgaaagaacttaaggctcacaagatgttacaaaaatagtagagtggccttaccctagatccagttttccccatttataacatttcacttagtccattttcggaaccagaaaattaacattggcataatgctattaactaaactacagaccttttttcaatttcgccagtttttccacacatattcatttagttgctggatacttttaattcttgctgatttgtaaactggccttgcttggatacaacaggaaagatactatctggataaagttctacagttttagagagactattaacacattaatgtgttcctttgtcatgagcaataccctgcctacactgcttctaaattttctgatttgtttggctgtttggcatctgaaacaatccaagacaaacttagaaagattaggcaacacaaaacacagtaagacctgttcatagcttgttgcctagaaaaccaggtagcaggatattctagatgcttcctgctgcttctacgtgagtaggattagcactggggacaaaataaggagtttagagtaaaccagtatttcagtcaagagttagttggcacttagttaatggcactggaaatagcttgtggagagaatagaatacaatggtatagactcctaatgtttgataaaatactattttcagagtggtagagaggttttatttgcctaaatagccgttattaaatggaataacaaccacattagaccaaattaattgcaaacacagcggcaacctggggagaagttgaaactccagttttgtggattacagttttgagttttatgattgacatttttaagtcccctatttaaggggtcaagattataacaatgtgtgtcttactaagtttctaggtcattgtgagcacttgataaatatttgctgaatgttgtttttttgaatgaacataagatagaaacaaaaacttctcatccagttaactagagtgaatgtagggagaattgttttgcttgtaacatggagagtttattttcaagtgaggaaagagaaaaaaattactcagacttgttcctggtgaagtgcattctctgtttgtatactttttgatggagaaattgatctatagaactgcttaattttttgaggcatttagacagcaatgaaaggtagttctccacaggacaccgaatcaaaaggagagaccagactctggcctcatacccagcctatttgaaacaagctatctagtttctcctgcagacaccttgtcaacaacatgcaacagtgtcaggtgccttgcaggaaaataatctgagtcccaagctagcctgtgctcatccacaatctcaatgaacatgtcaaggaagaatttgcagagactcaagggaagcacaatgggataaggtaatcactttcagtgaaaaactgttttcctgaaaacaggcttggacacaattgaaagctggcttcctgcaaacacaccaagagtctgtaatctagcctatccattatatgtcctttattattcatgatatcctattcttctaccttgttgcctggtaactttttctgaggactgagtttctgcagcgatgcggtgcactcttcctgtgatgaggaaacatctgggcccccttctgcaggctttggaagatgatgtgtcttgtcaaggggtaaagggcaaatggatttaatttctgcttaaaactatcatagacgttccaaatagaatatgtaaaatttctctgtattagaaaaagaaacgtgataccaattgtatattttcttttctttatttattctctgtaagtctgtcagatgataaattgtaaataacaatgattaaagagtcatgctactgaaaaaaaaaaaaaaaaaaaaaaaaaaaa

SEQ ID NO: 28272 - DNA, 3023 bp, Homo Sapiens
agccatagggtaacagatggctcattacttattcagcagtcattgaatgtgtgctgtgtgccaggcatttaaagatgaatcaaagtccctgccctcaagaggttgatagcctaatcccagccagaaagccctcatataaaattttagcttttgtcatatgcaaatagaaaggatcgtgtgaaattcagtgaacttgttacatgattgttaagattcagtatttttataaggtggcttattcctttgtacttctccctaggtcccacattaaatgcatatagagcaaccaaccaaccaaataaacaaataccccatctggaaactattaccctgcaagctatcaataacatgctttgagacttgaacagtcatcgtgaggatattttcagctgagaagctgaaatcctgatggaaagctgagagctgtcctgcagctgattactgatttgtaaatttgttccaagatgggacatacatggaaaacacctagtttctgtttctagaatcatggttaatgttatggcattaaacttatactactaatagaatgtaagtctcacaagggcagagactttgtccttttcatcactttagcccagcatctagaacggtgcctggtacacagtaggttctcaaatatttgttatctaactgaatgaataggcaacttgtacagaaggtaggggcaaatgcttttcatttcaaaaaactgaaatttatcattatttcacagaaaatgtgctctcactggccagagtaagtcctgtaaacacagaattaaattaggggactcaagcaactattattatatttctcctttttgcagatacagggtaagtgacttaaccatgaattttaataaagcttgctttgatatgggacatttgaccattcatgacattttctccatttggcctagatcacttctgtatgtaacttttttacatacattcgatacattcagcagggactcgtgaaacagcaggatgttgatcagatgttttgggaggttatgcagttgagaaaagagatgtcattggcaaagctgggttatttcaaagaggaactctgatgctctgcgtgggaccatgcctgaactccccgaataactgaaaaatggctgaatatttttatggttacttgatatttatttccaaggagtgagcctaagacttttttccccttttgcaaattgctctaagaagtaccatgatttcttttaaactgatctatgctgtgtttgcttattctttagttgaacacactatgaagaattccaggtgtactagtgaatgtaatttatagttgccaaaaaaaaaaaacaaacctgaaataaataaatgttagattgaatgtgtgtacattttctcttctagctctgacatggcatttagggttagcagaatgtattaaatagtaattttcaaactacacagtagcttccttccttgtgagaggcaagaaagaagtctgagtggatagtactcactttccaaggcccccacctctagaatggctttatttttatctgttttctatattgggtttcaaaaaagattttatttgaagaaatacttctgctgctacaaagtttgaaagttactattttaattattctgctctctgtaactgaaagaatccctttattttggttattcattaaaatataatagaaggcagtcagattttatcccagagatgtattcctgagtgtcttgatatagtgtattcatgttttatatgtgttgaccactatattgtcattggagggacatagatgtaaatgagtttgacgtgtgtcaaaggggtttaaaggggtgtggattgaatgaatggtacgtgcgaagtatatgctgattatagaaccacttgatctctgcattccaaattgtaaaactgactcaactggagaaattataacaaagaggtttgtggtagaaatgtaataagtatagaaaagcaaaaagaaaagagaaactgctttagtttctgtttagagaaagctgctgttaatatttttggatagtagcctttcagctttcagatattttctacttacatatgcatatttttgaaacaaaaagtaggctttttttttgctttttaaacctaaacattaaatatattttcccttgggtaaacctacacatcctaatccctgtttatagaattttaacataatttaattgtgtttggagatgaggtggttttcagtttatttttcatattataatgctgtgacgagtatccttatctgtacacttctgaacattgtggagttctttcatgtggatgcctggagataaaattgtgtcgagatatatatgtatttttaaatgtttgatctgcattgctagattgccatccagaaaagttaatcaatttgtgttcacagcagcagtgtacaagagggctggttttctgaagataacatttttttcagtcctgttcagaggtttggtcaatcttacctgtagatgacttcagccaccaggctggatgggagcccacagacaaaaggacattggtgtatgttatggtgaaaaccatcagtaccatgcctagctcaagaatgtgaaattgaacctgaaaaaaactttgaacctacaattttatgttctgaaaatagttattctaatgtgagggcattaataagaatatgtaccatcaaagcatcagaagattttccatacaaactaaaatcacttttggagaaagtacctaaataaaaagagaaacaaatccaggagatactgtacggtttgaaagaaaggtaatcaaatactcagaaaaagtttgttgatgacttaaaaaggataaataaaaagtaagactaaagaaaatcagtatacccattaataataaatctttagtaatctataaggggaagaatgcttttcaaccttatacactagaagcatgctctttaaaattaatgcaacaggatgacgacttgatgtagaaactatatgtggaattatagattaaaatgtgattgaaacacaaaaaaaaaaaaaaaaaaa

SEQ ID NO: 28273 - DNA, 8275 bp, Homo Sapiens
tacattctttgagcctggtggagcacgtttgctgaggtgatgtggtctcctcagtgtcactgtgaagagctcagtcaggaaaagccagcagcatctaccctgccaccctccaaaccttctgactttggggagactccagtcccccaggtctttacccagcctgcagatctcattctagcttaacaagggcatgcgtgtgcatgaagttgaactaagagtggaggaaggccagaggtagggatgggtgtgatactaggtagcagatattacagacttctgaatgcattcagatttccaaagggtttcctgagacctctcaaccaatctttctaggacaatagctagtgtaggggtctcctgactcaataggggacccaggccttcagataccagccactcactggctgctctgtgacgtgctatcttaagaccgtgaatggaagacaagccctatgtaaacacaaatcttaaagccactgttggctactcgagggcctccttgtgctaatatcttttgttggatattatttcaaaatatgtgaattttagacccttttgtggttgcctttgctgccgcttgttaagggcaaaataaaaacgcaagaaattcttttagcatgaagaaatacatttaatgagctccagaactcaaaataaatggcttcagctccttgaacagtcatctgtatgccattgacaatattttattagataggcgtttaattagaggaagtctgtgggccagattcttccctgcatgtgtgattcatatttggaaatttctgatttatctccccccaattgtgccatgtggcctgcacttaaaatgtaagtaattctgattttattctcaagaacttatttgaagattcaagccaagcaatgctgaaaaaagctaggcctgcaaaactaaaacatagcacgagcctctcaaaatttccaccaaatatacaaaatccagtctgctctgaatgcgcatcagaaactcaactttggttattagccctggaatttggtgccaaaaacaaaaatttggttttgttgtcaagcaatttctaaaggaagaaacaatgtaaatattaatctgtcattttaaatgttgttgaaactgccatgagtgtgcacacagctctctgtttcatacctgtaatcagtattcgcatgctctcagtccactgtttctacttaaagcattattccgtatttcagcacagaatgactttggtgaaactgtagctgttagtgagtaattgcgttacaggcagacccagtcttaaattaacaaatctgggttcccttaactatcaggtttatgttggttttatttgcttctatctggatcccttccctttgcctgggaccttattctgattagctagatttttaagagcttttaaagttacattccccagaaagacattttttctctggactttctcttttatggtctgtaaacatttctcctctgatggtcatggacttagttctaagactggccttcctctagtgtgatggtatgagtctattctattgctgctaaattttacaaattgaactgcagaagagtctttctaggtaatccctgtaacagagcaagtttctttgaaccctagccatgtatgtgtagtgttccattattggaacgctaagcatgtgggagttatttatatcttactgctcacggtcatcatcaaggtctgattacaaaaattcaaaaaattacaaccttaggcataaatttaaagaggtggccatttaaaaataatccgttgctaccatttccacttaaaatggtagctctctgatgagttttatattggctctctgttagccaagcccgtaagagcatatggagagaaaggtacgattgaatgaacttctgtgagcggcataaagacatttactctgacaacattaaagaatttactggtactgttttttttccttgttagtttaattccatctgtttctgtttaattgagtgaaacttaataaaaatggtgtctctagtgagcacatgtacacacctctcccagttgttgggatttaaaatgaagctgtgacttttaggccaaaattagcgtgacacttaatataacagttttctttctattaaaaaataatgacaaaacacacacacacacacacacacagacacacacacacacacacacacacacacacacacacacacacaatctgtatgatgatttggcctggagttgtagacatcacagatcaaaagtggcctggtgctagctgtttgggtatatccttgaaaagggcaactttgtcatttcctagagtaacctagagagagatttccaagcatttccccatgaacagaagtggtaaatgctgatttattgtgccatatgtgtgtttgggaggaggggagatagcgtcttgttttgaaaaaagttctcacttcataaaataaactgcacaccactccaaaaaaaaaaaaaagatgaaacctcaagcaggaggaacttttttatttaacccctagtgaaagcaattaaacgtcttggtagatgctagggaagaattagaaaatcttcttttcctgaaagctttaaacattgaatagactctgatttattcaggatcatttcggtgtagattggccactcgacacagacatcacagcatggtagcctcgaaaccaagccttcagcatcttctcggcgcccggtgttggagtgttacttggagtggaggcagtgcatttgcatcttcatgtagtctccagatcaggttactctgatttgtcttggagtggctttctgtttgaaagtagggaagattaaaaatcaacttgccacgggatatctgatctccatgagtagttgaaagccagtctaaaaggttaactctacagggccggcgccgccagtgcggtcatggaaaatcgtgctgtgagatactggagtgtgctgctggggccaggtgcagcaattgcagaatgttgaggagtgaggagtagttagaaatcactgcaacatggaaaagcacacagaccaaggacgctaaggagggagcgaggactaccgggcaggtgtgcgtgtgtggagtaaaatgcatcggacagtgattgactccacttttgagtgagatgtggaggcggtagtggtgtgggggttgtgagggagtgagtctgctttattatgaatcaggattgatagctggccttaaagtgggaaatgatagaagggtcacttaggagcctgcagtggcatggtgaccagtctgttattactcatagatgaccttttctggctcttgaaaccaagctaacgactcctttttcttctgggcctcaaagtttctttgtaggaagtaaagcatttgtcactttccctgcagtgatttattgaaagactgaagataggtcttccttagttaaggacgcacactggctgctcgctccagaagcaccaagaatggctgatggataaatcccttacccatactcctgtttctgcctcctaaggttgctgtgaaaacctaactaaccaaacctcaccagcttggcctatattattaatcaaattcccttctgttctctctgtgtgtatatttaatactgtagataatatgttttatttaaaatttctaatacaccaaattaatttgaaatagaaaaggctggggacttcattctcatttttgtcatttgtttaatcagtttgggaaaacattttccgttgttccattgtatgcagtgtcttgtcagcatgtacctatctaggagaaaacgctttgttttcagcgttctgtctttaccctcaaagcatggtgtagcttctgttcttacactgttggagcactgtctggtgtctttttttttttttttttaacactgctgaataccaatttgtacttggaatacctctttcctctagaatacagtgatcctattccccaaagtgcaagctttcatgtggaagcatcctaagtgatcgtcctgggtgatgccatatttcactaaagtgggaaaagaagaggtgaactttgctcttccaacaaggcttgcactttatactttgggcagtgcatgggagaaggggggcccttagaggtgagcaggatcactgtagctagaggagaggtctcactgaaacagaacgcatctgtgactgtagcttgcatggagagcctagacagccaaccatggatttgcctttatgttttgaatggaaacatctatttcaattgggatagaaacctttacctatgtcatatctgtaagagaatttagcttatagatatgtagatacgtgtgtgtgttgctgggtggggaagtgggtgggaatgtagaaaaggcctcacctgacttggtcccagttggcttctgatggccaaggagctgtttttcattttggtgggcacccaacatgtaggttctcacagatgctgtctggtttcttcttctctccatggcggaacaatgaagtacgtcaataaagcatggactcataccactgggaagaatgctggcttctccagtaacaatgagcttggtggttctttgagcatggaaggccaagctcatgtcacagtgtatgcacggtattaatatatctcttgttgatctaaactgaaggggcttttacttgtcctaacaggtatcatgctgtaaaaactgtccattgtaactgttctttcccactgatggctgaagctttgtcctgagtacaagatggtatttttcattggtacgaagcaccatgttcccaacccaaacactgcctccaccaccaccaccaccaccatcaccaccaccactgctactaccaacatcaccaccaccatcaccaccaccgtgttcaaacaaagcagcattctcctgtgtcttttcctcataagtaagaacaaggtagcacattcatttttccattagtgcatttcaattcttttcctgcaagttgcattgctattgcttttctgaattgcttgatgatgaactgtgaagctgatgcttagctgcttgtgaaacttttcttaaaggaactgggtctaagaagcacacatacattaccctcaacaacctcaggtatcaagaagaggaccacactgctaacatgggtaatcctataacctggcttttcttgtggaactttgtaatttctataaaataccgccagctttgcgtattccactgagccccaacttagatatcagacgctagtgagtcctgcctattcaggaagctacgtattattcagcataatactgcccttttttttgataactggctttcaaatgggataatctcaagagaggtttcgttgtatcctcttagagcgtatggatttaaatagagcctttcaaaaaaatagatgaaaacctacatctctaatatatttcctacttgggccttttgagcatattctgggcacatagagagaaaatctcctatgttttagaacagaataaaagaagacaaattatggtagataagtggcacccagaagattgcaaaataaataattttatgtgggggaatattgaagaaaaagcatagaaacttttttataattgcactttaaaattttggaaaagaaaaattgagaatgcaatcagtagtctcatttttgtcagtattctgtcagatattagctattcaataagcatatcttggattactatttttttagttgtcagtttttctagtttccccctttataggaaaaaataatacctatgtggttaaaaactgagacccatttaaaaaacaggacaggcacagttaagtactagaaatgccgtttttatcacttgaaaaatagattagaaatgtttttcttttcccagaattgtgtgagtttgtttcgaagccttgaataccggtacatggttaacaggcagcttgtgcccaatcccaaagcgggaagaaaggcctggctttggctcactgatgataaagtctcctcccactgcctttcagcagctctgccgaagagctgatcaagatgctgcaaacccagcttccccagaccggccaagagggaagaatgatgagcgtgttttaaattacaaagagagagcagcgcaggcagtttctggtctgggtgataaattgaaatccataaatatagcagtgctaatttgaagttccgtaattgtttgtgccatgagaatgtgtacatttgaaaggattttataaagcaattactagaaatgcctcccttgagagctgtatgactggaggtgttttcagtctgaggggggcagcataaacccaaacctcttctagatgaatggcagggtggcgggaggggtcacgaaatcatggggaagaggtgaaggatttgagagctactaacctgacatctaactgaatgcctaagaaattgcagggcaatttcaggaaataggaaaaataattttgaaaacattcaaagcctccagactttcggtgtgtgactgatcttttttctaatctctttaaacttctttccacctattgccttaataacaggtgcttcctcttagggtccccccaaattatttacctcgagttccctaatgaaattactttgcattaatttgtcataaagggagaagtgctagaaataccgaggcattgataatttcatggagtagcaatgaatgtcagtcacagtttcctctccccgttgcccggggctgtgccttcaaagcaggtgacagactgcaaggtgtaaacaagctttataatgccatataaatcaaaccgggctcattttacctaacaacagaaccatgtttgtttgcttttttgtaaaatggactacttcagtgaaaaattgattccacgtagttctaataactctgtgaccttggacattggctttttatagacacagctcttcccacctgctggtatggacaccagtttgtacagactgttgtcacacaccctggctcaaagtcaaaagagaattttaattactcatcaagctgccaaattctactaattgcccccttgtcagcatatttcattaattgctgaaaggtaaatgagttacatattttgtttggaccacgtcacctgtacattttcaaagcctcggattgtttatcttgcaaggagagaaggggcctcttctccacagatgcagctcaaattagcaaaactgaactgtagagtttcaggcctttcccttccttaaaatgctgatagatttctagaccagactttgatatttattggcttcttggtcttgctgtttaaacacacccattgccctttctttcttaggccctgtaagcaaagctggagtagcgtcttgggaaaaggccaactgaccaccctaattttgtcgttccaagtctgcagagcgcacatattaagtagttgttactgacatctttaggctccgtgagtgaaatgcagcaagcctgcccccagcagcctgtgggctaatcctgagctgttccttcgtttaggtacacaggtgaccctgaagttcccactcggccctctgttttctgagtcctgtctcctctgtagcacagtggggattgttctgaaccgtggcacgccttcttggcgaggcaggctctcttatggaaccatagtctgttacctcatttcttccaactgctctgtcccctaaatgtgtgttcccaggtgcagtgcagcaagggtgctcgctgttggcctttgagagtggaggtggctgtatcggagtgtgctccccctactttttcccttgccccgagtggcagttcttttcctctctgttgccggatgctgtctagggcctgttagttgctatttccttgcctccgctccccttcccactagccttctaactaccttttattctcggctccaactctttcaatgatgaggtgaatgctttttctgttccacgtcactgcaaagtcaaggtgtccagcatgctctcacttataactgcctcacccgatctcacgcacagtgcgagagctgaaggtaagccccggatgttgccagattacggtggacaaataaaaaacaactctccaacagcaactcacaaatgcatgaaatgttttaacctctagacagactgccagaatttctctcttctaattcctacttgtagtgataacatttttctttttgtgatttttttttttaaataatagtgtagtaccttgaaacaactgcagttctaactcattgtcaccatttctgtttgacacgttccacttcctttgcaattattgtatttagttgtgcactagtgtcaataaaattgacatttgtgaagcaaaaaaaaaaaaaaaaaaaaaaaaa

SEQ ID NO: 28274 - DNA, 8359 bp, Homo Sapiens
tagtaacgtacataacatctccccctaattccacatgcgtgtcatttgtgcatttcttccttgcgattttccctggttcttgttctttgccaagaggattaattatgtagaacatcttggactcaggatatttattagtcgtctcatcagctgatgtgctgagaaaccttcataagccctcaaattgatcacatgtagtaaattgttactataatcataaattgttacattcatcattgcctttctgttccttactatttcattgcttagaatgattttttctttcttccattttatcccttctttttttttttaagtttatcgatttattggcgtacaatacagatgttttgagctatgcaagttaaaattcttctgtaaactttttaagtgctgtgaaaaagacacacatgatcagtaaatttggaattttggaatttggcagaaataaagtagttccgaacagggtgcagaagggaattagaaagaggcagatttcgagttcagacagataagactaggtcttaagatcagtagaagtttctaattatactgttcttaatctttcaagagttagtgttattcctctgacgtgggtatacagtattttattagattgtatattgaaattgtctgtcagatttgtacttacagaactccttagatttacacttgacagtacaattttatgcccttcaatacacattgttttacaattccagttgctctttaatattgttgtaagggctatataattcaccttttgaatagctgctcttatttagttgtgatcttatattaaacagaggctgtggagtaatgtgacagtggcagagagctaaaacttgagccaaactgcctgtttgtaccccacctccaccaattattggctgagtaactttgagcaagttaatttttacctccctgtctgcatcggtaagaaaacatatttacctcaaaaaaaaaaaagcaagaaaaaagaaaaactttaagattgctgtgaaaataataggtgagtcaacttatttattaaaagttattaaaagtgtttggcacgcagcccctcccttctattctactccttacccaggatgaaggatttagattggattgttattttattttttgttaactactctttgatatgctgaagaaagattaacaaccctctattcagtaaactattaggttgggagttatgtagagtatagctgtttactttctattatttgaggattgattattaaaatctactgggcatactgcaaaattaagtgacatttatttttctgtccttgaaattttctacatggctgtataaaatgtttgtgagagatcttagagtactactttcatgcagcctaacacacttatgaaaatatactagcctagaaagtacctcagttttatcattccagataatcagaaactataatacatcacttgtgataaaaagatcaaatgtaatgaaaagttcagagtttaacttacaaaaaagatcctgttgtagaatttttaggcaaaaggtctgtaataccaactgagtttctgtcatttgttgcttgatgttttatgtttagaaagatggttaatagattcagtgatctttaattacactttgcacattggggagaaatgtttgatacaaacaaataagttcagggttaaaaaaaaaaagtagctaatttgctttttctttgtaattcagtataatttcagattctcgtgtcccatcgaagtttctagcaagaggactgttgtcacatttccttcttggactcattactggtcactgaaaaccagaagtgagctacatgtactcatacagtaactacatatagattaacaatgtgctgctgcatagtagaagttgatttacaatcctggtatcaagaaattttagagtttaaaaggatctagtagggtttgtttggaagcctttttcataaattcagtcttaacatgaaagcagagtggtggtcctacagctgactgatctcacccaacaccctcgtttttcagataaactgaggtccagtgaggttttgtgacttaatccaggatcgtcaatcaagatagtaaaaccagatttagaccaggtcttctgattcccaactgaatactctttctgtctcacaatagataaaaaataagttgctttgaaatactttaatcctgacttctttattattgaattatgcaacgtaaagacttaacatgacttgtccttgctaaagagaatcatcccattcagtattctgcttaatgtccagttgagttttgagacatttaaatggctaattcttagaacttttataaccctccattagttatttttgttgcacccatctgtcttcctggcaagcaataaaaccttgacatatcatgggcttatgtgcttaatttcaggacagggaagaaaagagaaaatttgggactatatagccagactatacaggtctaatttctgactctgaatattctgaagagaaagaactcaggaagccagtcctaaatcagaaaactacccctcaaaggcttaatggagggttttgcagtttagcaaacccattgctaaggaaagaatacaatagaagggagttggagctattacagaagggcactgctgttgtctagatactcttgtatagtgttatttgtgtagcacgtattgttactaatgattaaggtcccctccagctttcagatcttattgttaaactactatttgcatttttcacaaatattttatactgcttgaaccaagcctttttcttttttgctcagttcatggttgacagatcaactaagctaatttttattggatgtagtaatttttaaaagttcctctgtatcacaaattctgtaagattggtgcctgtgacatacttactcttgatttttttctcaaaaaggttaaatattggctaaaataacttagaaatgtcaaactctatcttattatagtatttgagtgtcggtgtattctaaagtaaaaaacagtatttattaaagaattttataagagtattctaaccaaacttccaatttaaataattttgtattttaagttacagcacccagtgtattggtgttgggtgcaaagaaaggaaaggcagtccagcctaaatttattggctcttagcttcctcattgtaagacagttgtgttcattcattgaactaagaagttctctccatttgtttgaagattgataggttggtttctctttattagtgggtgctactattcccaaaaggccttcactttgttagaagtcttctaggaaaattataaaaatattctgtttacatcaaaagagaacaaagagggggtggtactgtagtccaatgtataaacaaaaagaaggtaaaacttttataccttcttatgctgcatcaggagaacagtgaaagtgaagactgcatgcacgttggatgtggtggcttgtgcttgtaatcccaactatctgttcatgttctcatggtacttttttttttttttttttaagagacaaggtctcactgtggtgcccaggctggagtgcagtgatggcatcatagctcactggagactcaaactcctggtctcaagtgatcctctggccacaacctcccaactagctgggactgcaggtgtgtgcaccacctcacctagctaattttttttaattttttgtagagatggagtatcagaaagttacctaggctggtcttgaactcctggtctcatgcgatccacctcggcctcccaaagtggtggggattacagggatgagccactgagccctgcctctcatggtactcttctacagcaatctatctttctggcttcaacgccaaagcaatggcacaaattatattgttgcattgaaggcagtctacaatatggataagttattataagttaataaattgcaatactttaagaaagtatcagtaaacaagttaattctgtgtctagttgggagagattatccaagtccgtgttttctggtctcttcctttcattgcctcttgatagtgcctttacaaaggacagggtgcagttttagaagagtttggtgaacttgaaattaattgttagaatgagatttttaaattttgtgcatacatatcaggttccctattgcgtaatatgtaatcagcttctcaattttttatgtaccctaatatttaatcaggttttacatgtgatgcctctatcagcagtcagtagattagtatatttatgtctgtattcaggaatggtataactgagtgttagtatgagtatatttgtaccatgcctaaatttgatatggtcattctctacaattactttccttccacatttcctttctgttgataaagttggaaatctgacatctttacctagccattttatttatcctttatcattgagttctatgtgttctacatttgaaatgtttcagatatctaaatttctttcccatttatagtccagtatcacactacaatttacttgaatattacagtagtcttccatccatttccctgccttatgcatttttttccagttcatcctacacacagccaccaaaatcatgtctaaatcatttttctagttatgtcctattaagaaactactagtggtctttctgctgcttacagggtaaagtagaaatttccttgcctaccttgatgactattctgcttttacacacttaatctcccagtacttcctagcttgtctctactagagccaaattttgtgtcattctcagccacaatatttatggcttttcagtcagtttacccaaaacttgttcatctttcaaactttatcttcctcttccagtgttcccatccacattgataatctcactcctaatttgggtgctttcactttgttgccaaggctggagtgcagtggcatgatcttggttcactgcagcctcaacctaccagggctcaggtggtcttcctacctcagcctcctgagtagctggaactacacatgtgtagcacctttttctatctttttttttttttttttttttatgtagagagggagtttcaccatgttgcccaggctggtctcaagcctggtttcctgggctcaagcagtctgcctgcctcagccacccaaagtactgggattacaggcatgagccacccaacccatcctactctgtgtatttcaaaaatattttttctgcccctctttttgggaaataataattactgcttctaacagttatgtaacagagtgtacatatcatgccttacaaatctttgctgttaactgtagcatccaaagatggtagggtgagtactctgtaagtctggaagaacaggtcacatttattcagacttctcccccacaatttttaatcaagcacctcccagtaacaagttatttaattagatcgattttaagttgacaacagatgtatcagatgaggaaaaaattgagcatgtgtggtgtgattatataatagaattggtttctataaaccatttatagtattcaacttttatagtattactttttcagatgtatggatatatagactattatttactaattgaggctctgcgaagtgtagtgtattttacaaacataattaaatactatcatttaatatgcctgatactaacatatattaatatattttagcatggtttcaaaaattttaattaggaatttttgccttttattatatcagaaagtatattttgcagtcaggcctcaaataaatcattatgaatcttgtagttgttcctgaacttggagtgttaaattttgaatttgccattttttaaggttccagttttttgctgggcgtggtggcttacgcctgtaatcccaagactttgggagactgaggcatgcagattatctgaggtcaggaattcgagaccagcctggctaacatggtaaaatcccatccctacaaaaaatacaaaaaattagccggacatggtggtgggcacctgtaatcccagctactcgggaggctgaggcatgagaatcgctggaactcaggaggtgggggttgcagtgagatgagatagcaccattgcactccagcctgggagacagagcaagactgcgtctcaaaaaaaaaaaaaaaatctactttttgtgatacgtattttcatatataaaagttttaatttcataaatacttggtttttatagtagccttcttttgggttgagtgatttgggctcttaatttttattgccacaaatagcccacagctggtagttgcagactgtaggaattgtacactggtatgatcttacacaggtaattgggctactggaagtagaggacttgcgaaatacaaaggaagaaatgagagatgtacctgccaggagactcagtaaccaaaacaaaaacttccacttcatctaacaaattattcctttttgggataaagttaaagctgaaacgtaggtttgttggttgttctttattttcctcaaacataacttaattcagacttctcttaactttggaaaaacccaacatagataagttggatagattcttttttctattttgcatcattagattttttttgcttgaaacagctgtctttagcattaattcttagcatcttagattcttgccagattattttttactattatttgtcattttattctttaatgaagcagcccttcctgaaatcattcacatttagattatatgttgctggaaatactgaatgttctgtgtattgtgcttaagcatgcaattatagacagtaattaagtacagtgcatttgtttcaatagcttacagcaataagacagcttttgaaagtttatacataagatgtatacaaagatagactgccttcattttcttcagtacgtgagtagggaaaataaattcacaggaggaattgtcaaagaagttcagaatgaaagggaataaagggaagatggggaatgagaaacaatgaagaaaataatagaaaatttgggaaaagatatagaagaaagaaagcagagaaggattaaaacggcctttccaaaacgactctttgtcagtgcacttccattaatcacctcttcaaatgagatagtaataactctttttgcatttttcatttttgcctcacccttactggagaagagaagatgagaaagacagtcccaggagtgtctggtatctgcagccacagggggaaaggaaagagaatacaaattgtcattgtgtcagtagttcttatggctaccacattgggggcagctgtcattgattaatttgagaactccttctgcgatctgttgtccattgttcaggatacatatctttggctgttattttaacatttatttatgacacttgtttctacttactttgacatttggatactcactattagcaacatcttatctttttaattactgttttgtggcttataaaaagagactataggccggtgacgatggctcacgcctgtaatcccagcactttgggaggcctaggctggcggatcgcttgaggtcaggagttcaagaccaccctagccaacgtggcgaaaccctgtctctactaaaaatacaaaaattagctgggcatggtggcaggcacctgtaataccagctacttgggaggctgaggcaggagagtcacttgaactcaggaggcagaggttgcagtgagccgagatcgcaccactgcactctagcctaggcaacagagtgagactccatctcaaaaaaaaaaaaaaaaaagaccgtataagaatgaaagtgaactggtacaaagtagttaccattgtggaaaaaacaactcaaatgcctcatagttgaagccaagaagcagacaggctttgcctctatcaacttatatttgaaaaacgtagtttctttaaatctccatttttgtcttttgaatactttattaggtcgctccagagaaagcttgaaagcaaggcctgtactccacttgaaaagattcataaaatagatttgtaaattattattcagcgcatgaatttctcaagtatatgattatactaaattaatattcatatgttgcaggaagttggtgaaccatctaaagaagagaaggctgtggccaagtatcttcgattcaactgtccaacaaagtccaccaatatgatgggtcaccgggttgattattttattggtaggattatatcagtaaaatcgtattagtgtacatatgttatgaagttaacctacatttgggatatgtagaagttttaaaagtgctttccaaatgtgattgttctggtgatggacatatggcagttgattattctgttcttttcttttatgattgaaaatgtctataataaaaagataacatgttttctaataaaaaaaaaaagaaaaaaaaaaaaaaa

SEQ ID NO: 28275 - DNA, 6407 bp, Homo Sapiens
agtgcgaacctgggaaatccaggcgacttcgcagttgccgaagggatctgaagaagtgggatgtgcaaaagcgccggctggaaatcccggctgtgtctccgtcaactctttacgcaacagaggtctccccctgcccttggtttctaccgggccgcctgctcccactcggcgaaaaaaattacacaacagcagccgcggcgatgacgtggagggctgccgcctccacgtgcgcggcgctcctgattctgctgtgggcgctgacgaccgaaggtgatctgaaagtagagatgatggcaggggggactcaggtcacacccctgaatgacaatgtcaccatattctgcaatatcttttattcccaacccctcaacatcacgtctatgggtatcacctggttttggaagagtctgacgtttgacaaagaagtcaaagtctttgaattttttggagatcaccaagaggcattccgacctggagccattgtgtctccatggaggctgaagagtggggacgcctcactgcggctgcctggaatccagctggaggaagcaggagagtaccgatgtgaggtggtggtcacccctctgaaggcacagggaacagtccagcttgaagttgtggcttccccagccagcagattgttgctggatcaagtgggcatgaaagagaatgaagacaaatatatgtgtgagtcaagtgggttctacccagaggctattaatataacatgggagaagcagacccagaagtttccccatcccatagagatttctgaggatgtcatcactggtcccaccatcaagaatatggatggcacatttaatgtcactaactgcttgaagctgaactcctctcaggaagaccctgggactgtctaccagtgtgtggtacggcatgcgtccttgcatacccccttgaggagcaactttaccctgactgctgctcggcacagtctttctgaaactgagaagacagataatttttccattcattggtggcctatttcattcattggtgttggactggttttattaattgttttgattccttggaaaaagatatgtaacaaatcatcttcagcctatactcctctcaagtgcattctgaaacactggaactcctttgacactcagactctgaagaaagagcacctcatattcttttgcactcgggcatggccgtcttaccagctgcaggatggggaggcttggcctcctgagggaagtgttaatattaatactattcaacaactagatgttttctgcagacaggagggcaaatggtccgaggttccttatgtgcaagccttctttgccttgcgagacaacccagatctttgtcagtgttgtagaattgaccctgctctcctaacagttacatcaggcaagtccatagatgataattccacaaagtctgagaaacaaacccctagggaacactcggatgcagttccggatgccccaatccttcctgtctcccctatctgggaacctcctccagccacaacatcaacaactccagttctatcctcccaacccccaactttactgttacccctacagtaaatgcctgatggacgtggtgccactagggtccaagttcccttttcattacaggaccttgggcaaataagaggggacctgggcaagttctctgatgacctgatagatatatagaggctttccaaaacctaactcaggtgtttgaccttacttggggtgatgttatgttgctcttaaactcttaactactacagagaaacaggtagccctgcaggcagcagaaaaattcagagatgaacaacatgtcttctatagccactcaataaggaaagaaggtgagaaacaaccagcattcacatacccaataggaagcgaggcagtgccccttgaacaacataattcggaccccagtggtaccttagatgagtggcaaagaaaacattttcaaatgtgcttattagagggcctacagaggaccagagccaagcctcttaattaccccaaactctccatgatagatcaaaaactagatgaaaatccctcagcctttttggaaaggctgagagaggctgtagtgaaacacacttccttgtctcctgtgaggtatgtttatacctcacataaataattcagttgagggacagctaattttgaaagacaagtttattactcagacagcccctgatatcagaaggaagctagagaaacaggccatgggattagatagcaccttacaaaacctcctgaaggtagccacctcggtcttttataatagggaccaggaggaggcccaggggaaggagaggaaacacaagaaaaaggcagagactctggtggccactttgtataaaacccagtatccccaaggtacacctgctagttgctaccaatgtggcaaactagggcacttcaaaagggactgcccaggcagcaagaagaagccacctcaaccctgtccagtatacaatggggaccactggaaggcagactgtcctgggaagcataggtcactgagtccagagccagtctcacaaatggtccagcaggactgatgggtcctggggctcaactccctggctccagtggctcagactgctgttactacccgggagcaccaggtgattctggagttcgaagggaggaaggtagacttctttctggacactggagccaggcttctgttttcctctccaattcaggccttcgttcctcccatagcacaaccatgatgggcatctcaggaaagactttaacttgatatttttctcaacctattagttgcagtcagagggacctactgtttacacaggcctttttagtcatgcctgaaagtcccactcctttattagatagagatattccagcacgtatgggggccaccatccttatggctccaggacaaactccgcctccccttagtggaaaccagtattaacccagaggtttgggcaactcagggaagaagtggccggactataaccactataccagtctggatccacctcaaggatcccactttttttcctaaccagagacaataccccctgaagccagaaagtagaaaagggctagacgccagcattgataacctaaaggcacaaggcctccttaggccttgcagtagccctttgaaacaccccaatattaggggtgcaaaaatccaatggggaagggagactagttcaggacctctgccttattcatgaggctgtgattacgattcatccagtagatcccagtccctatactttgctaactcaaatacccaagggaactaaatggttcacagttctgggcctaaaggatgcctttttctgtatacctttataccctgactcccaatacttgtttacctttgaagacccctccaatcaaaccacccagttaacctggactgtactgcctcagggatttagagatagcccccacctatttgggcaagtattgtcaagagatctcttcgaattcttccattctcaggttaaagttttacaatatgtagatgacattctcctctgtgccccaactgaggaagtttcttgagacggcactgaggctctccttaatttcctagctggaaagggatataaggcttcaaaatctaaggctcagctctatcagactttggtaaagtacctaggtctggtcttgtcagaagggaacaagagcactaggcgaggagaggattaatcccatttcctcccttcctctccccagaaccctcaagcagctgagggatgcttgggcattacaggtttttgtaggttatagatacccaggtatgataaaataggttgccctttatatcaccttataaaagaaattcaagtggctaaaactcacttcctgacctgggaacctgaaggtcaaaaggccattaatcagttaaaacaagccttgcttaaagcaccagcccccagtctttctgtagggaagtcctttaatctttatgtatcataaaggaaaggaatgaccctgggagttttaattcaagttcaaggcccagctcaacagccagtagattacttaagtagagagcttgacttggaggctaaaggatggccagcttgcctctgagcagttacagtagtggccctgctagtcccagaggccaccaagttaaccctggggaataacctgtttatgcctcacataaataatgtggcaggcttgctgtcctctaaagcgagtctctggctaacagacagctgcctcctcaagtatcagactttgctgctagaggaatctgcagtccagttaaaaacctgaccttgcctgatcccagacactttcctcccagaggaaactggagaaactgaacataattgtgaacagactgtagtacaacctatgccgctagggaggatctcaaagaaattcccctagaaaatccagactggacccactttatggatgggagctcttttgtaggacagggagtctgaaaagtgggatatgcagtagtcaccctaaataacattgaaaatgtgcctctctcaccaggcacacacactcaatcagttgagctgatccctctcacaagagcacttgaactaagcaaaggaaagacagctaacatttatactgactccaagtgtacctttctagttctccttgcccatgctgccatctgaaaggaaaggcacttcctcaccgctaatgggtcttgcattaaataccatcaagacatcaacaggctattatcctcagtgttcctcccatgagaattagtggtcagacattgcagagggcatcagaagcgggtagatgaaatagccaaaggaaacaggctagcagaccaaagagctaagtcagcagtaagaaggccccaaggtcccaaaacacttgaggcccctctgatttgggagggctacataagggaaataaagcctcagtattcccctacagagatagaatgggccacctctcgaggtatacttttcaaccctcaggatggttacaatcagaagattgcaaagtacgcttgccagcctccagccaatggaagattcttaaaatcctccactgagcctttcacttaggaaagcataagacatcagtgcatccaaagattgttctcaggagaaaatctactaaaaatggtcaaataggttgttaatactcgtgaaaccctcttaaaaataatccctttaacagatgacttcttccccacaatcaaaggatgggaagttactcaggggaggactggcagatagacttcacccatatgcccaaaataaatggcattcaatgtcttttggtgtgggtgcataccttcattaactgggtagaggcattcccatgcccaacagaaaaggcctctgaggtggtgagaatactaattagttaaataattcctcactttgggctccctaagtacttccaaaacaacaatggtccctcatttaaagaagcctctacccagtagggccgagtctgctaggactttttattgggtttggtaatacgtcacaccctttagcctctactgtgtcagccatgtcccatttatacaagacaaattgctgggtctgtcctgagcggtttgctcagttcagtaacactaaggaacctcttgatgacttggtatttactgtcttagcattccctttgttagctttacctttagccattaaagacttgtcaggcataaatggaacatggtatgggaacactttcaactgagtaactaactcctcccaggaaagcatttcctccctggtgccagaaaacactttccccaaagataagcctcacaccctcaggctaggaaaagttggccgggtaatagcaaatgcctcctcctgttttaaaagcagaggaaaaggaccatacctgggagatctcaaatattataacaccatacttgtaattgctgaaagctcggaagtttggagaaaaagacataagaaggatgatctaagaaaattggaagccatatggaggggaggctttcagaattcagcgtctcctcctggttgaaagtcctgctgggaatggcaggctctgggtaaccaccctgacacatggcactataatgtaaaaaacaacacataggccttcccagacatgcaccctcatgggattccagaccccctgtatgatgcttagtagtagtggcctacaaatctgtgggtgaacagaacaggagacttctggactgacagcccctgtcacaagggggcattatctgagatattggccagggcatatcgtgtccctggtcttttgaaactccatttgtcggccaggtgtggtggcttacgactgtaatcccagcactttgggaggctgaggcaggtagatgatgaggtcaggagttcaagactagcctggacaatatggtgaaaccccgtctgtactaataatacaaaaaaaaaaaaaaaaaaaaaaaaaaaaaaaaaa

SEQ ID NO: 28276 - DNA, 2244 bp, Homo Sapiens
gggacacctcgggggtttcctgctttatggcgaaggacacatatactcacagaaatgagttatttaaagaagacggtccagattccacagtccaaaaaaaaagaggtttgccctgcttctgaaggagtcagggtatgaatgcagaggtcttcctgttggctcacatatcagatcttcaacgtcaacattaaatgcgagtgatgcttccccctctgtgaatgtggctttgggtatggctaatccacaccctgcactctggccttcagaagcccagggagagaagcctcccagaagcaaccttccagaaccttctccatcctcccaccgacctccccagcccctgtcctctctttgaatctcgttgtcaagttcttcccgcagacacctggctccttgaggggaggtgcagctttcatctgaccatgcaggcgtgctttgcagtgggtagagcagtgctttcctcctcccagctgcacactggaatcacctggagagtccagaaacttcccgcctcagtgaaagaacatcagtgtatcagcacagcaaatattccaaatgccaggctggattccctccaattaccaggacctccaggcttctcctcctttcaagaactttctgaccctggatccagtctaaatgttggttataaactcacctgacatccacagggcccttccaaaatactgtcaaggctgactgctggtgcctggaacctgcacaccctcctgggactctgcatctctgctggggctggtttctcctctgagccaccttaaggaatcccaccctgacccggtcagagctcaccatgcctccctctcctacttgctcagcattttgtgtctatctagactgaagcctttgctttctctctgtgattgtggtgaaagttcagtttgctttcctatctctagaatgtcagcacgaaggcagaggcatggtctcctgagttccataaccccaaagcctaactccctgcctgccacactgaggggcttagtagacattgacttactaaattgaatagttgagtaataatgctctttgaaataatttggagttagatcttgagccttgtgtggccagaggatgggtgaggacacatcataaaaactaaaggtaactgagcatgccagtggttggggtgagaaatttgcatggagcactccagacacagaggcagcaaaacccaagtgctgggaagtcagagtgagagagtgaaggggcagtgagtgcttctttaggagctggatcaaaacctaagatgatctggccacatggtgcagactgagcacacacttgggagagaaatgggccaggaggagaggagagaggttcaccacaggacagtggatgactgggaatagaagccctccccatggtggaccaagaagtctgtgaagctgagagaaagacaaaagaaatcacgacttctgtaggtagctgggatggaaacctcaggggtgacagggtctttaaaggaaatctcaaggaaggcatcatgttctgggtgtgctccagggatgctgagtaagaaaagaccagcctttctgtgtgtgtctttactctgccacaaggcacctgggctcctaaatgaccaatacacatgtgctatactggtgccaagaaagaagggtgttttgtaggaaagtcaaggtgagaggaggtgcccaggacttggctcctttctttgaagggtgacggtgtaaattctccatgctggggatcctactgatggatggaggcatgtcgatctcatcatttcacagagtggggagctatggccacaacgtgcctatcacacaagtccagcctcacgtcagctggacaccagctgttctgacacttgtcagcacatggggcacccggaagttcatggtgttctgcaaagaacgccacaaaacagtgagctcaacttcttgaaagtcataatgtgttgctaagtccgatcccagatcctaaaaataatatgaggtagtggccattgaacagaaaaaatttacatcttaaacttgaagataagtacaagtgtacctttttctaccactgttgttcagttttattatattgacaagcacctctgcccaccctgtggggtaaaactgtttgaaagtgtttatgaaagttttatataaatattggttgatcaaatgtacaaaatatgcatgatggcaccatattgtgtataatagtgacaaatacagtctatgtgggtggagaaacaaaaaaaaaaaaaaaaaa

SEQ ID NO: 28277 - DNA, 1799 bp, Homo Sapiens
gcaaactgtgattctcaagattagaaagtaacaaggaatatgcccaaactgtcaaatgtcacctgttatgtattcgtccctattccttaactatgtatttttatttcagtgagagaaggaaagttgtaaactagcccatagtcacctatattttagggaaaaaaatccaaattgtttcctaacattctattttatacccttgcgtattaaacgtgaaagtactcccacttttctatatttagtttttcttttctccctgagatgattcatttaaactcagtaaatatggaaagatgcatggcagaagctgaaatgagctcaagcagtactaaccttggaaccattctgggtacccaaaagaaaaatttaaaatcaagatgagtaaaaggagaatggtctcaatatcctcaaaaatgcagtaagagaagtaattccccactgaaaatgtctctctttctttctatgttataccctggagtcctggttgaggggtgggggaatcagaaaagtaggtttacatttaacatttttcttaactacattcacttcttaaaaaggaacaagaagtgtaaataagtatgtatagagtgagggattaagcatatttgcattggggactcgtgtattatgcttttaagtcaaaattaatattctcaaattcgaatttgatagctattatttctaaatctttttaatcctcaattttcctggtaaccttctttcaagagtctccttcttctaaaagttgccaaaccctttatatttaagctttttccactcaggactcaattagagtggtcaacagggagagggatggtcccatttgatctttgccactgagcaaaacaaaacttcaaatgaacttttaaactgtagctttagtcttctggtataaagtggggaagattacacttatgtgatcaccaaaggatttactagtatcttggtcattccaattgcacaatgttaactgtacaacacacagcagaaaagtgaatagacttcactaagggattctaagtttagaaaataggttttgttttcttaaaaaattttgtgtataatacaaactaatgaaaactatacatattctccaattcctatagtaataataatgtaactgttacaccaactttcctcatatttgagagatgagtacatgttggattgcagcatttcttcatgttaaaaacatggaatattattcaaatatagtacttggggcctaaacaactaaaattagtcaccgcataactagttgaaaatggcataggcataaaatgttaataaagaatggcagttatatttatgctcacttcctggagtaattgggtaatattcagaaaggcacatcgtggtagtttaagtgtacaaggccttagggcagtatctagcccagtattattccagattctcctgagctctatataaagggcattttggaggaactcttctgggcaatatctttcccaatctcatctaaattctgggaaatattttccatagcagacaacccagctctgaaactaagcacctggtgatctttagtttgagatgtctatatggtacttttgagttatatcaattaagatacaagctatagacatgataaaaatatgaaatcaagatatagctcagtgggattggattaagacataataatagttctaggaattcacttttgattgtatgttttaccaattcaataattccactaatcaagtattcacattttgacttttgattaaataaaaatttgaattaaaattaaaaaaaaaaaaaaaaaaaaaaaaaaaaaa

SEQ ID NO: 28278 - DNA, 4562 bp, Homo Sapiens
tgtttttttttttttttttttattttttaagttcagtgacttaaaagcattgggttgtctgttctatgtctaggccaaaacagcttcatgaaatcccagccttttattgtcctgacaaaaacaaggtgaatttcattcctaaaagtggatctgctttctgcctcgtcagcatcctcaagccactccttcctaccccggatcttacactcaagggctctggccacagcctgacagtcaccactggcatgacaaccactctgctgcagcctattgctgtggcctccctgtctacaaacacagagcaagaccgagtctctcgaggaacaagtacagtcatgccatcagcttctctactcccaccaccagaaccaattgaggaagctgaaggataggtcacagtgcaacgtggctgttgctctgggaaattgggaacctcctcagatcactggattctgatggcatcgtgcgcttctggtcggctgtgatgtgctccagctttccagtgacatgtgacggcgaggcttctggaagaaaggatcccccgtgacggctctgccccacttgtgaacgccaaccctcagtgcttagcctgctttttatcaaagcactgattgaaacaagaaaggtctcattctttacctttggagagacaatatcacgtttttgttttcgaattagacttctttaaaacacacacacacacacacacacacacacacacacacacacacacacacacccctgatccttgccaacatgattcctaaagggagatgtgactgatgctgcaagaaccatcttttctatgaaaatgactattttataatataccaatgttacattttctgaaacgtagcaaacaggatattcaaaagattctttggtggcctctgtttcttgttccctttctagatgtgtgcttttctcagctgttttcagctttgggaccaaagggattgttgacgttttcccagcaatcttaatctcatgactatgttcttctcccaaacaaggattgataggtaaatgcattgaacaagtatatataaaaagagattaaaaagcaatattcgtacattatgtgatttatgtttttgatgtcaaaagtttgtgctttgggtgaaatatttgtataactgctgttttcttcactactcctgtacacatttcaccatgtggtcagaaaagttgtagtctgaagacaagtgctttaatatgttctcacccatattggaacttgatttaaaagtcagtgagccaaaaggaagctatccagcgttgattgctagctaagagtaaggagcccctttggttttctgtgatatatatatatatcacacgctctccctcctttaccacaggtgtcattctacctttaatcatcactgtatcatagccccaaagagatcctgaaatggctgtgcatggatttcctcctttgcccttgtgatgttgttgtcttgtggatttggttgggctagtagtttgccaggagtgtaatccagtggatagtgatccaaactgtagccgcagaatcctgtgactgacatttttctttgtggtggtggttggccctgagatttgttgcctacagattttgctaatttacccccctaacgcttcacatagtggggaaaatacacaagaagaacttgagtatgaacgataagcacctttgaaaaccccatacagttttggattagggctcatcctaatataaatcactgccagtatcacatgacatcagtatgtgatttctgggtatgtggtagtgagattaaggagcagctttttttttttttttttttgagacggagtttcactcttgttgcccaggctggagtgcaatggcgcaatctcggctcactgcgacctctgtctcccaggttcaagcagttctcctgcctcagcctcccaagtagctgggattacaggcatgcaccaccacacccagctaattttgtatttttagtatatatggggtttcaccatgttggtcaggctgttcttgaactcctggcctcaggtgatctgctcgtcttggcctcccaaagtgctgggattacaggtgtgagccaccacgcccatccaggagcagctctttttttaaaagtgagtttcagcaaacagtattgaataaaagcatccttttcatatcttcatatactactttatgatgcaataatttactgttcctatacatattataaggtagaaaaaagtttttaaatccttataaagaggatgcagtttagaaggttaatatgtcagcttacccagacatattctatcaaggaaaacctagtggtagcaataaatctttggaaaggacttcttatactcatgtacctttaaaacatctaagcaatttaaaataatccctgttgagtttaaattcgagatgcatttaggtaaattggataaattcaacatttgaataaatccgtcaggttttagatggtgggattgatgaactttggtactttctcaatccaaaactaatttatttggaactagtacgttatggcttctcagtcatgaaaagctcagttatttggggtctacattttctcactgagagccttgatattttgccttctttgttatgcattataacttgactgtatcaccactgagtatctgctgtatcagaagttcagaagaaaaggtaaaactgaaatcagaatgggggtagaggaagttaaaaacaagttatttaaaaagaactcttggtttttggatgacttgaattctgttaaatctgtgttcttggccttgcacttccgttcctcttccatctctatccctgctagtcacaatggcattttagaactagaatgccactctgtagaggttttcccttttgctctgttgtgcctatttgtctaattcatatctttctgtggagtttcatatgtccttaatctaaagtaacttaaaattggaatggaagaacaagtttcagaattatttacagtcttatacatagaacttctagtgtaatgtttggttgtaaggagaatgtgaatttgcaggtaaatgaattgtatggcaaccagacagatccctggggtttgggagaaatagagcttgagatttgaaaaaaaggtacaaggtacaaaacaactctaactgccagtgccaaagggctaatttttaagcatgtaagctttaccacagtcttgaaaaaaatattaaccataggttcattcagctgttttatttaacccttagttccctggtggttgattttttttttaaatgggtctccagctttccagtgaaatgtgacactctcaatagaatgcataatgttggtttctaaagttacactccataattattgttattctgtagaaaactgtacagaaggtaaatagaatagcttcaatgggaatataatttaaatttttttaattttataaaaatttatttccattgcattaaaagaaatgggtagcatgtgtctttcagagaaaggagctatttggttattcactttgtcaatcttaggtttttttaaatctttaaacaatttcttctttgtgatgataaaaataatataaatttactgtttctgatcatgactgagtctattacttgtcatggcttttgtacgcaactgtgttttaaaaataccggttttgcctctttggttacatgtggtgagcatggatgtcaagattatttttcaactagattattcaatttgttttatatttcttatacttaatacttatgactacagtccaaatcagtcttttagaaggtgctcttgctaactgtggaatatttgacgacatgaaagtcctttttctttgctttcagtggttggctttcactgaaagaaagtgtaaaaaaagtcagaatttatagctttcactatgtccaagactaggactgggttataaagattttcttttgtgaaggaaaataaaagaaaatttgccactactgcatttactttactattgtaaacttaagattcattccttagtctttggaattttgatgtctcaaaaccagatgagtggaagtgctgaatttgcaaaataaagctaagaatgcttaactctgcactttaagttctactctgaccaaattgaagatgagcagagcagccctgaacagcattttgtttatacagtcttgtttaagaatagaatttttttaactcttcattttttgtctctgtggaagctgtgtaactctttttaaaatgcaatttaaaacattttgttattctaacaattctctcaaaaaacagcatttccaatggtaatcggtattgttacgctgtacttatgtattccctgtacctgaacacttgttgctgcctcacaagaaaatagaacttttatgttaaaaataaagtctgttcttcttgaaaaaaaaaaaaaaaaaaaaaaaaaaaaaaaaaaaaaaaaaaaaaaaaaaaaaaaaaaaaaaaaaaaaaaaaaaaaaaaaaaaaaaaaaaaaaaaaaaaaaaaaaaaaaaaaaaaaaaaaaaaaaaaaaaaaaaaaaaaaaaaaaaaaaaaaaaaaaaaaaaaaaaaaaaaaaaa

SEQ ID NO: 28279 - DNA, 2877 bp, Homo Sapiens
tgaagagagaggaggagcgtttgcggcctcagcgtctgtcaacagaaccctcttcacccgtggttaaaccctccctaaccctgagctcgtgctcccctcccggtggacgcagacctgaccacagaagccctgcagcactcactgggggcttgagggagcccctgagtcccctccaccctcgccgccttctcctgggtacccaggaaacgtctccaagggaggctgtgacccaggaccccgcctcgacctcaccttcttctgtaaggcgcagtgaaagacgaagatgaagaccccctggaaggcgttgaaggtggtgaagagataggccatgaccaccgactccttgttgatgaagaggaggccgaaagcccagcaataatcgtaattgacaagaggcattacaaggagctgcaacaaaagcaacgactaccaagtgtccagcactcacgaggggccagcaactatgctacgcacctcactggccgtcttttgagaaccctgtctacagatgggaaaactgaggcacactgaagtgaggccacatggctggcgaaagcaggcaccatttcctttgcatctacagctcgggtgcacacaagcttgacatgcgttgtcgctactccttgtggcttcccagggaaggcttttgacccctctccaccccatcacagatgaataaacaggctcagctggcttaaagggcattggtaatattactgagcacatcctgaaccaggcatgggtctgggcgctggggcggcgggtgaagacgaagcctctgcccttgggaagtttacactcggcactcaaaaccctgccaccaggagcgactttgtggccggccctgggccaagcgcttctcacatgtcatctcatggactcacacctccttccgtagtggcccagagaaattaaatcatttgctcaaggtttcagagccagaaaactcaagagcccagtcgagccttgaacctacacccatctgactgcccccctgtgctgagctcgctgccccccaccccccttccccgctgtcccagccgcgggagtcagccgtgtccccagtgctgtggggaggcttcaaggagcagatgggcatccccctcggtggtggctgaaggcctcaagcgctgaaaggaaaggacgaagagtaaaagaagaaaattacggaagcacagaagggatcctgtttccccagcatcgagtcacctgtgaggagaaatcaaaggctggcagggaaggttggggtgggaggggagaggagggagagttacagggcctcttagtccccaaacccggcccgccacactcagacaccctgatggccctgccttctccccactcttcccggaggccctaccaccaggttgactacatggaacccattgtgggaggagaagggaagggataatgggaaggagggagggaggagagagggcaggaaaaaggtgatgtcaagggtggggtgctgaggaggagagaccttgtctttgtctgatccctttggccaggtgcaagatggccaggctcctggctccccaaatcactttcttcaggctgcctggaggccaccctcagtccaacatggcggcatttcctttgcagacaggaagtgccacatggtaatggggagaccagtgaggagctatgaatctgttgaaaatgccccccagcccttcaccctgaatctgccaccaggcctcagaggatggtatcccactctatgggtgtagagtccagcttccatgattgggaagaagtgtgtggggagtgagggtgctgagagaacggtgttgagaggggcagtggggtaagtgagagggaagagaaggtagatgagaagggtcagaagaggtcagaagagtcagaaaaggaagggatgtgagaaggcgagggaggcagatgggggagaaaagcatagaggccaagggagaagagagagacgtaagtgtgccaggcagagcacgggaccatggcctggcagtgtggaaatgagtatagggtgcatgaagaagcagggtgagtgggctggggtaaggagagctggagaaggtgtccccacaggaggggacagagtctgtgaggcgggggagcaggcactgagtgtggacactggtgtctgggattagagaatgtgtgttggagagagcaggcccggctgtccccactgtgcccaggccccatgcatgtgtgcacatgtgtgatgggtcaaggtgtctcctcctcactcactcatgcgagaagggcccgcatccgcacaaggaacaagatgactcactgtaggggacacagtcgtactgcacctccaggtacttgtaggtcccaggacaggggtcaggaagggcatccgagccggcgaccaccacgcactgggtgcggttgttacaccttcagaggagaaacagggcattgggaaagaaacacatagacggggtggcgggggtgggggtgcatgctccagggtcatggtgtcatagacacccccaaattgggaaggggcagtggagctggaaaccaagtgatatagtttggatctgtgtccatacccaaatctcatgttgaattgtgatctccagtgttggaggtggggcctggtgggaggtgattggatcatgggggcagtttctaatgaatggtttatcaccatcccctccgtgctgttgagatctggttgtttaaaagtgtgtagcacctcccctgttctcttttcctcctactccagccatgtacggcgtgcctgcttccccttcaccttctgctgtgattgtaagtttcctgaggcctccccagaagcagaagctactatgcttcctgtacagcctgcagaactatgagccaattaaatgtcttttctttataaaaaaaaaaaaaaaaaaa

SEQ ID NO: 28280 - DNA, 3816 bp, Homo Sapiens
atgtgactttctagcctcaatatttgggtgctgggggtttgagcatgggcatttgagacttgatgggatgtgtcactgtccctggaagcaggatcagagcttgggcctagtggtgttctgctttgagggttggcattagaggggacttagaagttgtggtgaattttgtggtcccagagggctgaagatgagcctccagaggggccaccactcctaatcccatgcccctgccaaatatcccaacctgagcatgatgccgtctcccattgagctcggacatgcacttggatcccaccgcaacataattcctcagagggccaaactagaaattgatttaccggccctgacttaggacaacatactcatttcatggacaaggaaactaaggttaagtggggacacgcgttgggcgcggtggctcacacctgtactcccagcactttgggaggccgaggcgggcagatcacgaggtcaggagattgagaccatcctggctaacacggtgaaaccccgtctctactaaaaatacaaaaaattaaccaggcatggtggtgggtgcgtgtagtcccagctactcgggaggctgaggcaggagaatggcatgaacccgggaggcagagcttgcagtgagccgagatcatgccactgaactccagcctgggcgacagagcgatactccgtctcaaaaaaaaaaaagagagagatatcaaatgattggcacaggccaggctagggcccacattcccatttcctgttttccacaccactgtggaatgtctgctagctcaggacttcagtggggcattgatgaagggctgagcactcccatgaactgctctaaaagggttagccatagagaagcaggtatgaaacaattcatgagagaagaaagggtgggaatgagatagggagggaaggaatgaggaagaagtgagccacgtggaaacccaagcaggatgtatgccttctgatttctactgaagctgtagaaagggccaggcagggcaactaccttttcttccccattctcagagggatcagaggccctatggtatgcgggtggaccagttcagcctccagtaccaggtcactctgaaaaagggattaaaaggaaagccacctgtccattaatactggagaaaacactgacaatggtctggactgggagaagccagtcctcctggctggagacatgaaaaccatgaaattaaattccagagctctgacagaagcctgtatggctttgtgtggtctctgacaagctacattttttttttttcaatttttaaaaaggactcaaaatataaggacttcaataacgggacagctattcatctttccccatctcatagtgctgtgggataattaaggaatcaaagagaccaaggggttgaggaggatacttattatttattatttaggtgcactggcccagtcagattaacatccaaaaagactgagcccgaacaaatagtctggttaccttttaagcattttatggggcagggggagatctgtgcagggggaagcatattacagaagcgagaaacaaagacagttattcaattaagacatgcattacatcatttcttacttttcaaggaaaaaacatgttttacaacttgagtttatctgcctagtgaccttgcagctgcagagctagagaaacagcgtcttcacaatgcctgggaaagggagagaaaaggctcactggccacagaaaaacaagcagttaatttttaaaggacttcagctctttctcttcctcagggggaattgggttttcttacatacaatgaatttttgcttacacgttctttaatttcttttaattccttttccagtagaactggacctgaggcagctaggaataggatgcatgtttttgaccctggccaggatcagaaagaaggaaacctctcctgagggtcttcagcagtggaagagggcagtcaggacagggacagtgaggaaacgttacatcgctaaaaagggctacttatgcgtattctatgcgtggttgaaaataaacagcactgtgtctggaatgaatttgtaaagtgttcggtgccttctaactctgagtagtcactaggtctctcggatttctgaaaagtactagtcagtgacaagaaacatccctgtgtttatttagtttaatccaaatcttatagaactcaccgcagggatgcagagccatagggagtgtaatatcttggaaccatcctaatgcctgatctctggggctaggtggatctgacccctccccctccacccaatctctctctcttccattcgccttccaaattcatttgagttcaaatgtatctgattaaataatcccagggaaaactgtagaaagctctagaatttggggttcaggtaccctggaataatcctggattcctttgtatccatctgcaaacgctgggtacactgtgtacccccgtccaggggtcatgcctcgcagcctctttcttctaaggagctagaggctcccaagctcatgccctgaccgtgtgttacgggctgaattgtgtctccttcccctacaaatgtgtatgttgaaatctttgcccttaatacctcagatgtgactgtatttggggagaaagtctttaaacaggtaattgagggtgggccctaatctagtcttactggtgttcttataagaagaggagattaggacacagatacgtacaaagggaagaccatgtgaagacataggagaagccatctgcaagccaaggagagaggcctcagaagaaagcatccctgccagtgacttgatccagcttctagaactgtgaggaaatgagtttctgttgttgaagccaaccagtgtatggttctttgctatggcagccctggcaagctcacacaccatgcgtcttactgtgtttgtgttgctgtaaaggaatatctgagggggtgggggtaacgtataaagaaaacagatcttttggctcacggttttgcaggctgtacaagaagcatggtgctggcatctgcttctggtgagggcctcaggccgcttccatccacagtggaaggggtaggggagctggagtgggcaggtcacatggagagagaggaattaagagagggggtggtgccaggctcttttttaacaatcagatcttgtggcagctaatattgatagaacgagaactcactcatcactgtggggatggcaccgagccgttcatgagggatccacccctatgacccaaacacctcccaccaggccccacctccagtattggggatcaaatctcagcatgaggtttgtgggaacaagtgtctcaactataacaccatgtctaggaatgtttcgttaagtgggcaaaagggctgttaacctgaagggagcattctgtggaaggagacaagtcttccctgaccctcctgatctccactgagtacccacgtgatgttcatctccacgagtgtgacggacattactggaatgttcaggaagatgatatggaaaagtcagcatcagaagtatgcatcctggctgggcacagtggctcatgcctgtaatcccagcacattgggaagcccaggcaggcagatcacctgaggtcaagggttcgagaccagcctggccaacatggtgaaacactgtctctactaataatacaaaaatgagccaggcgtggtggtgggtgcctgtaatcccagctactcaggaggctgaggcagaagaatcacaaacccaggaggcggaggttgcagtgagccaagatcccacactgcactccagcctgggcgacagagtgagactgtgtctcaaaaaaaaaaaaaaaaaaa

SEQ ID NO: 28281 - DNA, 6037 bp, Homo Sapiens
acctggctatttcctcacttatatcgataaactttaactgcttactggggtcacagtgaaaatttcaatcagttcatatatatggaagtgttttatgaacagcaagccacataaatgtgtttttcctggagtctaaaaccagtttcatgagtaacttgtttttcagacactgaggtctggaggtctggggcacagtccatgtaattcaccactcagcacccctagcctgccttttcctgactttggcttaaagcgtggtaagcagtgacagtagaaaatgctttgactttggctattctctctaggccttttcctaacctggtggacattgggatggtgtacgatcctgtgcactcaatatccacttaccaatcaaccactgcagtgccaggaatcaaagggagtcgtgcctcccagtccagcagggaactcctgtcccagaagatagagggaacgtttctctatcccctgggttaggaaaaggactttagatagaccttaaaggagaaagattttaccagagccaacgggcaaagggatcagcagtacaaaaatcatagaagaaagatgcaaagcatggacaatgtttggataaggtcggcgatcaggcctggctggcacataggaatggaaatagcagatgatgagccctgtgcacctgtgagccagatggagaagggtttttaatgctgtggtaagagttacaagacttagcctcagatattaggcagaaaagtgatacgatcagaatgatcactggagcctggagaggctggacaagcccagaaaagagatcacagagactggaaccaggacagtagcagaggacttggaggagaggattattttggagataaaatgcacaaggtttgaatgttctggatgtgggttgcacagaaagatcgatcagagtcaaatttcaagccctcgctggggaagggaatgggtggggtttcggacagagagagagattcttggatgacaaatgtcagtggattcactacttaaagttttctaagtaggagccaactctagcaagcttagctaagagacagactgtactagaactttcctagcatatatgagagatccatggaagagttgaattaaccaggaagatgggaagtggggcagctctaagggcccctagcaccaggaatccatgcacctttctctcagagcagtaccattcactactgagtctttatccagttcttgtttctctcacttaaaaacaggagtcttaggcaggtggctgtccctgtgccagtcacctgtgaccaggaagtcaggtcaaatggctgcttggggcctaccttatagatcggtgtccatctccaaagaatggagaatccattttgaattgggcaaacaatcagaaaagatctagcacagtgggcaagatgatgagtttgggtttgcctgggctaggttttaaaagccatctctttgaggaaatgagctaacaattagaactgaggggtccagcagattgggcagccaccaccattgagaggaagaaggacaactgggcagagcagtaaaacatcaagcagatgaccaccaagagtggtgagccagacatggccatattctataggaaaggggaagaagataaggtggataaatcagagaaatgtggggtttcaaagaaagaaccagattcataaggaaaaaagacgaaagaaacaacgttagatgtcctcagaggttcagcagcatttaaggatccaagtctcttggatttggtggtttggatgtgtgtaaccttcttaagtggcaagggcagaaggtagacagagaagtgtagcagagtcagtgggtaattgtggtgggaaggaaggaggtaaaatggttgctccgagaagagccagagtaaaatggagacttgtgttttttagtccgcagggaagtgaactaagtttgtaaacctgaagggtgagatccagccatgaaggaaagatgttgaggagctaatgtaagccacaagccaaatcagagttttgggaccaagagtacaagttgatgagttagcatcgaaggagtgaaaagacactttcatcctgagacaggagagaaataacaaatagacagtggaggagaaacttgaggtccagaggagaggggttgcagtatgtcccctggctgttctgccttctccaccgatgtgtagtgggtgttggagtttcactaaagaagtctccatttcaagaatgcaggttggatgcaacccatttcaatcagtggaaagagaagtggaaactcaagaggtgagaaaatgcttttagtaaggaccatcaacctagagaaaaaatttattattggccatgcataccagttttatacattgtcataataaacatttttcaagcagctttaaaggatattatagaaaaaaagtatataattttacagatgtctgtttttaaaaaataagaaagtttaccaatacttacaacatcaaataaaatgcaattgctatatcaaactgaaaacaaaatcagttttatgttggttatcccagtggattttcactatgtattgttcctacaagaaaatgtccatagtaatgaaataagtgattccacgtgtgactgcccaagggtggttttaaccatttctcagaactgagataaagctctaacaattctgatgcctgagttcagcctataatctcatagctgatcgggcccttggaactcatacccctggggtccaagcaggtaactttgagaagttcaagagaaatgtcaggggaggttggaggacctcccagtgttcacatggtagtggccacaccctggtcttgggtctcatcctcaccttgtcagttctagaaactatattttatctactctttcaaattaaatcaggctttcaaaggctgaatggtaacattggggaatctataaactagaatttctgtgtgatcttttacagtaaagaatgcatatatcttatggctccatcatcgtagacttccttccttcctattttcaggtaaccatggaggctaaaagaggaaatagaaggtttttggtggacaaggaataaattcacagagaaactgctgtccttggaagagataatagcctaaccctgtgcctccaaagaaaatatacacagctccctaaaaagtgcctagcatagtgtgggaattcaatcaggaagagtcggtgagagagtgaacacacttgactaacccccatctctctctgctgcgtgaccctgagttatttgggacccatcttcttgattcaagctgactcatcaggatgtcagtgcagttggtcaggctcaatttgctggtgtgtccagacattcatgagcctgtactttgtcttctgtatttcaaggtcctttttatcctgtagtgctccgggaaccatctgacttctgcaggctgtctctccatcatgttttgatacgtgattgattttgttgcatggggataacttggtttctgagatgacattagcagccccttttctgctgacatcggggggccttctaagcatgtcttgaagtgttcagagcttcctgtctcctgtgacaacacactgatctctcagggaacaatgcccttcactattgagaccagacctttcctttgtgacttttccttatttggattgatggaacccctttttgtagggcctgccccactcaagtcttccctaccccaggctcagcatctcagctcctgaacccctcctccagacatggtttctagaaagttctcccattactacttacctgttaactgcatcctagcttctcagggttccaaaatatgatgttcagatggcaggactgctccagctggcacagattagtgtgaaaatgtcccttcctgtactagggcttgatgtcctaggaaaatggtacaggatttttaaaaatactcacttcttacttttttgcttctcatgaccaagcaaccactaaatacttagttttaaaaatttgtattaccaataccttctctgtattcagcaatatttttgacttaatggtagaactttacatatatccctgttatgtatattttttcccatacaccagttaggttaagggacatctttagcttttaaaaaagtacagttcgaaatataaagtaaaagcagttaagtcttttccaagtacaaagtgaattggttccaattgctagagaatttacaaatatatattcacctgaggccagaaaaagctcctttggcctaggcctctctcctttatcaagctctctccatcacgagtgtgcacatgtgcgcgcgcgcacacacacacacacacacacacagaacttaacagcagtgatgtgtgttgtaatatgcaactttgtaagttacatatcactccccaataccaccttctcagtcacggagtagagatcttacttcacaagaagtgagactcagagaggtgaagtgacctgtgcaaggtcacctattacagtgccagagttggaactaaaggaacttcagtctgtgaacttcagtgtctttccagtagcatatttgcagcagaagagtcaagaatgttgtgagctgcaactctcactagaaccaaatgaccttattgggagatgttagtccagccttaaaaacaagctcttcacctccatgaatggcaagtgtctgccctcttcaggccaaatcgagaatgacatctataactgagcaaatcctcagaacccaagtcagaccttggattattgcttttcagtaagttctggtcctggctgtgtctctaactcttgctgtgggaccctcagggaagctacccacccccttcaccccacctgaatgagatgatttctgaagtcctcagtagccctgattctaagcctcataaggaagagtaggtgttaatggcatcctagggcaatggtaggcgcctgatgcagatctgctgtgagccatgtgctggcatcacaggggtggtttattaatttcatttatcatctggacagccccttcttataacgtacatccttgcctcttctgaggctctaagatccccaaggtggctcctgtatccagaaaccccttggccttccctcccagttaagcaagatccctcttcaactcagggatgctgagagattgaaagtgaactacacacaggaacagccaagataggagttatttctatagcaccatgcttggctgatgttctttacacggagtgggcaggatttttaaaacagcgtttgtgccttttagcctgggctcctcctaaaagcagactctgggacaaggatttgtgtgcaagtagctggcttgaaaggtgattccaggaagcactgaggtggcatggagaagcaaggctgagaagaagggaatgcaaagaacagccaccaaggtgcacggccagggcctctgtcaagctgtgaggaacatgctgcagagttgtcccctggggctgaggaagctatgagagagagccactccactcccatcctttgtaggtagagggccaccgccaggctcttagctacttggaactagggccagcttgaggaatatgggtgaggcacccatggcctctgctacattgtttttaatccagtctcaaaaacaaaatggtcctatcacagaaactctgcaaaaatacatgaaagagtaaagaaaaacatgtaaacattttacaattactctatccaaagataaatactgttaaaatgtcagtatgttcttacacaagtttttccatgcatatatgtgtagatttatatacattaagattgtattatacatagaaaataaatttctggacagttatataacctgcccttttcaaaatatatctaggaaatctttctatgttattgtgttgtcttctataacatgattttcatgactttactattatagtctctaaaaaggatggttcataatttttactggacatttcagtggtttgcaaagtttgaccattacaatatatgttgaaatgagcatccttggatataaatcttttttgtacatcaaaaaaaaaaaaaaaaaaaaaaaaaaaaaaaaaaaaaaaaaaa

SEQ ID NO: 28282 - DNA, 4337 bp, Homo Sapiens
gaacagatgagtagtagaacttaaacatgcccggagttgccaggaatttgcaaaagccttgatataattcctgttgctgtagaaagactttctacagtcactaatatatcaagttatgttcactagaaaaaaagtttacttagtttatagaaatgggctgaaaaatcctaattacttatctgtgaggttattttcatgaaggttaatcatccagaaactattagagagcctcggaatatatttcttctaatctgctctacctatcccattcaaaggagggaatctgaagatttaaggacaaagagcagttgaaaactcagagctgtggttaatgggagaatttcaaggatggtgaaaaaaactaacatcattgcatccctgttttttgtattctggactttttagtttagctcttggtaaactacatcagaaattctttatgctaactctaacacacattttggggtattgctaatttaatctttgaatactgtttttgctgtttcatgattatatgttatgtcctaccagctagattgccaactcttgactactgactggaagtttattgtttattcagcaaataatgaattaagtcagtgaagtgagagatttcgtgtgtaaggattgttaacttgaacatttcaccagttacacgcagttcagccctacttaaattttaaaaatcattgttggcacttgacattgttatgaggagttttgtattttcaacttgtattttgagagtgtcctcatgtgactgaagtatgtgctactcttcttaattgaataaccccagaatctccagaattgataattggaggaaattctactgttggaaagaatggatggattatacagccctgttttttgaccgttcattttgtccttggagtcactaccacttggcctcaaagtgtgaacatgtaaccctttccttaatactttgctacacagctgagcagaaactgtaaatttggatcctttgtcagtacaacttaaaatggaacaatttcaatggcttagggtaagataagtatgtaaagatacttttgtaatagaagaaaaaacattggatattaaaatcacacagtagtacctgggtgtggtggctcatgcctataatcccaacgctttgggaggccaagacaggagcactgctggaggccaggaatttgagaccagcctggccaacatggtgaaacctcgtctctaccaaaaaatacaaaaatcagccaggtgtggtggcacatgcctgtaatcccggatactcgggaggctgaggtgggggaatcgcttgaaccagggaggtggaggttgcagtgagctgaaatcgcaaaactgcactccaacctgggcaacagagtgagacctcctgtctccaaaaaaaaaaaaaaaaaaaaaaaaaagtgggtgtggttgtgtacacctctacttcctgctactcaggaggctgaggctggaggatctcttgagcccaggagttcaagtctgcagtgagctatagttgcactgctgcactccagcctgggtagcacagcgagacccccatctctaaaacataaaagtaaacaggctgggtgcagtggcttacacctgtaatcccagcactttgggaggccgaggagggtggatcatgaggtcaagagttgagaccagcctggccaacgtggcgaaaccccatctgtactaaaaatacaaaaattagccagtcgtggtgccaggtgcctttaatcccagctattcaggaggctgagacaggagaatcgcttgaacctgggagacagaggttgcagtgagccaagatcatgccattgcacttcagcctcggggacaagaacaagactgtgtctcaaaaaaaaaaaaaaaaagtagaaaacagaatagcataaggataatcttatatacaaaataagactactcaatttctgaatttttttcttaactagatatgccacctcctgatgacagtgcccatttcgtaacttgtcttactcagaaacagctcttagataattttactctttaagttcaggtctgagcacagaggacaaagaattcccttgattgcctatgaaagaaaggattctcaaccttggcactattgacattttaagtcagataattctttgttgtggaaggttatcctgtgcattgtaggatgtttattttatcagcatccctggcttctacccagtaaatcccagtagcaccccaccaccaaccaaaactgtctcaaaatgttgctagatgccccttggggacaaaaatcctctccctccctcctccttgaatgccactggcactccttgagcctacagaagggctcttctcacaagtttgataccctgtacctcccagttgatagtgggaattacttctcctttgaagacacaattccagttaccctgagaagtatggcattggccttgctggcctccaccaaattactatatcactgtgtttggtaaccccagacatcatactagggctttaatttcagtatataaatagtaaattagtatccttgtataggttagcttaatgagtttcagaattcttcaagtcatatcttcataggtaggatcactgtggagttaatggcatttgaactatgtactcagtactatgctagtggttggtgcaaggggaagatacaaaataaggtgtgattttagcccatgaggaatttatactttatctgcagaagcaaattaatatggaaccgttagtgaacacctggataaaacagaatgctaaattttaccctagaggtgcttggcctggacttcaagaattctaagtgaattgaagtatgttcacagtaagaaaggttaaaaatggctctgcccacttgtaggcagatgggaagctaggatggcagacttgccaatatttgatatatgtaaaaagtgctatcatggcctctgttgtttcctcttttatctcgttctctttattagtccaggttctctagaggaatagaactaataggagatatatatatatatatatatggagtttattaagtagtattaactcacatgatcacaaggtcccagaataggccatatgcaagctgaggagaaaggaaggcagtcgagtttcaaagctgaagaacatggagtccaatgtttgaggacgggaagcatccaacatgggagaaagctgtaggctgggaggctaagccagtctagtcttttcatgtttttctgcctgctttatattctggtcgtgctggcagctgattagatggtgcccgcccagattaagggtgggtctgcctttcccagcccactaactcaaatgttaatctcctttggtaacactctcacagacacattcaggatcgatactttgcatcctttaatccaatcaagttgactgtattaaccatcacaagtccaccacttgtcaacttaaacacatacatatctcctgagatcattcataatcttcaaataaagacaataataatgtcataattacacctaatacaactatcctttgtacagctggaaacacaccagtccccaacccaaatgctattacataaagttaacaatacttaaatgctgatatgaagtaaatcttaatgtcccatgataaaaggaggctgggcgcagtggctcacgcctgtaatcccagcactttgggaggccgagatgagtaatggcttttgacagtaatagagggtctcaacctgatttttcttaagtttgcataaggcttaggagaggataaaataaggcaggatctagagattggtgaggagaaacggaagtcctcattcttgacagctctcagcacatgcagccctccccacacacacagtcacactcacacacactcacaaccagattcacattcctacccatgcacacactaacacacacttgtgcacttaaactcgtgcacttacacattcacattcatatactcacatgcacacattcaaaacacacacatactctacaaacactcatgttgcaaaaggggatttgtaagctgaatgtttagaactcagaacacatattttcacaaaaataatattatggtcgggcgctgtggctcacgcctgtaatcctagcactttgggaggctcagctgggcggatcacttgagatcaggagttcaggaccagcctggccaacatactaaaaatacagaaattagccaggcatggtggtgcatgcctgtaatcccagctactcgggaggctgaggcaggagaatcacttgaacccaggaggcaaaggttgcagtgagccgagatcctgccactgcactccagactgggcaacaagagcaagactccatctcaaaaaaaaaaaaaaa

SEQ ID NO: 28283 - DNA, 5155 bp, Homo Sapiens
gaggaagagctgtttttctgttccaagtccagcacttccacccttgcctgtctacttcactggactttcttccaacaactcctcctctttacccctccccagcttctgtctccctgtccactagctcctcttcctcaacctacaaacatgctcaaattcctttcagtcaaaaaataaacttctcttctatactaccttgaacctagttactgccatctagtctgtcaaacttccatgtgctctcatactaccctgttttagtactgattctgtcacattgtaattgtttatttccttgttttccttctatatcagactgtaagcttctgagaaatctgtctcttgatcctggttgattcaccgaagcccaagctagttcctagtgcatcgtacgcattcagtaaatattttttgaatgaatgaacaatgttagagccatgcctctgccattcactttgtgaactacctgtaatttttttctacccctacatttcggttgaaagttcacttgaaggtcaccacataaatgtgaaatctagtggcttctctctttacatcatgcttgacctctgcaaccattagtgcttacaaatttaccttttccacacattcatggtcacgtatacctgggtcattttgggccagtctcagtattgcattcaaaagaagcagacaagccccgaacctttggaaagtaatgaacttctgtaatatattagtgaaatcttctaatgagatagaaatatacaattacataaagctcagcaaacttcaaataagttctttttacccaccttcccatatccttacacagcttggcaccttcaatctctcttttgtaacagttcacccaaaacttgtacacttttggccaaaaaccccttgtcctttgtccccttttttcatcttctatgtttattttcttccaagaatagattattctttccagtttaaatcactttagcctcttttggctccttccaaccaagttctttcctaaaccagttatcttactcagtattttagaagtccaggagcattgtcttgatttcatttggtttgcccttaccaactttctttgcatcattttatttaatcttaatgcctcacatcagtgagtattccctgacctcctgggtgtctcccttctgtgtctctgtggtgccccgtttataactctctggaaataatctatttctatctcttctctaggctatacatttcttaagggtaggagtcctgtcttttttttgtacccccatatctagcatagtacctggaacatggtgggtgttgataaatgtttattggactgatgcttctgtgaaatttaatactttctcttttgccactggcttttgttttgttactaggtcttcaaatatggattaaggtttccttaatgtctttttttctttttatatactcttagtgattcctctattcccgaggtatcacttatcacttccataaagatgactccaggtccgttttctagtctggctgttctccttattataagaccatttgtttccaaagttgaatgtcagacatctccacatgaatgtgtcaccagtatcttaaatgcaacaaaaaactcagtaatccaaacttatcttccttttaaaatttcttcctatgtgctccatgtctcagttgttctaacccctacccttccggttacctatgctagttggaatcctggcaaatgccctaacttctttcttttatactctccctaatctgtgatcaatgcctatccatcctgcctctgaatgtttttcacgtttgcttccccttcccatctccacttttagtagttttgttatcacttaccttcactattgcagtagtctcttaactgacctcttttctaatctgtcttccgtgctgttgttagaaatatcttcctaaaacacagatctgttgttactgtatgttcatcgcttgactaatttacttatctttcaggtctctgccaaatgtcacttctaaataaagtatgtctgtcttctttgttgtttgtttcatgttcctttcctactgtcatctaatactgtttgtaattgtgtttatatttgtgcattgatttgtttaatgtctttcttcccactggagagatttatgtaagggactggggagagttatgtagaccctgggcctagcacaatgctcgggacatagtaacacttaaaacatatctgttgaatgagtggatggataatagcaaagtacaggcagtgcaggcaaacagatgccaagtagcaaaggcagggaaattacagggtcctagactcttagtacattctcacagaccttaatctgtagtttaaaatagtaatgggcttctctcttttgctttttgcatttatttccctaaggatgagagtgaacaacttactaccccacactgacacttcagtgagggcactgtggaacctttctaatcagaagatgggaccaggcttgacaatgattcaatcaaagcagttttagtgtcacacttgtctcatggaggctatttgtatttctgaagaaattccaatcaaataacagcttactagatttttttcctggtctaaatattatttttgggcattttccacaaaaagctttttgggaaaggtggttcttacactggggcttggaataattgtatctctatgcttggccttggaataattctgtctctgttggaattgtgcacacgttgaggcctgaggccttatcttttatagggccttcactatgtagcttctcatatattcagcatcttaggagagaatcatattcaacatagttttgctttaagctttttacttggtatcagcagttttgccttaagttctaaagcttaataatgaaactctgttgaatgagaacctttccaaaagatatacttttctacataagctgagtttattcatccagagtcatcaagaatagattatatttagaacatatggaatgaataaatattagtgaattcatctttattggacttttaaatttctttacatataattccattcactcatttattcagccatctacacttgagcaactactttatgccaaggactgtagtaaacatttaggatctgaagaaaaatatgacttgattactcttaagaattttataagtctaggctttttttcatgtctgaggccagattgatttttcttttcctttttttcactcaggatgaagtacatagtggtataatcctagttgactgcagcctcgaactcctgggctcaggtgattctccttcctcagcttcctgagtagctgggatacaagcctgtaccaccacaccttgctaatttttattatttattttctgtagagatgaggtctctctatgttgctcaggctggtgtcgaatcctggcctcaagcaatcctcctgacttggcttcacaaagcgatgggattacaggcatgcaccaccacacctggccttagagtgatttttcttaagtgcaaattcgtgctcttttttctaaggcctcagcttggaatgtcctcttgtattacccacctctcttctttcaggactcatctcttaggaaccttccctgtccaaggcagctgagtacccttcagtatactcatcctaccctccccctctcctgttgtggcagttagtaccatgttttgtaactacctgtttatttgggtctccccaactagactgaaaaaggcgcttgaaggcagggctgtttccgtccttgtgtcctgagtgctgagcacaatactgagtacagtttgtgacctatagaatttgtggagggaaggcattttggatggaggctgttggttaagtgacctgcaaaactgctccagtatcatgccaggatcagtcttctttgctcattattgatgagaagcaacactaacttatgtctttattcctaacttaattatactccaagtacacatttgcatgcttcattacatgcctgtagtgatatcagtgacactgataaagtattttttcatattttagttctcatgtttttgactctttattttaactttgttgttgattgaattgagtatttgagttgctgttagtataaataaagtttccatcttggatgacttaccatgttaacaaaaaaaaaatcacaagcagtattatgtgctagtgataccttgtgatttaaaatgtattttgttccagcaaagaaccagtttgggtctctttggagaatgggcatacatctgagttgacctcaacttttctgtaggagagattattgaatctcctataaaggattatatgtaaatatataaattaacatttgtctgttttacaaaatagagtgtctgaaacaagaatacataaaatgttattttcaatgtactagagtagaggagtttggtatttaaaggagttctgtactttggtaaagccaaaattcctttgattacactagtggttggttatttaatcaggatgtgaattcaaattgcctacaaaattttgaaaaaatgcagatgtttggctgactccacatctatcagattgcaatttctagtggtagtgtccaagctcctatatattttgtaccaactacctgggtaatttgatgggttttcagaactactcaactatataaaccaaagaacctcaaaccttaacatatatatgatcatgtgggaccttgttaaaatgcagattctgagtcaggagctctgggtgtgacctgagattttccagttccagcgagctccatgtgatgtccgtgctgatggtgtgtgatccacactttgaacaataaggctataaataataaccatctacattttaaaagatttccttttttttttttcatttaagtgtggtgtatctgtttcctactcttgcttattctataagagaagtgtaatgggctttagatccagtctaaaatagttttggtttggatattgtcttccattaaagtttcagtacgcagaggaaaaaaaaaaaaaaaaaaaaaaaaaaaaaaaaaaaaaaaaaaaaaaaaaaaaaaaaaaaaaaaaaaaaaaaaaaaaaaaaaaaaaaaaaaaaaaaaaaaaaaaaaaaaaaaaaaaaaaaaaaaaaaaaaaaaaaaaaaaaaaaaaaaaaaaaaaaaaaaaaaaaaaaaaaaaaaaaaaaaaaaaa

SEQ ID NO: 28284 - DNA, 7252 bp, Homo Sapiens
gagcagcaaatggtgtcccaaccaagtattgtgactagatcttcagacatgacctgtactccacacaggccagagagaaatagagtttcaagttattctgctgaggcactcattggaaagacatcttctaattcagagcagagaatggggatatcaattcagggttccagagtttcagatcagcttgaaatgagaagctatcttgatgttcccagaaataagagtttggctattcataatatgcagggtcgtgtggaccatactgtggcctcagatatccgcctttctgattgtcagacgtttaaaccaagtggagctagtcaacagccccagagtaattttgaagtacaatcttcaagaaacaatgaaataggtaaccctgtatcatcattgcggagtatgcagtcccaggcttttcgaattagtcaaaacactggccccccaccaattgaccgtcaaaagagattatcttacccaccagttcagagcatcccaacaggaaatggtattccatcaagggacagtgaaaatacttgtcaccaaagtttcatgcagagcttacttgcccctcacctcagtgatcaggtcattgggagccagaggtcactctcagaacatcagaggaatacacagtgtggtccatcctctgcaattgaatataattgtcccccaactcatgaaaatgtccatattagaagagagagtgagagtcagaatagggaaagttgtgacatgtcgttaggtgcaattaacaccaggaacagcaccttgaatattcctttttcaagttcctcttcctcaggagatattcaaggtcgaaacacaagccccaatgtttctgtacagaaatccaatcccatgaggattactgagagtcatgccaccaagggccacatgaaccctccagtcacaaccaacatgcatggggttgcaaggccagcgttgccacgtccatctgtgtctcatggaaatggcgatcaaggccctgctgtacgtcaagctaattcttcagttccccagagatcaaggcatcccctgcaagacagcagtggttccaaaattcgtcagcctgaaaggaatcgttctggaaaccaaaggcaaagtactgtctttgatccaagtcttccccatcttcctctctctactggtggcagtatgattcttggacgtcaacaacctgccacagagaagagaggaagtattgttcgtttcatgcctgatagcccacaagtacctaatgataattcaggtcctgaccagcatacactatcacaaaattttggtttttcttttattcctgagggtggcatgaatccaccaataaatgctaatgcttctttcattccacaggttactcagcctagtgccactcgaactccagccctcatcccggtagatccgcaaaatactctgccctccttctatcctccatactctcctgctcatcctacactgtccaatgatatttcaatcccctattttcctaatcagatgttctcaaatcctagcacagagaaggtaaacagtggaagtttaaataaccgatttggatcaattttatctcctcccagacctgttgggtttgctcaaccaagttttcctcttctcccagatatgccaccaatgcacatgaccaactctcacttatccaattttaatatgacatctttgtttccagaaatagccacagcgcttcctgatggctcagcaatgtcacctttgcttacaatagcaaattcctctgcctctgactcttccaagcagtcctcaaacagacctgcccataacataagccatattctaggtcatgattgcagttcagctgtttaaatactgataaacaaaatgtaaaggtaatgagtgagattacaaatgtatttgtgcgtgcatgtgcacagacatgtacatgaagagaaggattgtgtgtgtgtgtctgtataatcagttttcagttatcttctgaatgtagggaagccatgtcagatgcagatactgggttgtcagaaaacaagttatctttcgttttcaactgcatggtgtacttttttattttccaagtagatttacatttccaagttgatatttcctaaatactaattagctggaaattgggggagatcatcttgtcatgtactgggtagtaggagggagcctagactttaaacttgattgttgataacttatggaatatgtaggtaagttgctactgaaaaatataggcagcttgataaaacacagtggctcataatcaagtgctggctaatgtcagcatctagaacagcttcttacctatgacagatgttgaactgatgttgagtttaatgtccgtagttaaagtcaagcagttagcaaataaataaaagcaatcagcctttattctcaaagtttggtttagatacaggcttctttctaaattataacaatgcataaattatctgaattttatgtcttgttcttcaaattagggagctgtgttaccctttaatgtgccaagattatttaaagcaaaggtcttccttagacaattatttagccgtaaatatagaaagctaaaaagttaagtacatacatattctccgttttgtgcttgcattttgcatcaggtcataagggtaaaagcagttagttgtattgtggagttttgcatgggtgcagttaacaatggatgtttcatcagctgagtttaatttagtattctctcttcattctatttatttggtcttgaaataaattcttttgcattcatttaaatattaggattgatcaggaaatagtgtttgtaatctacacgtttatttgagccttactttaaaaatatttctgaacagagatttaagctctgtcagtattttcatttactgatagcatttatattttaaatatggcattgtatatttcattattatccttcataacagaattataatgagaatatgaatttgttatttttcttgttggtagatgtgaaatggtgcttcaaaaaatatatagtctttctgtatgtctctgtgtgtgtaagtatgtgtgtgtgtgtgtacacatattttaaagtatgaattggtcctttaaaaacaggcctgccatctgaaaatgggaaattgagacctgagacctgctaaagcatagaagaacttgatataggtagggttttttttttttttttttttttaatagatggagtctggctctgttgcccaggctggagtgcagtggcgtgatctcagctcactgcaagctccacctcccgggttcaagtgattctcctgcctcagcctcctgtgtagctgggactacaggcacgtgccaccacacctggctaatttttggtacttttagtagagacggggtttcaccgtgttagccaggatggtcttgatttcctgacctcgtgatccacctgcctcggcctcccaaagtgccaggattacaggcatgagccaccgtgcttggcctaggtacaggtttttaaaagccccacagaagtttataatacgtttaaaaacccatattaaaatttgaaaacttaaaaaaaaaactaagaaaacaatggcatatattccttttcttaaacccgtgaagtccattactttttgttcttgttatattctgccaaaaatgggatggggtgggagagatgcatagaaattgttttatctgccttgttaacaaagtgaactcaaggaccagcttttcttttctttcttcttttcttttttttttgagactctgtcacccaggctggagtgtcgttaggtgcaactaacaccaggaacagcaccttgaatattcctttttcaagttcctcttcctcaggagatattcaaggtcactttgtcacccaggctggagtctacaatggcaggatcttggctcactgcagcctctgcctcctgggttcaagcaaattcttgagcctcagcctcccgagtagctgagattacaggtctgtgccactacacctggctaatttttatatttttagtagagacagggtttcaccatcttggccaggctggtcttgaactcctgacgtcaggtgatccacccacctcggcctcccaaagtactggaattacaggcatgagtcacccctcccaggccccccccttttttttaatcctaaaaagcttcctaagggttggtcagagcagttaactccagtgaatacctcttctaaagactcagcaaaagggtcatttgtgcctctttaactgttcttaccaaactgtcctgtctcttttctgctgccaactaagcagcttcctagggacaaaaaaatatacaatattttttttttttcttgcttacaaagcaagaacaacctgtattttctttcttcaaaatggtcttggggaagaataggagagcttcatgaataagttactcaagacaacagataaacacagtagtcaaaactttttattgaggaaaaatgtggcatttatgacttgctttttaattctcttaactgaattttaagctgcaacgttcaaatttttctttgtacttgaaaggtccagtgtgccaatttcaagaaggacagttttccatgtgtttggctattcatttccctctctccctctctcatctgtctgtctctcactgcctctgtctctgtctctcatacacatatacgcacacacacacacactctctctctctctctctctctctctccagtggctgttaagttctgaaggactggggactgctagacataattgaaagtaaggtaacaggctaaggagaagctcagtttgaacattgcaatgtaaagtcctcaaagcctgtgactttcaagtatttctgttgcattaattgtattttcctgcttagctgtgttcagacatagtatttgcatttcttggagctttcattccaacagtctaacattttgatcttgaaagagtctcaataagccttatttgaccatctgaggaaaaatgtgaccatctgtgaataattggctcctgcttacgtgtagctctcattactttacagatgtatgcatgtgtatgtaagacttcagttcatacatggcttaattctgaaagtgttcagaccatagtacccttatttgatttaaaagcatgaatatatgagatttactagcagtattaagtatttgatagagctacgtgatttttgggaagaaatttgttatatggtatgtagtgttaatttggatataatttttggtaaagggatggcagaaaacatagtcaattttggttataataaacgtaaccttattcttggcctgctccatgtgaaatagggctcagggaagctggtcttttccttagcgggatgattactcctttgccttgaaacatttattgggcccaccatgtatggatcagcatgtggtggtaagtcatactcccaaatcagtgattcccaagtcttggctttgggaaccagtatgcctcgtattctcttaaagagcaacaagaatttcttgaaacaaaattagttcagaattgatttaaattttttaacttctggaaatacacgaagttatgtctgagtcatgagtgacagtcattgattaaatcatttctctgtctcttttttagcattattgatcacagagtcagttataaaaagtggttgattcctttcaacatttaacaataacttctaatgaagggtaaaattccagattctcttcatacgtaaacatttaatgtgtcaatcatagatgaaaggaatctagtttgatgttgtttctttctttcttttttttggaaaacacaagttgctctgggatggcttatatgttgttttataccggttcaggaaatttatttttgtttttattgtaagaccttttgcggtaccagagatggcaccttttttctaggtaaggtgtaggaattcctcaatggtcttgcttcgtaaaatttaacatatcagaactggggaaagagaaaggagggggttatttttttgcagcattttccagtcacatatcagggttatactgaactgcaacaaagatcaacttttaaaaattagccttcttaaaatacaaaatgatttaagtattttaaagataatttatttgccttgctcttgccttctaacattagccatttcatggagaggctaaaacttatactccaaaaaatgtggaagcacattttaatgggagtaaaattaaaaaattttgagaaagggtaaaatcttatgaatatgcatcttcttagctttatcttccctttgataggtaggcacttatgctcttccatctgctccatgtcaaacagggctcagggaagccagtcatttccttagcgagatgattactcctttgccttgaaacatttattgggcccaccatgtatggatcagtgtgtggtagtgagtcatactcccaaatcagtgattcccaagtcttggctttgggaaccagtatgccttgtattctcttaaaaagcaacaataatttcttgaaacaaaattagttcagaattgatttaaaatatttcagtgtgccatatagctctgtcccttggtttggttggccttgttttttcctgtgaagaatgaaagggcaaaggtgataccaaaatgaaacagctttggagtgatatctttaggagcctggaagccatttttgtaattttgttgtctatataaatgctacctttgcctggaggtagtgcgcctgtggctgtgtacatccagagggcaacagtaatagccaacaaccagacaaactagtgaagttaatctgtgagtgatgattttatgatacttatatgcaaattaaaggcagaagttagtttcttctcaagatgcctttttggctgaacattaccatttttctttccccagggtttgaaagaaaagggcctttttggatttaactatattctgtctgcattctattcttcatgcgtaggtttctactagaacctgtggaggggggacaccaaatttagattgagtcagtccatgctgataagaagcgtgaggaccttgttggacacagagcttctagatctttccacctgtagcctctaccctgttcctgcactttacctgaaactgtgcctctggtctttagaccagctgttggaacatatcactcacccactcctctgttatagcaaagggccagctgggatggtacacgctgtgtaatcagacaccttctcgacaagtacagctgatgtttctcactgttgccttaccattctctgagccatctttgatgttgatttgtaaaaaaaaaaaaaaaaaa

SEQ ID NO: 28285 - DNA, 6328 bp, Homo Sapiens
agctctcttttctcttccattggtttattgatctttcactaacaccatgctgacttgattactgtcgctttatagttaagtcttggaaatgggtagtgtgagtcctccaactttgttctttttcagcattgcgtatgctattctaggccctttgctcctccttcactgaattttaaaatttaaaaactaaaataaaaatggttaatcctcagagatgcactataaatgtgatgtttctttaattcatttttcaggtggttctttgaagctctgaagtatcccaagttttctaaagctatcgttatcaatggaatactcgtgacagtagtattcttcatcgtgcggattgcctcaatgcttcctcattatggcttcatgtattccgtgtatggaacagaaccctacataaggcttggagttttaatccagttatcctgggtcattagttgtgttgttttggatgtgatgaatgtcatgtggatgatcaaaatttcaaaaggttgcatcaaagtcatctctcacatcagacaagagaaagccaaaaatagtcttcagaatggaaaacttgattaaaagagtgctaccgataagcaaacttcattactacccagcatatctgctgataggatgaattcttggcatgttcttgtgtacctttcttaattataattgttattcaggatttcagtgtcattttttttaaaccttagaaaagagaaggccgggcacggtggctcatgcctgtaatcccagcactttgggaggccaaggtgggtcgatcactgaggtcaggagttcgagactagcttggccaacatggtgaaacctcatctctactaaaaatacaaaaaaaagtagctgggcgtggtggttggcgcctgtaatcccagctactcgggaggctgaggcaggagaatcgcttgaacccgagagacggaggttgcagtgagctgatattgtgccactgcactccagcctgggcgacagagcaagactctgtctcaaaaaaaaaaaaaaagagagaaactaaaattaaaatttagttttcatcccaagatgtcttttctgcctttcttttgccttatttacaagcatggataaaaatcttaaaggtttaaataaaaatgatcaatataatggtgaatcttttgagaaatctcttaactgcattggtattttttctctgtgaaagatgactatgataatctggtacaaatggttttatgtcaccaattttgctgcaagaatgggaactgcttttaaatctgtaaatagctcttaacatttgttgtatgcactcttttcttactatggctgtcaacacttgtgtagggtttaatttctaaattgttggcatgttctttttctcaggctattcagaagtaacaacatttttcatttcagacatgcaatcacctattaatgatgaaatattttaccactttgggaatatttaattagtttagtcatggagaatacttcccacattttaagatttttcaaatatcactgtcatttctattttagcattttatcaaattattgcttttttattttataatgaggcttaagacagattatagacctccttaagagatgagtttcttcttctaaaaatgcatgttgatagaggactatttaggctaatcggaggaatcattaagaaagaaagttttaacactgtttatccctatctgctttccttgcactttttctgtgaaaaatattttctgtttgcaaaatcttccctgagttctgaacccagcaccatcagtaccaaagtcttatgcaatatgtatttattatgctcctgaaataggcctcttcttgatgagacccaaactattacaaaaatatcagtattcatattttactcacaattcatacccgtgcttacttagttggcattttagtgctttgaatttctatcttaaagcacagaaaaaaaaaaggtaatttaatccaagtattctatcatcaaaattattgtctgattatatgaagataaatgactggcgactctggttgtgtgtgtatgtgttttgcttttactttaattcttgcaatccaaatatagaattatatatttatctattattgcctttattctttaagcacttgagtttaatgattattcttacctgagaaaggaagaaatttaattctaccagtgatgaatacttgaaattaattgaactcataccaaaagatgtaatccagtttctcagtttgaaggagaacgtttgactcactttcattgttcatgctagctgaatataatcaagacttttgatttgatttgcttttattattcaatgcagatagagcctgataagttttagaacatttaaagaagattgaaatctcagtcagtaactaaatgataaaatgagattgattggcttatactaggtacatttatttttgaaagaattaatgtaaaataatagttatttttaaagcagctaatattacactgataatttgttgctaaatttagtgctgtccacatcataggtgcttaaatatgtactggttaactagaggggggtaggaaagcaagcggttttatcttgttcttacctttttgcaggaaaagtggctttaaaaaaatttatataataaaactattttggaaattcattcttttagaaagagaccttgagataaatattttttgactctggatatttctatagttctgaacacagattttaaacccactatcaaaatgaaaacaatataaagctatattagtgagtctccatgtagcagtttgtttttatagttactgtttcatgcttaaaacttcattcttactttcattaatgttacccttcactggtatagccactcactaaataagtatatttaaaacatcaaaattttgaactaaagtttgtgattctcttattcagcaatccttatcttatgctggctgcatgagttaattcaacatccagattaaatatcctgaagtaggttctatatatttcctcatacaacagacatggaatggaaatgccactagaaactgccctgctacttttaagtctgacctttgcaggaggtacactttgctgttctatgattgtattcacctacctaaaatacaaatgaagacagaacatatcatttactgcacgatgaatttttcatttattaaatgaaaaacgtttgctagacattttaaatattaagtattttgactacacggattaatttaaatgattctatcaggcattctgatatttaacaactctattaaaatatttatagaaaaataaaagcaaattgatataaatttttgagcaattctatttttgtagaaaaaagataacctgtaattataaagatgttttttgaatgtgtagtatcctagaaaataaaagttcttgtgaaacttaaaaaatgaatgaaaaccaactaatagcatgcaagatcatagatcctgcattaaatttttatttgtgaaaatttgaaaattatgagctataacttataaagtttgccttcttatgtctaaaatcttttaaaggattatttgcatttatgtaaaactggaaatgaagttatatatgagtgcaaagaaattgacttctgctcaaatatgtgttgataccctacagtaaattgaattaaatttttatcccaactgtttgattttattatttcatggactagccttacgttaagtgaaatactatttatgttgttaccacccctaagagtgactctgatatattatggatgacccaggacggtcttaaaggtctagttttaaaaactgcctagtttgtaagtatttgaatccagttcttttctaaattttaataatttgactcaaaatttttgctacagggtcaacttttaaattgtatatttcctctgaggcacactgggcatttggagaatggttcttcactggtgtagagagccaggtttactgttggttgcaccatctgttatcaggcatgcagaaacatttttcttctggagaaacagaggggaaggtgttgttacagtgtacatgtttcctctgtgtcgtttttaagggaaataaacatgttccaaaagatgctgttaaaataaatatttgaacacgttttctgtttctaggttgctcttaattccaaacatttaaataaatgtgcatttgaatagctttaggtggtttagtctattagctgaaatggaaaagttcatgtattgacatcatcaataatacttcataaaggtttatgtatttttatgtgtttggattccataagaagttgaacttagataattttatcaagagtagcacagtgtttctcaggtgcgagccagcatacagcgagacccttcatgtgtctctggatgcacatatatcttcccaaccttaaacacagctcattgaaatacattaaagctactgaaagtgagttctgatgcaaaacacatgtgaggtgtgtaggaacaatgaaaagctagaggatctggagttagaggaggcattgagagtgcttttcccttaaacgccgtgatagtcctcccttgatctagaagtattctctttgaatccttccatctcttcctcctggtacaccagatgacttcatcagcatctccctcttttgtgctaacacctttcgctgtcaacttttgagacctccccatgtatctataagcttcccagtctcttatggcaaatttaaaagtttacaaataggttctctcgttgaaaaaaagcattgtagtaaagtttaaagtggagctcagacaaatcatgacttattaagagactacaggaagccattcagcatttaataataactgtttacaacatgaggcaaagctaataatgttatggttttattaagagatctgtcatctctgtttttcttaaactggtttaacagtcagagctttgtaatgtgtttcagctgaagatttattataggcttgtaaattatctaaatgttctttttagaccccatgacaggagcacagaggaactgagataactctgtgttatgagagggtggatgctggcttgtgccaaaattattttagagtcctgctctttagggaaaactttgctatggtaatgtttctttgaaaacaaatttaccagcaactgcgttacttggtgttttccaaagtacaacatccaaggcttgaaccttacccgtttctaggccagactaggccagcctctagttttgataataattcatacctttattggaatatattttggatagcagtgaagaattgaaagcagctcctaaagattggtttgtttgctttgaaaatgtttacacttattcactctaagcagtggaccattttgatatcaggccctatacataagaccaaaaccagaaatatttctaaatctcaaagatttataagtacagtacctctggctgaaaactcgttaaacatctttggatattttttctttatatctttatgtaattatttctgtaattaagtgtacattagggttatttgctacttaacaagcctaaaggtatagctgtatatagaatgtgctctgtgtttttctgtttcctgcttggtttgtttctggtatgactatgtctactttttatttaaggaattttgtgtagataatactctcactaacttgtaaataggataagttatgagattttttggtattagaatttgtaataataatgacttttagattttatttgaaaaagctacttggaaagcagtaaatagaactatagtgatatatatagatacatagatatatacttttttctgagaatgtataatatataattgtcaaagatttttggaagtctttcaaaatatacttaataccatcttgagaacataccttctaatttatttccataaggctgaagaacttttatttacaaaatgtaagactagataatgtatgaatcagtgttactaggacttatcagtacttaaaatagcaacttggcattctttattttgtttcctggttgttttatttggagggataataaatgtctaagttatttccattaaaattttgaaatgtttgtatactttatgtgtgccattttaaagtatatgcaagttctaagcaataatctgcatgttatacaaggttgacatattttgtcctgaaatttttagttaacatttcaagaatgataaaatgaacaccctgtaaattacccttctccccctcccctccatgaaaaacttgggattttcttgtgctagaacactaccacaatgtggtgcaaagctttgtattttgtggaaaaaaacaataaaatcacaattatttagtgtaaaaaaaaaaaaaaaaaaa

SEQ ID NO: 28286 - DNA, 4973 bp, Homo Sapiens
cagaaaatgttatagacatagtgcttttacctaagagcttgacattaagagagataatagcatttaccgagacaagaaaaggaaatatggatgacaatgagatataaacagtacattgacagatcagaaagacaaacatttctcaaaatctccattgtcattttcagcttggaggtcagcacagagggcccccctgctccttgaatgagatccattaggagttttggaagaagtgccagccttctggtgtttccagatcactgcctggcaggaaacagtttattattttgagaaaattacttatttaataaatatttgttgatctactgtgtgccactcaggttataagaaacagggctgtgaataagacgaagtccctgcccttagggagcttgctttctagtggcaggggacaggcagtttacaaataaaaagaaatggaaaaatgttcatatgatgtaagtaccatgtagaaatataaagaataaggaggacgtttttgtaaggtgttcaggaaagccctcgttaataagatgccctctgagcagagaaaaagaaagaaccacgtgtttgtattgggaggaaagtgaggtatcgaggctcagctggaagaaacctgcaataactcctctctctagccatcctgtattcagccatcacgtctgatctagcctaacaagtgggtaaaagacaaattacaagattactcaggtcaaagggtctcttattctccagtcagtgccatactggaaaagtaattttatcagctaccacttattgagtgccttgtatgtcaggcattgggttgggcattttgcagcagtccaagtcaaatttttattatttccttttctctaatagggaaactaatgcttaactgaagttaagtgactttctcaggccacatggctttgaatgatggagccagaatctgaccttgggtcagtctgactccaaagtccctacatgttgttgcctcttcaagagggtaaggtgcctgggaggacaacaacatgaatgcattgttattattattagtagtaatagtagtatttgagacaggatctcactctgtcacccaggctggactggagtgcagtggcttgatcttgggtcactgcaacctctgcctcactggctcaagcaattctcccatctcagcctcccaagtagctgggactatagttgcgtgccaccatgcccagctaattttttgtattttttgtagacatgaggtttcactatgttgctcaggctggtctcaaactcctggactcaagtgatccacttgccttagcccccctaagtgttgggattacaggcatgagccactgcacctggccatgaatgcattattattaaaatatcctcagaatgtgacaaatgttaatgttcttaatttaatgagaatggctgagttgttctccaggaaaagtcagaataacaaatggctaccagcctctgattggattcactgaaagatgcaaggttttgtaccatagagaagtagaaacgtggttattagctagtacatttggaatctttgggccactgatccgcataatccatcactccattattccttcaagtgagaaatatttgctttggccacagtgcttttatatttttaaacttttgtgtaggaatgctggttcttctatgcaaatattgccagcccactattttgaataaaaaccacccagttcctttcaggagcattggaaatatattaaaaattttctggctcttaaattttccaccagtgtgtactcaaatagataggattaataagattaatatccattactattcatccagaattataaaatttcaacgtatctgtattttcaatgatgaaatttagagtatttctgtccatctaagacacatcagagtccactagggtgctgactcatttgaacatcaacatatggaaaagtgatcttcagctgggataattagaaatgcagcttttactctttatgccacctctttctataacgttttggtcctacactttgaactaaccttgcggagaaaaaaatgataatgaagtgaagtacacgtataatgagtatctgttaaaataatagctctggaaagaaactaaagtttaatgcaacacaggaattttccctactttttagtggattcacattacagctggtcttaggtcgtggcctgggtggttgtgagttcttgatgtcaatgccgtatgtttaagggggaatatcaatccgatagccattttctttactcatgtgtgctatgcatttattgttacactgggactcagctttttttaaaaatgtaaatgtctatgtcaaaaaataatcttagatttttcattgtcttgatcaaatcatggttagctttggagaatggatgattttgtgaaaattcataagggaaaaatgtctatataaacggactgcaccaaacttcaaaatacttttattcctttgttgttctccagtttggttttggtagccttattatgactctttattgatgatgggtagtcatatatattttatgtttctttcacttgcttctcaagtaatgccccccctcctccgtctattctcaggaaatatgaaactaactctcagagggtttctgttgaggactagataagaattatgccttggattatttatcctttattcacagctcacctactttattatttttctgatctcatgtattatttccatttccactcatctcattatgtttctaagggaactttgggtataaagatacttgcaggtagttagagatgttaattccatatgtataagagcagcaattagcatcaagagctgtttctagtaggaggaaggaacttgggtccttgtaggcaaatgaagagagactcatttcaccactttcccagaagtattttgaggtcattgtttttgtgtgtatgctccctaatctatccattaaatagaaatcagaaaattatacattaataacatatttgacaatacaatgagaatctagaggggaaaaaatatgttccttaatttaaccagtattgatggttaaattacttatgtttggtactagcatatttggaaattaaaaaaatagcacccacggtttctgtttaggatcttgctttggatacaaaggttgcacatgtggagtcattagaaagcaattggaagcagtgcagagacgcgaggagataaatctctatgctggggataagtggactgtagagataagaagtcatcagagggaaatgctgtcaggtttgcaggaaacacagattagcgagacgggtgagaatattaaagattgaggtaacatgggcaagagcacagaatgggaaataagtgatgtgtgagtgggtagttggtaggcatgtatgtagtcaggcacgaaaggtacagaaatttggttttgccctgtttgctcacaaccaagcagggagaagaatatacaaccccctaagtatagtaccagtggtaaggacagaagggaagagccaaaaagtcctctgctggacagagtcagggaaggatcctcaaaggaggatgtaatatttgcaggatgaggcagggactttggaagggtatagcagatttggttggatagaagtgagatctctggtgagaaataacgttcaatgtactttaaaatctagtatcaattatttctatatttaccaaaacacctactactttaggagacttgattgcacagttgctttggggcttcatatttcaaatattggtgaaatttgaatcattaagagtgatagaaaaataattttttcaaaatttcatctcccaccatttgctttttcttttcaacaaaatttactgtgattttttttttacacataaaattgaatggataaggcaaaacggaggaaaagacaaaattcatagtggtaaatatgctatattatttatttacatattattttcttctaaaggggataacgtagctaattcttttagtactgttatggaaattagctcatgtaaataatttataaaaggtgatactatatacaaatgtagcatatactatagcggtagtatatacaaataggtatatacacatatgcatatacatatatttgaatggggcacattatatttgcttgtagtctctctcatcactttgtactgcaccatcaaaaatttttctttatactattagtcctttggaaacacagttatcaaagtaaacaaaaatagatggccttgactgcataacattatatggatttaacataaattttatattatgtacaatgacactattaaatgtgttaatacaacacataaaatgaccaattctctttaaattttagtgtttagcatatttgttttgattgtacgtgtgggagctgtgagaacagctctgcaaaaatactttgcaagttaccatagtgactaaagtgtagtgctttatgatattgtctttcccctgggtcttaattcagttgcgtgctttttaaatcataatctaatagttgacgtttaaatttttctatttttaaaaaactgtatacacacatacaggtttataactttacttaaatgtataatttgattatattacgcattcttcaagtaaaatgttactttttcctttctctttttgctgggttcccagaactcttttttctcctttttcttccccctctcagtgatccatgttgacaaatgatatcttttaaattttttcctctattttcatacaattatatacagacctatatatgcatgtacaaaaataaagcaggatttttataagcaggatttcatggaaatagttctgaattaattgatacgtaatagttcctatttattccttttaatggcttcttaatgtttcatgttgtaaatgggtcataatttaatcactttgcttccattttttgttctatgaataatgctttaataaatatcacaatacctatgtccacaaaaaaaaaaaaaaaaaaa

SEQ ID NO: 28287 - DNA, 7037 bp, Homo Sapiens
ggagcggggtgtgaagatggcggacgaagaggccgagcaggagaggttgagttgcggcgaaggcggctgcgtcgcggagctgcagcgcctgggcgagcggctccaggagctggagctacagctgcgggagagccgggtaccggccgtggaagcggccaccgactactgtcagcagctgtgccagacactcctagaatatgcagagaaatggaaaacttcagaagatcctttacctttattggaggtatacacagtggctatccaaagttatgttaaagcccgaccttaccttacctctgaatgtgaaaatgtagccttggttctggaacgcttggcattaagctgtgttgaacttttactgtgtctgcctgttgagttatcagataaacagtgggaacaatttcagacactggtgcaggtagctcatgaaaagctgatggagaatggcagctgtgaattgcattttttagctactctagctcaagagactggggtgtggaaaaacccggtactgtgcactattctttcccaggaaccattggataaggataaagtgaatgaatttttagcttttgagggtcccatcttgttggatatgagaattaaacatctaatcaaaacaaatcagttaagtcaagcaactgctctagcaaagctgtgttctgaccatccagagattggcataaaaggtagttttaagcaaacttaccttgtctgtctttgtacatcatcaccaaatggaaagttaatcgaagagatttcagaagttgattgcaaagatgcactggaaatgatctgtaacttagaatctgagggtgatgaaaaaagcgctcttgttttatgtactgcgtttttgtcacgtcagctccaacaaggagatatgtactgcgcttgggaacttactctcttttggagtaaattacaacaaagagtagaaccatctatacaagtgtaccttgagaggtgtcgtcaactttctttgttaacgaaaacagtatatcacattttcttcctgattaaagttattaattcagagactgaaggggctggacttgctacctgtatagaactgtgtgtaaaggctcttcgcttggagtctacagaaaatactgaagtgaaaatatctatttgcaagaccatttcatgtttgttgcctgatgatctggaagttaaacgtgcttgtcaactgagtgaatttcttattgagcctacagtagatgcgtattatgctgtggaaatgttgtataatcagccagaccagaaatatgatgaagagaatcttccaataccaaattctttacgctgtgagctgttacttgtattgaaaactcaatggccctttgatccagaattctgggattggaaaaccttgaaacgacaatgtcttgcattaatgggagaagaagcatccattgtgtcttcaatagatgaactaaatgacagtgaagtatatgaaaaagtggtagactaccaagaagagagtaaagaaacttctatgaatgggctttctggtggagttggtgctaattctggccttcttaaagacattggtgatgaaaagcagaagaagagagagataaaacagttaagagagaggggatttatatctgctcggtttaggaattggcaagcctacatgcagtattgtgtgttgtgtgacaaagaattccttggtcacagaatagtacgacatgctcagaaacattacaaagatggaatttatagttgccccatatgtgcaaagaactttaattctaaagaaacttttgtccctcatgtcacactgcatgttaaacaatctagtaaagagagactagcagctatgaaaccattaagaagattgggaaggcctccaaagatcacaactaccaacgaaaatcagaagactaatactgtggctaaacaggagcagcgacctataaaaagaatagtctctattcaacagattttatagtgtttaatgacaatgatggttcagatgatgagaatgatgacaaagataaatcctatgagccagaagtgattccagtccagaaaccagtacctgttaatgaatttaattgccctgtaactttttgtaaaaagggctttaagtactttaaaaatttaattgctcatgtgaaggggcataaagataatgaagacgccaagcgctttcttgaaatgcagagcaaaaaagttatttgccagtactgcaggcggcattttgtgagtgttactcatctcaatgatcacttacagatgcactgtggcagtaaaccatatatctgtatacagatgaaatgtaaagctggttttaatagttacgccgagcttttaacccaccgaaaggagcatcaagtctttagagcaaaatgtatgtttcctaaatgtggaagaattttttcggaagcttatttactatatgatcatgaagcacaacattataatacgtacacttgtaagttcacaggttgtggtaaagtttatcgttctcagggtgagctggaaaagcatctggatgatcacagtactcctcctgaaaaagtgctgcctcctgaagcccaacttaattcatctggagattccattcagccttctgaagtgaatcagaacacagcagagaatattgagaaagaaagatctatgcttccttcagaaaataacattgaaaacagcttactagcagatagaagtgatgcttgggataaaagcaaagcagaatcagctgtgaccaaacaagaccagatttctgcctctgagctcaggcaagctaatggaccattgtcaaatggtttggaaaaccctgctactactcctctacttcaatccagtgaagtagctgtgtccattaaggtgtctctcaatcaggggattgaggataactttggaaagcaagaaaactcaactgtggaaggcagtggtgaagcactggtcacagacttacatacgccagttgaagatacttgtaatgatttgtgtcatccaggtttccaggagagaaaagaacaggattgctttaatgatgcccatgttactcagaattctttagtaaattcagaaactctcaaaataggtgaccttaccccacaaaacttagaaagacaagtgaacaacttgatgaccttttctgtgcaaaatcaggcagcatttcaaaacaatttaccaacttccaaatttgaatgtggagataatgttaaaacatcatccaatctttataatttacctcttaagacattagaaagtattgcatttgttccaccgcagtccgacctaagtaattcattaggaactccatcagtgcctccaaaagccccagttcagaaattcagctgccaggtcgagggatgtactcgaacctataattcttcacagagtattgggaaacacatgaagacagcacaccctgaccaatatgctgcatttaaaatgcagcgcaaaagtaaaaaaggtcagaaagctaacaacttaaatacaccaaataatggaaagtttgtttattttttgccatcaccggtgaacagctcaaatccattttttacatcacagaccaaagccaatgggaatcctgcttgttcggcccagttgcagcatgtctcgccacccatttttccagctcatttagcaagtgtgtcaactccattgttgtcctcaatggaaagtgtcataaatccaaatataactcctcaggataaaaatgaacaaggtggtatgttatgttcccaaatggaaaatttacctagtactgccttgccagcacaaatggaagatctaaccaaaacagttctgcctttgaatattgacagtggctcagatcctttccttcctttacctgcagaaagtagttcaatgtctctcttcccttcaccagcagatagtgggactaattctgttttttcccaactggaaaataatacaaatcattattcctcacagattgaaggaaacactaattcctcctttctaaaggggggtaatggtgaaaatgcagtttttccttcacaagtgaatgttgcaaataacttcagtagcaccaatgcccaacagtctgcacctgaaaaagttaaaaaagaccgtgggcggggcccaaatgggaaggaaagaaaacctaagcacaacaaaagggctaaatggcctgcaattatcagagatgggaaatttatctgtagcaggtgttacagggcttttactaatcccagatcactgggtgggcacttatccaagcgatcttactgtaaaccactggatggagccgaaattgctcaagaacttctacagagtaatggacagccttctcttcttgccagcatgattctctccacaaatgcagtaaatttgcagcagccacaacaatctaccttcaatccagaagcatgttttaaagatccatcatttctacagcttcttgctgaaaatcgctcgccagcatttttaccaaatacatttcctcgatctggtgtgactaactttaataccagtgtcagtcaagaaggtagtgaaattattaaacaggctttggaaactgctggcattcccagtacatttgagggtgccgaaatgctttctcatgtttcaacaggttgtgtctctgatgcatcacaagtaaatgcaacggtgatgccaaatccaactgtaccacccctgttgcacactgtatgccatccaaacaccttgctgaccaaccagaataggacgtcaaactccaaaacttcctccattgaggaatgtagcagcttgcctgtttttccaacgaatgacttactactgaagactgttgaaaatggtttgtgctctagttcatttcctaattctggtgggccatcacaaaattttaccagtaacagttctcgtgtttctgttataagtggtcctcagaacacaagatccagtcatttaaataaaaagggaaacagtgcttctaagagaagaaagaaagttgctcctccactaattgcacctaacgcttcccaaaacttggtaacaagtgacttaacaacaatgggactcatagcaaagagtgttgaaatcccaactactaaccttcattcaaatgtaattccaacttgtgaacctcagagtttggtggaaaatctaacacagaaattaaataatgttaacaatcagttatttatgactgatgtaaaagagaatttcaaaaccagtcttgagtcccatacagtgttagcccctttaacattaaaaactgaaaatggtgattcccaaatgatggctttgaattcatgcacaacttcagtaaattctgatttgcagatttctgaagacaatgttatacaaaactttgaaaagactcttgaaattattaaaactgctatgaattctcaaatacttgaggtaaaaagtggatctcagggtgctggtgaaacttcacaaaatgctcaaataaattataacattcagcttccttcagtaaacactgtgcaaaataacaaattacccgattcttctccgttttcctcctttataagtgtcatgccaacaaaaagtaacattcctcagtctgaagtatcacataaggaggatcaaatacaggaaattttagaaggcttacaggaattaaaattagaaaatgacctatccactccagcatcccaatgtgtactgataaatacatcagtgacactgactcccacgcctgttaaatcaactgcagatatcacagttattcagccagtttctgaaatgataaacattcaatttaatgacaaagttaataaaccctttgtgtgtcaaaaccaaggctgtaactacagtgctatgacaaaggatgcactatttaagcactatggtaaaattcatcaatacactccagaaatgattcttgaaattaagaagaatcaattgaaatttgctccctttaaatgtgtagtacctgcatgtacaaaaacatttacaagaaattctaacctccgggcacactgtcagttggtgcatcattttacaactgaagaaatggtaaagttaaaaattaaaaggccttatggaagaaaatctcagagtgaaaatgtgccggcctcacgaagtacacaagtgaaaaaacagctagctatgacagaggaaaataaaaaggaatctcagcctgctttagaattgagagcagagacccaaaatacccacagtaatgtagcagtgatcccagaaaaacaacttgtagaaaaaaaaagtcctgacaaaacagaaagttctttacaagtgattacagttacttcagaacaatgtaatacaaatgcactcacaaacacacaaaccaaaggacggaagattaggaggcataaaaaagaaaaggaggagaaaaaacgaaagaagccagtttcccaatcccttgagtttccaacaagatacagtccttacagaccttatcgatgtgttcaccagggatgctttgctgcctttacgatacagcaaaatttgattctccattaccaggctgtacacaaatcagatctacctgcattttcagcagaggtcgaagaggaaagtgaagctggtaaagaaagtgaagaaactgaaactaaacaaactttgaaagaatttcgatgtcaggtaagtgactgttctcgaattttccaagcaattactggcctaatacaacactacatgaaacttcatgaaatgactcctgaagaaattgaaagtatgactgcttcagtggatgttgggaagtttccatgtgaccagttagagtgtaaatcttcatttactacatatttgaactatgttgttcatctagaggcagaccacgggattggactaagggcaagtaaaacagaagaagatggtgtatacaaatgtgattgtgaaggctgtgaccgtatatatgcaacccggtcgaatctcctccgacacatttttaataagcataatgacaaacataaggctcatttgattcgtccaagaagattaacaccaggccaggaaaatatgtcaagcaaggcaaaccaagaaaaatcaaagtctaaacatcgggggacgaagcacagcagatgtggaaaggaaggaataaaaatgcccaagaccaaacgaaaaaaaaaaaaaaaaaa

SEQ ID NO: 28288 - DNA, 3510 bp, Homo Sapiens
tgctactaaagcaactccattgggctgcattaagatgaacagagtgctttttaatgatgaaagcagggagctcctttccatttgcaacttagcctgaatgtggggtttctctggctgttcttttgacctagcagtagagtggagcactgccaagtccaaaaaactagagcaggaggtacctcttggagcaacggtgtgtttatttctgttttttttttttttttaagtgaatggccaccaggcacatctgagtatctgttaagtttcatgcaggccttttcgttagtttgaaatgggaacggaagataacttttgatgatgcgatgtctcaaaaacagagaaactttgttccctctttccttatgatcaggtttgagaaattcttcaaaaaattaggtgaagttgagttacatatttctgttggttggttctctttttcattttatgaaaacagaaaagaataagtggtgagcagcctcctgaaagcatctgcagctactccctctgctcctttctcgccgagcgttacctgtgccaggccgtggcgcgttacagcaccaggccatcactgacagaaacgtttacttaacgaatgttcttaaaccagtgtgtacttcaggcgtttccttttgtttctctgtgttgtgtatttcctgtgtatgtggttttgcttaggcaggtataacttagcgaagacttttaagtattgcacctttttttgatttttgacctcttccccccaccttgtaattttgcttttttaatttcggtatttaaatacttttttttttttttaagcatcaatgtagtagtactctgggccgaacaggggtcaacgtttaatctacagttatcaccaacatgtatgtacttatgttggaatcaaaatgtatcaaactgcttattgtgaagagaattatagcagacctgaagggggcgaaaaaccagatagggtggggggatggatgccggtgacgtgctagcacttgtgtggacatcccagtctgcattatgctgtttaacataaagtgccgacattttgtaccagcaaatacctgcccattccaacccttggtgggagcagacctctactgtcctctgtaacttgctgctattgaggacaagggagtttttctttctttagcgtcttcagtgaaggatacaatacaacaatgcctaatgtatttgactttttagcttgtgtctgtgtgtataggaaaagcctaaaacaagttatttgcatttcagtggttttgtgagacaaagaatgggaaattctgtagcccttctggcttaccctgttgattataaacctagcctcaaaagagattgacaggcatgactcaagtgagtgttcacatatacaagcctgcatgagccctctgtgggtaggtggtcacacttggcatctgcagcattgacgtggccccgctgggtgccttgagcatgccctcttcctgctctgcaatttgaatcaccaccgtgccccttccaccactgttccccatgcaaaagctctgcttccagcagcccccactgaccgctctctgtgtggagcaaagtgctgtcgtgcggtgaccaccaggtgaagagcagcttgtattcagacatctagagaaggttaaatcttagtgtccctgggccaggagcatatcccaaggctcctgcgagccagtggcgaccctgtccactgccgctcttggttcactgctgtgtcctgccccaccctcctctcctcctgcctgttggttccttgacctgcactatgggttagttgagttccttacgatactacggtgaaagccgggtgctagagcccctcttgtttacaagacataatgagggatttgaaatatgtaaaaataaacatgagaagctaaaatgttcttccatcataagcttaaagggaaaaaaactaaaaactttaaaaaaaaagaccaaaaagtgcgtatatatatacatataaatatatattttagatgaagactaactctgggagcatttaacagtgttttttgtttctgtttttaacatttgttttcctgctttaaaatttgcaagcattctcaggaattctagggtaggaagccagttttttgaagatggtttatttaaccatatcttatcctagagagatggctgtttctttcctgttaataaacttttacaagttcctgaaacttcagaaagtttaaacaatttttacttaaaaaaatgtaaaaagaaaagtctccaaacattattgtcatactggggatcacacattttaaaacacatagaaatattttttaaaaattatcaatttagcagcaacaggtaaattcattatcttaaaaatatgggagaaggattaagctttgtaagagctcgatcatggattcttttgaaattgtgtgtagtttaatgggagagtgtttggtgtatatagatgagaatgccatcactttgttcctttccatttgagactgaactgaaatctcccctagtaatttttatttttttaaaggaacccttctccttgtccccacaaccccagcaacaaaagaaaggaaggaaggaagaaacaacagcttaaaaaaaaaagtaatctgtaaaatagtacagttggattgctgagaatctatgtaaagagttaggagatataggttaataatttttggaacaaattttaaatataggcattactagaggaaaattatctatggactgtcctattaatgaagaatgtctgtcttacctccgtttgttttgggaggaggagaaaatatagaagaatctaataaggaacaagtgattttacttttttagctcccagctactgttgtgctcgttttaattgctgttttgaagatctgctgcttaattatccccatcccttagccggagatgtggagtgtttcctttcagtttttggtgatgttgaattcttttgtattccctcctggggccaggggtcagaattcccaagcatgaccacagcttcttttaaacattaagcttcccagtgggaaggaaactccagctcgacaggtaaagggagtgggtggggttgctgcctgcaatttctctaaaccgctttagtgccttcgtacatacacccagacatcctgagcaagggggacgcacatgtgtgtgtgtgtggtccagtcactccacagatgtaagatactcacccataaaggaaattggagtggttctggacaggccccaaaggcagtgggctgaatttaaaataaataaacaaacgtcaagcaagttaatatgcttatgtctcagtaatgtagaatgccaagttccttcctgtgtcgtgtgccctccattactgtgcattgattcctccaggtgtgtaattgtgacaactgcagtgatttggaaagtctctttgtcttgggcaaatagaaggggttcctgttgttctgctcttgtccttcgtctcccagccccttgcaccctcattgctgttcagattaaagcctctgttttgcacctgtaaaaaaaaaaaaaaaaaaa

SEQ ID NO: 28289 - DNA, 4082 bp, Homo Sapiens
aatggtggaggataatatgattaaagggaacatgcttgtgtttatttttgttggtagtatatgattagaaaaactagataattcccataagatgaagatcttccatgaacaaactaccatcaatcatccatcagattgattttttttttttttttaagtaacactaaagaagctgtaaagaacattgaaggtggtcattccttcaaaactgtgttttgaccacacaaggtgggcattaacaaaccaaatttcaacttaagtttgtttgtattatattgggggtgctgcgagactggagattttataaaagcaagcatttttatttccatttataatttctattcaatattgctagatatattaacatgaaggaatggggaagcttatttcaatcaaagctaaaattttcagaagtctgtaaaaatggaaaaacaccattgaaagaggcagaaacaggtaagggggatagtatcttagaaaacctgttggttaaggcagctgcatgtgataaaagtggtacttgaacttggtagtgtttccttagaacctcctccaaaaatatgcatttaccaggcttgttacaattttttgacagtttttcatcaactgtcaaaaacttcaacccttttaaaacctagatataaatgcttacatgtaaagaaaggaagctaagcagtgggtacctgggatctctctgaactatttttataacttcttgtgagtcttaagtatttcaaaataaaagtggttttaaagtaaattcatagattaaatgtatcattatctatatataaaccatgatttaaaactttaattttctaaacatagtattcaacttagttgaataaatatatgatagaagttaaatagaatttttatttcattcttaagaaaaactcatgtttgtaacaaatgatatctaaagatctattttgccttaccagaaaagaaaaaaaaaaccctaaaaccaaaaactccttttccctaggaagtcaaaaatgctgtgttttaaaatatctaattatatttttttctttctatggtagtggggtttacttctgaggataaaatattttgaaaaagctctgtcccttgacatggtagttctcccgtgccttgtacttgttctctctccatatgcacagtgtgacaagatgctcacctttaatgaagaaggtgtagcttttcgttttaagctgtaattgtctttgtcttgatttggctatttttataactgaaatcctgagcaacagagataatttgggtggtaatgatcatcttttgtatatgttcttgatgttaagaaatattttttgctgccattcagctttgtggaatttatgtttacttttcaatattttcatatttcttaaccagattttaaagaaatttgttgttagttacgtgaaatcaaaggtcaggtcagtaagcccattatcctcaaacttgaagtttcgttggatgttcaaaatgctaatttttgcagagatataaggataaattagttttagtttgtgttcttaagggtttgcaaaataatttggctcccaaactcttgttggggtgtagtgtttgctaggagcccaggatacctgccctggacttaaattgtgattgaagtggagaggtactctaggaatttaaaaagacacaaaattatttttttccagactagtgtgccatggatttctgataagaattaacattcttgaacaaaggtatcagaaagggtaactcgagttgaaggtttgtgaatagaaggggaaatgtgatagaagattattcagaacaaaataagtagacaaaataacaaaagacaggaaaataagtctctttgtatccttattaatcatttgaaattatgctataatattttttaaaactcacctgtttggttctgggtgaagcagttcctgaaggagtgttttgtcagaatatattgttaggagaatagagggttctgtggccaagtaagtttgggaaatagtgggttagacaaagttgagttactgttggcctttcagacctttgatacgctaatgtgcattttaaatctccaagaagcacctctattttatacatcatttccctaatttattttaatatggatttcttgtttttgttttcttgagacggagtcttggtcttgtcacccaggctggagtgcagtggcacgatctcggctcactacaacctccgcctcccaggttcaagcgattctcctgcctcagcctcccaatttactgggattacaggcacctgccaccacgcccagctaatttttgtatttttagtagagatggggtttcaccatgttgaccaggctgattttgaactcctgacctcaggtgattctgcccgcctcaccctcccacagtgctggaattataggtatgagccactgtccccggccagatttttttaaaagtaggtatcttgtgggatttatgttctgagagatactaaggaaatgctgccctacagtgtttttgctagttcatactcattacaaaggtttcttgttgttgggtgcccctctagccagtggtagtaaaatgggaagagacaggtcaagactcccttggaccatggcattgagagagggatggctgtcggcatagatatgttggttatttaggcatttgtgagggaggcccctggctcttccagcctgtttccttaggatcccagttggccgggaacagctgtacaagggtctgctgaactggtggtttcagcagactacccagttcctaagcatccatgagacagagggaaccaacttgtatttccagaacaattttccaaaccttttctggctgtactttaaaagtgccaaaaaggcaatgggtgtttatgacactaaagtcacatacaagctagtatgatacatacatcatagaaagcttatagttgctcagtgacaaagcaaaggaagtttaatattttccagttttgttcattaccgaagacagtctacggttcatagttttcactaaattctaagcagattctatatcctaaaacatttaaacctcactaggcctgcaattttgagagggttagctaaatatgtttggtatcacttcagagtctaaaaccagattactaatcgtgtgtaaggaggcattttgtgtgtctttgcaatgtatacaattggattatttggaacaccattttgaatgtgtatttgagagaaagctcgcctgtgggttttgagttgtggtgtaatggtgaacatgtagccacgtgaaaggccgttggatctttgttctgattcttcagtcgtcttcttgcaaattcagagaaatgtcttttaatcatttcgtttacatatcccagatccttggaaatcatgaaaaataacttgccagagtttgcatcagccctcagtaagtcatgaaccatagagaaggtcatggggccatttattctttggaccactggctacttctgaagttctggcttccttctctctaggaggagtcgtgtattcaagcttttaagttaaatgcataaaaatgagttttacttctcttctgacttgatttttaattttatgaaatgggaaataatgtttttccatttttctgttcattttgaagtgggaatttgaggtgtttgtaatgtcatgttactgttctgaaagattgacagtaaagaagacaagaaatatatgtatgtagtatgcatattagttttgtcccaccaagcctatctttgaatggcaaacattttaaaaacatctgttctagttgcacaactactctagcttctttataaagtaaacaatcttaaagtaagcaatgttggccataatttcaatattctagccttgccgagtgtgaatatattttactcagagactatgtacaaatacactaaagtggtgatggtgatcaatattgtaaagaatttattctgataaatgagaaactggatataatgtcaaaatagctattttctcaataaaaatctcaaatctcctgactgctaaaaaaaaaaaaaaaaaaaaaaaaaaaaaaaaaaaaaaaaaaaaaaaaaaaaaaaaaaaaaaaaaaaaaaaaaaaaaaaaaaaaaaa

SEQ ID NO: 28290 - DNA, 4175 bp, Homo Sapiens
cgaatttaattgtttagtaagccttattttgtacaaggcactgtttctgctgggaaggagtttatagcctagcaggaaaaaataacagacgtatcccagaaacaaaggtctagcagagctcagaagggaaaaaaatctgttggggagtggagggaatcttcttagaatgacagttgtttgaggtgattactgaaaggatttggataagatttcagtgttattgggaatataaggatgggggaagggtgctgtgagtgaattccagggccaatttgttgactttacatcagcactcttatagtactcctgcttctgaggagttgaacccagctaggagtcttctgagcattggtgggctgcagtgttcaataatggaacctaaaggatatatagatacctgcagtaattacatgtggtgccaagtgctgaactgactatgacacaaagcaaaaaataaatcttggaagcagtataaccagtgtgtttctggatagcatccagctcacttagaatgctcagaaaggcctcctgcattatggaaatgccactgaaggttgacactttcacagtaatgtaaataatgagaggtgcaccccagattgtggtcccaagcagccagccatctgtgggacactgcacagtgcacctagccgagttgagtaaaggtgtaaacacactgttatatagaaccctcattctgattctgtggaacggagtcccatggtctgtaaagctaggaccaatgggaatgtttgaggaatacagattttgggtcaacagatggaaagttgccccattatggattgtgctatttcaggaggtaataggcccccatcactaaacatatataagcatcgcctataccaggcaatatcttatttaattatatacattctctcctttattctcaaaacagtgctatgaagtacatgctcctattactccagttttactgaagagcaaaactgaagcctagaaaggttgagtagctagtaatttgtagagctggtataaagcccaggcagtttgcgggcagaaactgcatatgcactgagatgaagaaaggatgcaaacattaggtggccatatggattttcaagattccttcctaacactaggattaatactttaattcaccttagggatcaagatgctagctgttgcaaggtactagttcattatcagcacccagttcctagagattcagaacaaggtgaatacagtcatcatcatcataattatcacttattgatcattttatttaaacctcaaaggaatcttggaaggtaaggattatacacccttattggacagtgaaactgaagctcagggaagttacataacttgattgagtctgcagagttgataagtggcagatgaatctggtgtctgacacccaggccctgctttttcttataccaccctgtgaggtaacacatggtgacactgaaaatatttacctatcggtctgcacagaaaccaacaagtcagagctgtcagcaacgcctgtggctctgcaggtgatgagtatcacctgaagtgatatttaggagcagtttgaaggtgtgtgaaaggcttggtaatctaccaagaccacagatctggagctctagtgacttcttcccatgctcagcatttattttattttatacatgataagtagtactattaaagagagagaaagccttcacggataactattattacatttatatttctaattaaggaaaaatgttttgcagtggtaatctgtgtcccttataaatggcaggctctcttcccactccttgtcttcctttcccttattccagtctgatgctaatccctcttgcttcctcagggaccttgcttcattgtcttttcttcagggtctcaatgatccttttctttcaacatataaacatgcataagtctttcatattctttatgaaaacagaaaacgatgaacgcttttggtcgcttctctctaggtttgggtgtgtttcatcttattcctggtcttagcaggcagctccttgaagtacaggtcctcgtacacatcccgcacctcgccatcttcctttcatcttcaaccccctgcactcctgtcctctcctaatgaccaccaggtccattatctaggattctctttcatttcttgaactttgcacaacatttggtgttcttgaccactctctgctccttaaaatgttgcccacctgttttctgagttatccatttctcctcattttctttcttgtccagctgctctatatttggacttctctttactgtcctcccttcctctcaaaccttagcctcccctacagttcagccctcagccctctgctcattctgcacgtttgccctgtggcagctcatcttctgttttcttctactaccacctatatgccattgattccattgtaaatctgcatctccagccttgaaatcttatctgacatgtgttccaaatgtctttaactcgacaagttcaaaacatcacttccccaacttcaatccagcatactccttctgtgttttctatctcaatgaatgaaacctgcttcaccaagtttaaaacccaggacaacttctttgccttcttcaacctctacattttatatagagactgtcttttcagactctcttgaatctgctctttcctccctgtatcataaccttcattactgccgtggttcgggccctcatcccttctcttgaggattattgcagtagcctcgcaactggtctctctggcttctgcctggcctgtctccaatttgttcctcatactgctgcctttctaaaaggcaaatctgattacaactctccataaaatccttcagaggagtttctgcatcttcaggttaaaatgtaagctccctggcatggcacgaaagcttctttgtgatctgggccttcccttcaggtgtgtgtcagtctcctctaatgatcctggtccccactgtctgcccctgcccgtagcatctccactaaaggaaagaaatgataggagggatgggaatagaggcaagatgatagacctgctgttcagtactgtagccactagctacatgtggctgttgggcactggaaatacagctagtccaagttgagatgtgcgtaagtgtaaaatacaccatgctttgagactatataaaaaatgtaaaatttcttatttaacaaattgtaatattggttacatgttgaaacagcaatagttttgatatagtaggttaaacaaaatatattactaaaattaatttcacatatttctttttatttttaaaaatgtgattacttagtggacgttaccgtgcgacataaagaaataataaaataaaatgtgattactagaaaattaaacatcacctgtgtgctcacattatagttctgttggacagcattgttagggaacatctcattcccaggagatgcatcctgtacgagccaagcccacgagctttttgaatgattaagtcagccctattggcatagagaagtagcagttgctcagttttttcagtccagaggtatgaaatgtttggataagattcagaattggagagacagcttctgaacgctatagccaggagttacatgtacaatgggcatagtgtggaaagcactattaaagcacatctgtctcagcaggcccacccagccatcatcagaagtgggaggcaggaattctcgtggtatggtagaggaaggatttgaggtagacaggaggaacaagggaagggaaagtggaatcacattccctggaagcctcctatttgtgaggcaccagctgaaaccctgagagccaggtctctgagattccccatcctgccgttgattcttcccagtgggctaagtcccaactcccctactgtctggctgtaggatcctgaacaaattaatgaatcaacgaatctggagtctgaatattatgcacaccatacagtcataatgtgtcaaacaaaatgatgtgacccacactgataagggctctacagaagttagttatgccttaagacactgagggcagtaatctgtggatgagttggcctgaagggctttgagggaagggcatacggactgtcagaaagacctggaagatagcacctgttgccttaagagatatgcagagcttctggctaacacggtgaaaccccgtctcaccaaaaatcctaaaaaaaaaaaaaaaa

SEQ ID NO: 28291 - DNA, 2517 bp, Homo Sapiens
atatataaaagataaaagggaaacaggtgctcagttgacattccgagtggcatagcaggggtaaagagagcaaaggagaagtgttgaagtctgtgacccaaacttagagcacaatgaaacctttgcctttcccttatgttgtactgtggcctaagtagaagagttgagatacgaaatgcttatatcttgaggtgtggctctgtaggatgatgtggaaaggagttttcttgtagcaatgccctctccagcctcctttccttttcccttcagtataagtcactttatttggctcctgaaattgttaggtagtattatgttttctttcagtttattcacatagcagttctgtttattttctatctgggaactgtctttagtctcccccaatacataccaatgtggactctgcattcgccctgcctgtccaatctcatagaatgtgcactgagaaaactaattgcagagataagttggttctttgtgtgcatgactgatcaagagcaaagtaccttaatttcagatgccttcagagagatttttctttaacctctgcttttaagaggaagattataaagcattatcattacttcaggtcagaattatattgcttttggtcaaaagctgttgtaagatttacaaagtaatagaaaaaagtaatctacagataaattataaagatcaaagcagttcaaaattaaagtaaatttgagtgtaagcatacatagggctttagagtcgtaaaagaaaccactagaccatacatcattatgtctttttaaccatagcttccaaaggagccttaataattatatttttagtgaaaagcaacaggctaaattctcttgttttactcatttgaatgtattgttcatagttgaatgctagttaaaattgtcccaagcagtttctcattacagacacaataggctgagtcagaggtaatatggaaggtctgatagcacatattaggtcctagctttggtttgtgtcctcagctatgttttatttgttgataatttccaaatctgtgtcttttatctctggcttctttctttgtctgtagacttagcatttccatctggttgtggaaatcacatgttaagtacctcaaacactttaatgtgtctcaaacagaatttttaaaatttgttaagtcctttcttcaaactgccaaactgcctctcatttatttctatattttgatttatggcttcattatcctctcattaacccttacctctgccatttccaaattgccaactcatattataacctttgaaatgtttttcagatctagccatctatctcatccccactgtcactgactcttgtttgccttcattacctgtactttaaaaaatatattattattattattattattataacaaaagtaataggtactttttaaaaattcagactcttcagacttttacaaagtagaaatctcctgttctctccctcccaattctacttctctgaagtaaccacctgttactgtttggtatatatattggcccacattttctacgcatttctaaacacatagagatagacatagaaagaatctcaaatactttaccgtgtcttgtgtggactattaaaacagattcctcactcatctttctgccatcagcccttctccattccagctattgccagagttatctacctaaatagcaagtcttaaaagacctctgcttgttcccgattgcctacaggataaggaccaaccttttagtattacacctataaaagcccttcatattctgggccagtatctgtctccagccttactctttgccagttctgctttgctcattatgttcattgtcactgttccctggattggtcatgcctcatcatacctcaccgccattgtcttctctacctggcaaatttctactcattctttaagaccctgctcatctgttgtctcctttataaggagtttttttctagttttcccaagaagagataacggctttctcttctctgttccttcagtatctcaatcatatcttttttttaattggtctgtttgtatgtttctcccatagttccctctgaacaaaagcagggcacttgtcttacttatcatttaatgtccaacactcttcctagcttatatagacaatcagtaaacactgggaaacagacatatctgtagtttggaactgcattgctttaaaagtctatctaagttaaagaaagtagactgggcgcagtggctcacacctgtaatcccagcacttcgagaggccaaggtgagaggatcacttgagcccaggagttagaaacccgcctgggcaacacagtgaaaccctatctctacaaaaaaaattaaaaagctagccaaatgtggtagttgcacctacagtcccagctactaaggaggttgaggcaggaggattgcttgagcccaggaggtcgaggctgcagtgagctatgatcataccactgcactccagcctgagtgacagagtgagtccctgtctcaaaaaaaaaaaaaaaaaa

SEQ ID NO: 28292 - DNA, 5324 bp, Homo Sapiens
ggggcccgtctggggcgccggcgggtgcgtttgaatctggtccgagcgcgggaaacggcgggtccccgagcccagggttacaaaataaatgccatttgaacagtgccgtctgtcatggaaaaacgtgagacgtttgtacaagccgtgtctaaggagctggttggagagtttttgcaatttgttcaacttgataaagaggcctctgatcctttcagcctaaatgaattactagatgaattatcaaggaaacagaaagaagaattatggcaaaggctgaagaatttattgacagatgtgttgttagaaagcccagtggatgggtggcaggtagtggaagcccagggtgaagacaatatggaaaccgaacatggctcaaaaatgagaaaaagcatagaaataatttatgcaattacatctgtgattcttgcttctgtgtctgtaataaatgaaagtgagaactacgaagccctactggaatgtgttattatattaaatggtattttatatgcattacctgagtctgaacgaaaactacagagttctattcaggatttgtgtgttacctggtgggagaaaggcctgcctgccaaggaagacacaggaaagacagcctttgtcatgttactaaggaggagtctggagactaagacaggtgcagacgtatgtcggctttggcgtatccatcaagctttatattgctttgattatgatttggaggaaagtggagaaattaaagatatgttacttgagtgcttcataaatattaattatatcaagaaagaagagggaagaagatttcttagttgtctcttcaactggaatatcaacttcatcaaaatgatccacgggaccattaaaaaccagttacagggattacaaaagtctttgatggtatacattgcagaaatttatttcagagcttggaaaaaggcttcagggaaaatactggaggcgattgaaaatgattgcatccaggacttcatgttccacgggatacaccttccgaggaggtctccagtgcattccaaagtgcgggaggttctgagttactttcaccatcaaaagaaagttcggcagggagtggaagagatgctttatagattatataagcccatcctttggagaggattaaaggccagaaactctgaagttcgatcaaatgctgcattgttgtttgttgaagcatttcctattagggatccaaaccttcatgctattgaaatggatagtgaaatccagaaacagtttgaagagctctatagccttttagaagatccttacccgatggtccgttccacagggatccttggtgtttgtaaaataacttctaagtactgggaaatgatgcccccgaccattcttattgacctcctgaagaaggtgactggggaactggcatttgacacgagctcagctgatgttcgttgttctgtctttaagtgtctgccaatgattttggacaacaaactgagccacccattgttagagcagctccttccagctctcagatacagtctccacgacaattcggagaaagtgagggtagcttttgtggacatgctgttgaagatcaaagctgtgagggctgctaagttttggaaaatatgtcccatggagcacattctggttcgtctggaaactgattctcgacctgtgtctcggcgcctggtgagcctcatctttaattctttcctgcctgtgaatcagccggaggaggtctggtgcgagcgctgtgtcaccctggtgcagatgaaccacgccgctgccaggaggttctatcagtacgcccacgaacacaccgcctgcaccaacatagcaaagctgattcacgttattcgtcattgcttaaatgcctgtatccagagggcagtgagagagcctccagaggacgaggaggaagaggacggaagggagaaggagaatgtgactgttctggacaaaacactgtcagtaaacgatgttgcatgcatggcaggtttactagaaatcattgtgattctctggaaaagtattgacagaagtatggaaaataataaagaggccaaactttacacgattaacaagtttgcctctgtgcttccagagtatctgaaagtatttaaggatgatcgctgcaagatccctttattcatgctaatgtcctttatgccggcctctgctgtccccccattcagctgtggtgtgatttccacgctgagaagccgggaggagggcgctgtggacaagagctactgcactttgttggattgcctctgctcctgggggcaggtggggcacattctggagcttgttgacaactggctgcccacagagcatgcccaggccaagagcaacacagcttctaaaggtagggtgcagatccatgacacacgcccagtcaaacctgaattggcattggtctacattgagtatctgctgactcatccaaagaaccgcgagtgcttgctctctgctcctcggaagaaacttaaccatcttttgaaagcccttgaaacgtcaaaggcagatctggagtcacttctgcagacaccgggtgggaagcctcgtggcttcagtgaagcagctgccccgcgagcctttggtctccactgtcgcctgagcatccatcttcagcacaagttctgctcagaaggaaaggtgtatttgtccatgttggaagacactggcttttggttagaaagcaaaattttatcttttattcaagatcaagaagaagactacctgaagcttcatagggtcatttatcagcaaattatccagacctacctgactgtgtgtaaagatgttgttatggtaggccttggtgaccatcagtttcagatgcaactcttacagcggagtcttggaatcatgcaaacagtgaagggatttttttatgtttcattacttcttgacattctgaaagagataactggaagttccttgattcagaaaacagattcagatgaagaagttgcaatgctgttggacacagtccagaaagtatttcagaaaatgttggaatgtattgcacggagcttcaggaagcagccggaagaaggcctgcggctgctttattctgttcagaggcctcttcatgagttcattactgctgttcagtctcggcacacagacacccctgtgcaccggggtgtactttctactctgatcgctgggcctgtggttgagataagtcaccagctacggaaggtttctgacgtagaagagcttacccctccagagcatctttctgatcttccaccattttcaaggtgtttaataggaataataataaagtcttcgaatgtggtcaggtcatttttggatgaattaaaggcatgtgtggcttctaatgatattgaaggcattgtgtgcctcacggctgctgtgcatattatcctggttattaatgcaggtaaacataaaagctcaaaagtgagggaggttgcagccactgttcacagaaaactaaagacattcatggaaattactttggaagaggatagcattgaaagatatgaggacttgctgtgttgcccaggctgggctctaactcctggactcctggactcaatctatccttctgcctcagtcccaattggctaggactgcaggcacacaccaccagacccagctaatgtaatttctatccatatgtgtctttatatttaaagtggtttttttatagacagtatataaatgggtcatgttttttgatcttctctgacaatctgtcttaaaattggtgcatatgtaccatattcaaagtgattattgatatagttggattaatatccaccatatttgttactgtcttctatttgttccccttgttatttgttcctatttctgtcttccactccttttctgtcttttgtggttttaactgaacattttatgatgccgttttctttcctagcatatcagttatacttttttttttttaaacctttcttagtggtttctttagagttggaatttttatttgtttttatctttcttagtggttgctttagagttggagttttcgtttataactaatccacgtttgctttcagatgacactataccactttgcaggtagggtggtatataataacaaaataatcctaatccttgcctctcgttccttgtatcattgctgtcattcattttgctaaggtataagcagacataagcatacataattgaatatattgttgctattattattttgaacaaactacatcttaggtcatttaagaataagaaaaataaaagtttttatttaccttcacttactccttctttgatgcttctcctttgtttgtgttgatccaaattctgacctatattcttttccttccctccagagaacttcttttaatgcttctttcaaggcatgtctactggcaactaattctcttaattttggtttgtcagagagtcttttacttctactttatttctttgcagggataatgttatgtagtttataattctagttgatgaatttttttctctctgtactttatttaatttattattattattttttgagacagagtcttgctctgttgcctagggtggaacgcagtggtgtgatctcagttcactgcaacctctgcctcctaagttcaaacgattcttgtacctcagcctgctgagtagctggtatacaggcacatcgccgccacacccagctcatttttgtattagtggagacagggcttcaccatgttgcccaggctggtctcgaattcttgatctcaagtgatctactcgcctcagcttctcaaattgctgggattactccccgtgcccggccactctctgtactttaaacatttcgctatactctcttcttggctcgtgtagtatctgagaaataggatataattctttttttgctcctcagtagataaggcgtatttttccctatctggtttctttcaatactttttctttgtttgatttttctgtaggttgaatatgatatgcctaggtgtagttttcttttctttttttttttttttttggcatttattctattcagtattctatgagcttcctggataaattctcagttattattgtctgaatatttcttctgttcctttctctcttctgaaattcttattatacatgttaacaccttttacagttgtctcacaggtcttggatatttcattctatcaaaacagctgcatttttgagttctgtttgctaatattttatttgagaatgtttgcattaggtttgaaataagattaaatggttgttggttgttttgttaaaaaaaaaaaaaaaaaaaaaaaaaaaaaaaaaaaaaaaaaaaaaaaaaaagaaaaaaaaaaaaaaaaaaa

SEQ ID NO: 28293 - DNA, 6809 bp, Homo Sapiens
aggaatgtctaatcaatatttccaaatacaagttttctttggttataagcggcctcactactattttaaagaatgttaacaatatgagaatatttggagaagctgctgaaaaaaatttatatctctctcagttgattatattggatacactggaaaaatgtcttgctgggcaaccaaaggacacaatgagattagatgaaacgatgctggtcaaacagttgctgccagaaatctgccattttcttcacacctgtcgtgaaggaaaccagcatgcagctgaacttcggaattctgcctctggggttttattttctctcagctgcaacaacttcaatgcagtctttagtcgcatttctaccagaaacagcatttaaatttaaagccctaaagaaggttgcgcagttagcagttataaatagcctggaaaaggcattttggaactgggtagaaaattatccagatgaatttacaaaactataccagatcccacagactgatatggctgaatgtgcagaaaagctatttgacttggtggatggttttgctgaaagcaccaaacgtaaagcagcagtttggccactacaaatcattctccttatcttgtgtccagaaataatccaggatatatccaaagacgtggttgatgaaaacaacatgaataagaagttatttctggacagtctacgaaaagctcttgctggccatggaggaagtaggcagctgacagaaagtgctgcaattgcctgtgtcaaactgtgtaaagcaagtacttacatcaattgggaagataactctgtcattttcctacttgttcagtccatggtggttgatcttaagaacctgctttttaatccaagtaagccattctcaagaggcagtcagcctgcagatgtggatctaatgattgactgccttgtttcttgctttcgtataagccctcacaacaaccaacactttaagatctgcctggctcagaattcaccttctacatttcactatgtgctggtaaattcactccatcgaatcatcaccaattccgcattggattggtggcctaagattgatgctgtgtattgtcactcggttgaacttcgaaatatgtttggtgaaacacttcataaagcagtgcaaggttgtggagcacacccagcaatacgaatggcaccgagtcttacatttaaagaaaaagtaacaagccttaaatttaaagaaaaacctacagacctggagacaagaagctataagtatcttctcttgtccatggtgaaactaattcatgcagatccaaagctcttgctttgtaatccaagaaaacaggggcccgaaacccaaggcagtacggcagaattaattacagggctcgtccaactggtccctcagtcacacatgccagagattgctcaggaagcaatggaggctctgctggttcttcatcagttagatagcattgatttgtggaatcctgatgctcctgtagaaacattttgggagattagctcacaaatgcttttttacatctgcaagaaattaactagtcatcaaatgcttagtagcacagaaattctcaagtggttgcgggaaatattgatctgcaggaataaatttcttcttaaaaataagcaggcagatagaagtccctgtcactttctccttttttacggggtaggatgtgatattccttctagtggaaataccagtcaaatgtccatggatcatgaagaattactacgtactcctggagcctctctccggaagggaaaagggaactcctctatggatagtgcagcaggatgcagcggaacccccccgatttgccgacaagcccagaccaaactagaagtggccctgtacatgtttctgtggaaccctgacactgaagctgttctggttgccatgtcctgtttccgccacctctgtgaggaagcagatatccggtgtggggtggatgaagtgtcagtgcataacctcttgcccaactataacacattcatggagtttgcctctgtcagcaatatgatgtcaacaggaagagcagcacttcagaaaagagtgatggcactgctgaggcgcattgagcatcccactgcaggaaacactgaggcttgggaagatacacatgcaaaatgggaacaagcaacaaagctaatccttaactatccaaaagccaaaatggaagatggccaggctgctgaaagccttcacaagaccattgttaagaggcgaatgtcccatgtgagtggaggaggatccatagatttgtctgacacagactccctacaggaatggatcaacatgactggcttcctttgtgcccttgggggagtgtgcctccagcagagaagcaattctggcctggcaacctatagcccacccatgggtccagtcagtgaacgtaagggttctatgatttcagtgatgtcttcagagggaaacgcagatacacctgtcagcaaatttatggatcggctgttgtccttaatggtgtgtaaccatgagaaagtgggacttcaaatacggaccaatgttaaggatctggtgggtctagaattgagtcctgctctgtatccaatgctatttaacaaattgaagaataccatcagcaagttttttgactcccaaggacaggttttattgactgataccaatactcaatttgtagaacaaaccatagctataatgaagaacttgctagataatcatactgaaggcagctctgaacatctagggcaagctagcattgaaacaatgatgttaaatctggtcaggtatgttcgtgtgcttgggaatatggtccatgcaattcaaataaaaacgaaactgtgtcaattagttgaagtaatgatggcaaggagagatgacctctcattttgccaagagatgaaatttaggaataagatggtagaatacctgacagactgggttatgggaacatcaaaccaagcagcagatgatgatgtaaaatgtcttacaagagatttggaccaggcaagcatggaagcagtagtttcacttctagctggtctccctctgcagcctgaagaaggagatggtgtggaattgatggaagccaaatcacagttatttcttaaatacttcacattatttatgaaccttttgaatgactgcagtgaagttgaagatgaaagtgcgcaaacaggtggcaggaaacgtggcatgtctcggaggctggcatcactgaggcactgtacggtccttgcaatgtcaaacttactcaatgccaacgtagacagtggtctcatgcactccataggcttaggttaccacaaggatctccagacaagagctacatttatggaagttctgacaaaaatccttcaacaaggcacagaatttgacacacttgcagaaacagtattggctgatcggtttgagagattggtggaactggtcacaatgatgggtgatcaaggagaactccctatagcgatggctctggccaatgtggttccttgttctcagtgggatgaactagctcgagttctggttactctgtttgattctcggcatttactctaccaactgctctggaacatgttttctaaagaagtagaattggcagactccatgcagactctcttccgaggcaacagcttggccagtaaaataatgacattctgtttcaaggtatatggtgctacctatctacaaaaactcctggatcctttattacgaattgtgatcacatcctctgattggcaacatgttagctttgaagtggatcctaccaggttagaaccatcagagagccttgaggaaaaccagcggaacctccttcagatgactgaaaagttcttccatgccatcatcagttcctcctcagaattcccccctcaacttcgaagtgtgtgccactgtttataccagagtcatcgcagccatttgcttttttagcacacggcttcagttgcttagagacgttaacagcatcattgaaatcaccattttaaaagctgtttgaggctgctctatgtgaattttttcaccattgctatttttaaagatgtatctgttctatctgtaaaaaagcttttcacggtatacatagatgataaaacatacttaaccttgtctctcttaatttatcatgacttttctgcctttacaaaaaggctcaaggaaacttaggaaaatcctgtatagttttttcaactagttaagtctgagtctaaagggtagtttagttataatatgaaacttaatacagtgaatatcttctcaagtttgggctgtattcaggtttctctttaaattttatttagtaattgttctattgatgaaactaggcagacaggaaatagcacatattaaaaatagtctgggtcagcttcttggttggcctagtagtaactggtttcagagagcaagtgggtttctaaaatgacagaggctttgactttagctggttaaaagtgaatggggactgactacatgattacatggtctaggagattgtagtagaatttcttcatgtggttgtcatcctaaaagaaaaatctttttgtatcatgagcaaagttggagaccgttttgagaccatgattctaataatgtaaaaggaacaggtcttagcacttatttagtacttaggaaatatttaatcaagaaataaatttcccatccctcccacctaagtaaacaagattcttgccagctttcacagctaagaaaggaggaaaatagtgaaaatagatttttaaacactatatgtggtgattattaaacagtatgttatgctttttagagcacttcacagtaaaatatcctatattattttaataacaaacctggtttattatgttaaaatttcacataaaattattatctttaaaaacatgaattaaaggtggtatcagtgcattgtttaagtattgggtaaaagcattgttgaagagcagagacagcatgctgtgttgttattaaataaggctttatttttttaattagtaactggtaacagggaatgttacatttactgattagaaagaaagataggaaaaaagctttggtctcaagatagtattttattgagtctgcttcccaaacctagtttatttcttttggtttgctcttttgtttttattcatcttccctcttctggctttttcttgcccctttgcctttggcagtaacagaaaggtaccttcctgctcttctgtgttctgcctggagggatagtagtccctttgggacctactggggaaatgttgaaagggaagtgagtatattgctagctaataaacttccctggactttagctccttttttgagttcatatcttggcctttaagccttttcaaatcatgtgttaaccagctctattactttatataccttccttccttagttgactggattaaggttatttaagaatagccaactgtgaacatgtgtcagatttataattaaatcattttctcatatgttgttttcacttctcctgatggttttaggataaagataaaatgattcccaaagtggatattctcgtatggtgagagaattctaagaactaatttatgattctaaataaatctcaccctttttcagtaaatctgcttctccaaactgaagtagtttacacacagttttaaggctataaatgatagttatataccactgttactaatacatttgtatatagtctaaagtttgaaacaaagctctgtgagctaaggggctgtgtcttgttgttttactgctatttcccaatgcctagaatggtatttgacctgtaggtacacagtaactctttggatggatgaatgggtgggtggatgaatggatgtctaactaacttaaagcccaagttatgggttatggtgttggatgtccagaattcccagaataagatgccatctatttgtggattaaataattctaacatggttttaaaaatatttttaaaataattattctgcctaggctagtccaatcaagagtcttttaattttgaaagaaatctttggtctagaaagagctctgagagatgaaaccaatatgtgcctggagttttgggggttttttaggtggctttttttttttttttttaagatattttgataaatggtcaactgtaatatgtgaaaagttttaagcaggcctacagttttgttctgtaattttctctgcagtttcttcactttaataatattaatgcttcttactagttgagctgataaccttcttctcccaaatgttgcagagcttttaacctcctctgattagaaccatttcaggaagtagcctgcaaacattgaaaaatatgtgaaatgttaagagtaatcttttttagagagagaggtctttaattcagaatttctaaagtgaatttttatatttatccatataatttttatttctttattcagtaggatcataattaaatgccaggtgttggaaaaagaacttaaagtcaattgaaggatacacagagaagaattttacataccaagaaaaaattatgtagacacaaatgtttttagtgtgtgatctacttgtaatgaatattttatattacatttctcaaaagctaggaattaaccaaaatgtaaatatttaatatcctcaaattcacttggagagagtttttctgtgattcatagccagaaatagtagacatgattgggtctcaacatttcttgctgttttagtgcttggcttaaaaatgtaataaaaattaaaacccagaattaaaattcattcctcaaaattcaaaaaaaaaaaaaaaagaaaaaaaaaaaaaaaaaaaaaaaaaaaaaaaaaaaaaaaaaaaaaaaaaaaaaaaaaaa

SEQ ID NO: 28294 - DNA, 7391 bp, Homo Sapiens
ccagcattgaaaataggctatctctacacctactgggctcctctgggatttgtcttggctgttactatgacacgggaagcaattgatgaatttcggcgttttcagcgtgacaaggaagtgaattcacaactatatagcaagcttacagtaagaggtaaagtgcaagttaagagttcagacatacaagttggagacctcatcatagtggaaaagaatcaaagaattccatcggacatggtgtttcttaggacttcagaaaaagcagtatcaaacaatcttgattactgcagccatctggttcgtgttttattcgaactgatcaactagatggtgaaactgactggaagctgaaggtggcagtgagctgcacgcaacagctgccggctctgggggaccttttttctatcagtgcttatgtttatgctcagaaaccacaaatggacattcacagtttcgaaggcacatttaccagggaagacagtgacccgcccattcatgaaagtctcagcatagaaaatacattgtgggcaagcaccattgttgcatcaggtactgtaataggtgttgtcatttataccggaaaagagactcgaagtgtaatgaacacatccaatccaaaaaataaggttggtttgttggaccttgaactcaatcggctgacgaaagcgctatttttggctttagttgctctttccattgttatggtaaccttacaaggatttgtgggtccatggtaccgcaatctttttcggttccttctcctcttttcttacatcattcccataagtttgcgtgtgaacttggacatgggcaaagcggtgtatggatggatgatgatgaaagatgagaacatccctggcacggtcgttcggaccagcactatcccagaggaacttgggcgcctggtgtatttattgacagacaaaacaggaaccctcacccagaatgaaatgatatttaagcggctgcacctgggcaccgtgtcctatggcgccgacacgatggatgagatccagagccatgtcagggactcctactcacagatgcagtctcaagctggtggaaacaatactggttcaactccactaagaaaagcccaatcttcagctcccaaagttaggaaaagtgtcagtagtcgaatccatgaagccgtgaaagccatcgtgctgtgtcacaacgtgacccccgtgtatgagtctcgggccggcgttactgaggagactgagttcgcagaggctgaccaagacttcagtgatgagaatcgcacctaccaggcttccagcccggatgaggtcgctctggtgcagtggacagagagtgtgggcctcacgctggtcagcagggacctcacctccatgcagctgaagacccccagtggccaggtcctcagcttctgcattctgcagctgtttcccttcacctccgagagcaagcggatgggcgtcatcgtcagggatgaatccacggcagaaatcacattctacatgaagggcgctgacgtggccatgtctcctatcgtgcagtataatgactggctggaagaggagtgcggaaacatggctcgcgaaggactgcggaccctcgtggttgcaaagaaggcgttgacagaggagcagtaccaggactttgagagccgatacactcaagccaagctgagcatgcacgacaggtccctcaaggtggccgcggtagtcgagagcctggagagggagatggaactgctgtgcctcaccggcgtggaggaccagctgcaggcagacgtgcggcccacgctggagatgctgcgcaacgccgggatcaagatatggatgctaacaggcgataaactcgagacagctacctgcattgccaaaagttcacatctcgtgtctagaacacaagatattcatattttcagacaggtaaccagtcggggagaggcacatttggagctgaatgcatttcgaaggaagcatgattgtgcactagtcatatctggggactctctggaggtttgtctaaagtactacgagcatgaatttgtggagctggcctgccagtgccctgccgtggtttgctgccgctgctcacccacccagaaggcccgcattgtgacactgctgcagcagcacacagggagacgcacctgcgccatcggtgatggaggaaatgatgtcagcatgattcaggcagcagactgtgggattgggattgagggaaaggagggtaaacaggcctcgctggcggccgacttctccatcacgcagttccggcacataggcaggctgctcatggtgcacgggcggaacagctacaagaggtcggcggcactcggccagttcgtcatgcacaggggccttatcatctccaccatgcaggctgtgttttcctcagtcttctacttcgcatccgtccctttgtatcagggcttcctcatggtggggtatgccaccatatacaccatgttcccagtgttctccttagtgctggaccaggacgtgaagccagagatggcgatgctctacccggagctgtacaaggacctcaccaaggtacgggcctcaggcaagctgtctgcctcacgactagcacccacatctagcattttacacgagtgagaaacaggccagtcaggaggcatttccaggcattttgtgaaaaacgattctctgtccttgaagatgttttttatgtctcctaattgttgttggcattttctctttgagttatacttcaaaaggggaaaaacatctcagggaaaaaaatttctcaaatgtttgcaataaagctctaatatcatacatacaattagaattgtaaaagatgttctaaccatttgtggaacttttgtgaagtgagctcaccaaatgtcagagaagatctcactgtgtaatttctgtagaaaggctcccccggacagcgtcactgcacctgctgcagaaatagcattccaaagctggggaacccatgggctgcatgtttcctgtgtatttccaagtttgtcagtagttgtggatttcagaattatccctgaaaagtgataacatgtgtctgtccctagggtccatagactatttttgcagtgatgtcaccaagaaaaaaatccaccccagaaaacttcagtcacctgaaactctgagaaagatggatttatttggcttaaaactgtgttctgttaggattaaaggaggctttgaatttatcatattctttacgacagcatattttatagcatagaacgtgtaaggatacggggtagaagagaggctcagctctgcagacacaaatcatggtaactctggtattttccacaaagctagctgttttgaatcaacattgaaaacaaaatccactaaccgcaattaaatttagatttacaatcaataaatgacaggtgtctgaaattatcaactcagatttttaaagcagtagctgtatggtaaagaaagaattagattaggcattaaaaaagaaagctaatgactacctagcaaacagattctagtccagctaaccactaattaaccaactagattcttacctagctaaccacaaactgagaaactagactcctgtctgtctaactagtaactaacaaacgatactctatctaatacagctaaccactaacaagctagactcttatccagctaaccactgacaaactagactctagtccagctataaccactcattagccagagaggtgctgggtaagtcatgttaactttttgatttcttgatgttattgaaatgaaataaagactttaaagtttcttgaaaaaaataaagaattctcattagtgttataatcaagacaaataaagctagttcaccagtatcacatgaaatataaataccaagcgttattatcatggtggcatcatcgtgactactgggaaacatcgtcccaggtcacacctactataactagaagcaagaccgcttaagtatcttaaactgatgaaaccattgtgataaagtacagagtaaggagcaaagatccaaaaacttcgggaagctagtgtgaataatgatcattttagtagcatatgcatttcctcattcccagagactctaaaaatgtttacctaaatgctgccttacaaacatacgggaacaagcttttcatgtacgaaggtaaacctcgatgcgctaccctcaaccctaggaaaccggcacgcaagcagggcagaggtcaccaggggtcttgtagccccagccggtgctcccggatcgctgtgctgggagaaacttgtcataggactgtcatgccacagccatcttgaccggctattggagtggggcagtaacacgtttttactgttttcaaggatttagattgtacgcaccagtctctttctttgtggatatctaaatggctctagtaacaagaggttcatagggccacaggtgtctgacggagcagctaattatccgtaactgtggccatggaatccgtaagttctgtgttactggtgccattgaaccctgttcacttctgattgtgttggatctcattaagggtattaaatttccgttttcgttaaggtgagcaacaatttagaatgttttagtatcctaaagtcaggtcaccatccctacattttttttttttttggtcaagaatgcagtcactcattttctctaagcttcttttcttcaacatcttatctgcattgtaacttttttttaaatctactacacttcaaattctttgaaaagaaaatagcactaaagtactgagccactaaagttaatttagttattttttcttattgaagctaaagaactattttgaagctttctgttccttctgaacagttcgccaaggtagcgcagactgcagcactctgcgttgttgtctgatgatcggggcagctggagactggatgtgccaacgcagtttatccacaccggtcagtgtcagtggacaccaagtccccagtccgtcggctcaagctcctgcgatgtaggacaacatagccctgctctcaacgagtctgtattctagtcaggatgagaaagcagtgaatcagtggcatagagcaacagcataaagggccgcggcctgcagtgtgagtaacaacagcataaagggccgcggactgaaatgtgagtggctgaccggcgagtgccggtccagtcagttctgagtcacatatctcaggtcaccgtaaatttataaaataccttcagaggcgagccagggaggcaaggcatgcattccctgcacacaggagaagactcaattggaaagaaaatctcctcttttttatgtgtatttgataaccagtctttataatctaaaagtacaaataaggcacgcattataaacctcacttattgtcctaatgagttagccaacctcaagtataaacatttgtcccctgctgtgtctcgatggcctgagccacacgtcgacacagtatctgttaagtaagtatttgataaacaaatgaggcagtgaatgaatcagttaaaccaagagtcaggatttccttcgctttcctaaaactatgtagcttttattctttacagaaaatggtatatttgcaacactattttgttattcttttgaagctcaaattctgctttgaattattaaactttactcacgatgagttcaggcacttaattttctggatgccagtaagacgggaaactgacctactcatctctctcctaactctgcacatgtcttcattcattctgaatggtgtgtaaccgcttagggaagctagttactccaagatccaggcatcaggactagtaaggtgaccctggttaagtgagccagctcacgtggtcccaaaatatctcagactgtggctgtgaattttgttaccaattcataatcttacattaccagctaactccagagacatttgatttgtagttgtgctaattgtaaagatatcaagtaggtaatatacagttcttcatgaaatctctggtgccattaggtattgaaccattcggaccccttcactaatttttattttctgtagaatactctcaaatggttttatcttttgaaatgtatatttgtatacttatattcttttcaaaataatagtgaataagacaataaaaggaaatttaaaacattgagattaggaaggaggaaataaaaatatctctgtttgtggatgctataattttctatgtagaaaattccaaggaatccacacacatacaacctcctatacttgtaaacttcataaagtttcaggatacaaggaataatttttcaaaatcatttttgattctgtacactagcaatgaataattggggtttgaaaaaatttgtaaacatttataataatacatttaagcatttataatacaagaaagtgagacactgaagtgtacctctaacaaaatacacccaagatctgtgtgctggaaaccaacaacattgaggaaagaaactgtaaaaggcgtaaacagatgttcctggattgagagacgtaaacagatgttcatggattgagacacgtaaacagatgttcctggaatgggaggcataaacagatgttcctggatcaagaggcataaacagatgttcctggattgagagacgtaaacagatgttcatggattgagaggcataaacagatgttcatggattgagaggcgtaaactgatgttcctggattgagaggcgtaaacccatattcctggattgagaggcataagcagatgttcatggtttgagagacgtaaactgatgttcctggattgagagacataaacagatgttcctggattcggaggcataaacagatgttcatggattgagaggcataaacccatattcctggattgagaggcgtaagcagatgttcatggtttgagagacgtaaacagatattcctggattgggaggcgtaaacagatgatcctggaatgagaggcgtaaacagatgttcctgggttgggaggcgtaaacagatgttcctggattgagcctcaattagatgttcatggattgagagcctcagtgttgcttcacattgacaagctcactctagaatttatatggcaaggcaagggaactcgaattgccaaaataatttagaaaataacagagttgggccgggcgcggtggctcacgcctgtaatcccagcacattgggaggccgagacgggcggatcacgaggtcaggagatcgagaccatcctggctaacacggtgaaacaccatctctactaaaaatacaaaaattagctgtgcatggtggcgcgcacttgtagtcccagctacacgggaggctgaggcaggagaatggcgtgaacccgggaggcggagcttgcagtgagtcgagatcgcgccactgcactccagcctgggcgacagagcgaaactccgtctcaaaaaaaaaaaaaaagaaaaaaaaaaaaaaaaa

SEQ ID NO: 28295 - DNA, 2919 bp, Homo Sapiens
agccgcggtggctgggcgcggagtgtgcgtggcctgagccgtgcgggtgactgcttcagggcttctccgcgactggaccgggcgccgctcgaaagcacgccctccattcgcactgcttgttgggctcatcatgaagcgcttgggctccgtgcagcggaaaatgccgtgtgtgtttgtgacggaggtgaaagaggagccttcctccaaaagggagcatcagccatttaaagttttggcaactgaaactgtaagtcacaaggcattagatgcagatatatacagtgcaattccaacagaaaaagtggatggaacatgttgttatgttactacctataaagatcagccatacctttgggctcgactagatagaaaacccaacaaacaagctgaaaaaagatttaaaaattttctacattcaaaagaaaacccaaaagaatttttttggaacgttgaggaggacttcaaaccagctccggagtgctggataccagcaaaggagacagaacaaataaatgggaacccagtgcctgatgaaaatggacacattcctggttgggtaccagtagagaaaaacaacaaacagtattgctggcattcctctgtagttaattatgaatttgaaattgccctggtactaaaacatcatcctgatgattctggacttttggaaattagtgcagtgccactttcagatctcttagaacaaacactggaactcataggaacaaatatcaatggaaacccatatgggttagggagcaagaaacatccattacatcttcttataccacatggagcatttcaaataagaaatctaccttcattgaagcacaatgatctcctgtcctggtttgaagattgcaaagagggtaaaattgaaggaatagtgtggcattgcagtgatggctgtttaataaaggtccatcgccatcatcttggcttatgctggccaattccagatacttacatgaattcaagaccagttattatcaacatgaacctgaacaaatgtgactctgcctttgatattaagtgtttgtttaatcattttttaaaaatagataatcagaaatttgttagactcaaagatataatatttgatgtataaaatgcaaataaaattagtttatcattatattctaatcttgagtattctaccatatttaaaaatatctcaaggtttctgttcattatgaaacatcaatatgttttctaccatttgtgaagaaatgaattttccagtttcaagtacctattcaaaattttattaaaaaccagcaaattaattttaatctctagccataaaaacataagtaatagtaagctcctaagcttggacaaaggctggattctcttcactataactgagtggtaatttaaagacaacaatttaatgtcactaattttcaaaattaaatagtttaagctcaatttaattttgctagatatttaacaaaacatacggctcaacctcataacctatatgtgtgtatgtctacatctgtgtatatatcataggatttgagaatcttaacacatgtataaataagtatatataaactccaattttaaatcttaaaattgctgaatttaccctcatattctttaaaaaacttaaagcattatgaatgtagagaaattcaccagagctcactgcctatttgatggctgtaacaagtcttcaagtatatacttttataataagttgaaaatttcatataattttatttattaagaattccaatctaagtataaaggtacaaggtagtgagaaggaaatactacagttcggagaactgcttatttccaagtatatttaacttataaagttaataaatagttaaatgaaacaaagtttataggtgacctttagtaaatggggaaattaacaggactttcttcttcatcttcaaactcttcagaagcagcaacagggctagttaattcaactcccaattgttctgaaagtttttttaccttctcttctaagagaatattcttcttcacttcttccttgtaattatacttaagatcttcaatttcttcaaaaaatgaaggatcaaaattttccagttcttttttcagcttctttatttcctcctaatggaaacattatctttaaaagttgcatataggaaatatacatattttacgtttgaacaaggagatttaattgtaaatatgaaagccaaagtattcctgaatggtcaaatacagcaataaaggcagaagaattaagatttttctttgttccattgtacagtgtaaataactaagttgttaactgtcaagtccagttatgtattctgtaagttgtgttctagtctttgactaaaatttatcatctcttataatgggacttaatctttctctaaaagcatataagagcttgtcaatagagcaatcaatcaaaaagattttgtgattcataacattgaagttagtctggttaagagttttggtttagacttcatttatattttccttactaatatctaatatttaatgaataatgatcaattttttataaagttattaatatgatcagggaaacctttgggacttctgacaggcatctggtgaagagacaattcaagccttagtgactatttagaatagccagtgatcactagctaattctcatatccatgcctttttgtcctgtttacagtcttaaaagaggtaaaacagcaaatatttttttaagggaactataaccttaggattcctgaaaagaatttcaaaaaaaaaataaagacactgttgccaatgtgacccaaaacttaagaacatactaatggcatatatttgttacaattaaaaaataaatttactacttaatccaaaaaaaaaaaaaaaaaaaaaaaaaaaaaaaaaaaaaaaaaaaaataaaaaaaaaaaaaaaaaaaaaaaaaaaaa

SEQ ID NO: 28296 - DNA, 6188 bp, Homo Sapiens
aattcaacaagctgtcccacagagtcatatgtttggcagagtacagaacataccagcatgtacttctacagtttcacagggtcaacagttaatcaccacatcaccccaacctgtgcaaacttcatctcaacagacatcagctggtagccagtcacaagatactgttatcatagcacccccacagtatgtaacaacttctgcatccaatattgtctcagcaacttcagtacagaattttcaggtagctacaggacaaatggttactattgctggtgtcccaagtccacaagcctcaagggtagggtttcagaacattgcaccaaaacctctcccttctcagcaagtttcatctacagtggtacagcagcctattcaacaaccacagcagccaacccaacaaagcgtagtgattgtaagccagccagctcaacaaggtcaaacttatgcaccagccattcaccaaattgttcttgctaatccagcagctcttccagctggtcagacagttcagctaactggacaacctaacataactccatcttcttcaccatcacctgtcccagctactaataaccaagtccctactgccatgccgtcgtcctctacccctcaatcacagggaccacctcctactgtcagtcaaatgttatctgtgaaaaggcagcaacagcagcaacattcaccagcacccccaccacagcaggtacaagtacaagttcagcagccccaacaagtacagatgcaagttcaacctcaacagtcgaatgcaggagttggtcagcctgcctctggtgagtcgagtctgattaaacagcttctgcttccgaaacgtggtccttcaacaccaggtggtaagcttattctcccagctccacagattcctccccctaataatgcaagagctcctagccctcaggtggtctatcaggtggccagtaaccaagccgcaggttttggagtgcaggggcaaactccagctcagcagctattggttgggcagcaaaatgttcagttggtcccaagtgcaatgccaccctcagggggagtacaaactgtgcccatttcgaacttacaaatattgccaggtccactgatctcaaatagcccagcaaccattttccaagggacttctggcaaccaggtaaccataacagttgtgccaaatacgagttttgcacctgcaactgtgagtcagggaaatgcaactcagctcattgctccagcaggaattaccatgggcggaacgcagacaggagttggacttccagtacaaacgcttccagccactcaagcatctcctgctggacaatcatcatgtactactgctactcccccattcaaaggtgataaaataatttgccaaaaggaggaggaagcaaaggaagcaacaggtttacatgttcatgaacgtaaaattgaagtcatggagaacccgtcctgccgacgaggagccacaaacaccagcaatggggatacaaaggaaaatgaaatgcatgtgggaaatcttttaaatgggagaaagtacagtgactcaagtctacctccttcaaactcagggaaaattcaaagtgagactaatcagtgctcactaatcagtaatgggccatcattggaattaggtgagaatggagcatctgggaaacagaactcagaacaaatagacatgcaagatatcaaaagtgatttgagaaaaccgctagttaatggaatctgtgattttgataaaggagatggttctcatttaagcaaaaacattccaaatcataaaacttccaatcatgtaggaaatggtgagatatctccaatggaaccacaagggactttagatatcactcagcaagatactgccaaaggtgatcaactagaaagaatttctaatggacctgtattaactttgggtggttcatctgtgagcagtatacaggaggcttcaaatgcggcaacacagcaatttagtggtactgatttgcttaatggacctctagcttcaagtttgaattcagatgcgcctcagcaacgcccaagtgtagttgtctcaccacattctacaacctctgttatacagggacatcaaatcatagcagttcccgactcaggatcaaaagtatcccattctcctgccctatcatctgacgttcggtctacaaatggcacagcagaatgcaaaactgtaaagaggccagcagaggatactgatagggaaacagtcgcaggaattccaaataaagtaggagttagaattgttacaatcagtgaccccaacaatgctggctgcagcgcaacaatggttgctgtgccagcaggagcagatccaagcactgtagctaaagtagcaatagaaagtgctgttcagcaaaagcaacagcatccaccaacatatgtacagaatgtggtcccgcagaacactcctatgccaccttcaccagctgtacaagtgcagggccagcctaacagttctcagccttctccattcagtggatccagtcagcctggagatccaatgagaaaacctggacagaacttcatgtgtctgtggcagtcttgtaaaaagtggtttcagacacccccacaggttttctaccatgcagcaactgaacatggaggaaaagatgtatatccagggcagtgtctttgggaaggttgtgagccttttcagcgacagcggttttcttttattacccacttgcaggataagcactgttcaaaggatgccctacttgcaggattaaaacaagatgaaccaggacaagcaggaagtcagaagtcttctaccaagcagccaactgtagggggcacaagctcaactcctagagcacaaaaggccattgtgaatcatcccagtgctgcacttatggctctgaggagaggatcaagaaaccttgtctttcgagattttacagatgaaaaagagggaccaataactaaacacatccgactaacagctgccttaatattaaaaaatattggtaaatattcagaatgtggtcgcagattgttaaagagacatgaaaataacttatcagtgctagccattagtaacatggaagcttcctccacccttgccaaatgcctttatgaacttaattttacagttcagagtaaggaacaagaaaaagactcagaaatgctgcagtgaaaaataattccacttacacagtgggggactcaaagtcagccacatttcacatactgttactgaagaaagcaccaagtcttaatggaacaaagaccatagaatgaattattttatctcctcccatgatgctgagaggaagcttcgtattctgatctctgagtgaatccctttgttctctgtttaaaaaaatctaaaaagaaaaaggaaaaaaaaaaaagaactgctgtgggattgtcaaccagcttatctgcaggatgtttcagatctgataaatcctgatggaaactggtatgatcagaattcagtaccatccacattggaatatacatggaatattgtaaaacctacatgagcagatgaaatagaagcattaaatatttttatctatatccaaaaaggagcacatttttatatttacaaaaccgtttaagctggtttgaataatttaaaaaagtttcagcacacctatacccccgatctcagagggggccaccaatatctagctatggatcgtgtgttttgtttagaaatcagtagcttggttttcttacttgagccaatatattttcacttatttattatcataaaaatttaccagtctgaatagatcttgtaaatatttgtgaatagaatgaatacctttcatgccactgcagccactggaaatacattctgtggtgtcctagaagcattattggtaggttctaaagttttctagactttcctgtcaattgtaagtaattgtgatatattctatgcagtggatgaatgttctttaaatttgtgtaaatacttctgcaaaggtactgatgctgtaaagtcaaaacagttttgtggaactgtgatttttttttcttttttctttttttttctttttttttgtattatacaccttgtagaactcattttgctggctgaaagagtatggaataatatatctcatgtcattttttagaagaaaaactatttgaaggtattttttggttttccttaacatgtatccactgtaaacgtttgtcgtgtacaagctcagagcttggacagaattttttgtatttgtaaattggtttaaatacatggaattttatacaggttttctcctgtgttatatatgcattatgtgcaggtatgatattttcttcactactttttctatcttaatatagtgtggaattttattgtattattcttccattcttaatactgtaccacattcctgctcagaaactgctcacttccttaaattgtcttttttcccccagcgtgaaatgtatccatttataactgcctattgcctgttctattagcatccaaaaatgtggaaggcctcccaaccaccatttctgctgtgtccttaggatgtgcagtaaaaaatatagacctaacagtttatgttatagaatggctttatttactttggtgactgtttatagtttttaaataaaagactgaacattttcttgagtccttcatttctgagtatgcttaagacatcttaaaaatatagagagaattctaaattcagctgaaggcaaggtataacggtcacctacctatttgattatatgttgattgataacatattaaatagagaacaaataagagaggtcctttacatgacaaatttgcatgaaataagcagattaaccaagtatttatttttcatcttgttataatgcagagcaaatgtagagaacagcaaatgattgatgcagttaaagctcaatatgcctttttttactggatactgtacatttggctaaaagcttttattgtttgatgttgtgtttcttgactgtttattcagaatcacagtgtatccaaatcttcagcttgaatttggaggcagattcttagagtgaaaaagcctcagtttccatattaaaaatgttttaaatattttgattgaattagtaccaatgtaaaatctagtttcttcctgaaggaggatccctggcgctgtcctgccatgtctcaaaggaatgtttgagaaacttcatctaatattagttataaggttgtggaatttatgcttggcccaccttccaagactggcactgcccaacagacaccgctgaaatcatgtgggtatccctaggatggccttcagagccctcaaacttacaagcacctggtagttgacatcatatggggaattttctattcaccgtacttatccaaaaatctcttttaaaaagtaaatttgtgcaacaacgtttatttgaaagataatgtcttctcaaaatcagaaactgcagtggtaattaaattaatagaaaagagaacaaactgcaggtttagaaaaatggttttcatattcaccattcttccacctcattgaattgcatgctgtagttctagcttttctgctataatatgtaaatatgactgtagccttttaagcttcagtctcagcagagaatttcctaaatgcgtttgacctaatgaaactgatcatggcttcccacttaggtttttcttcttatagctttatagaactatataataatatggacttgctgtgtaatggaattaaagtgcttttgcacaataagttctgcaaaaccctctcattcatgaaaaggtgctccttgctagacagaaacttgctgatttacagtattgttatttttgtctaaagttctgtaaatacatgctttaatgttatctttgagaaatctatgtaaataatatagtctacaacatagagactgtataattctgtgttatatatgtgcctagtgctctgttggcactcaataaattttaagtaacaaaattgataatcatatagcgaaggcatatttttcttccaagctcaagtcaggattgtgactatatattaatgagactcagtaatccaacccacacctgagaactcgtctcattactttatagtcatgtcatgtatgtttttttaaccatgaaatgacaataaaatgatttttaaaatgagaaaaaaaaaaaaaaaaaaaaaaaaaaaaaaaaaaaaaaaaaaaaaaaaaaaaaaaaaaaaaaaaaaaaaaaaaaaaagaaaaaaaaaaaaaaaaaa

SEQ ID NO: 28297 - DNA, 5900 bp, Homo Sapiens
cctctgccgctcctccgccccacggctcaggattcgcccaaaatgaggacttccctgcaggcagtggcactctggggacagaaggcccctccccacagcatcactgccatcatgatcactgatgaccagcgaacgattgtgactggaagtcaagagggtcagccctgtctctggaatctctcacatgaactaaagatttcagcgaaagaactcctatttggtcattcagcttcggtaacatgtttggcaagagcaagggacttctctaaacagccctacattgttagtgctgctgaaaatggggagatgtgtgtttggaatgtcaccaatggacagtgcgtggagaaggctacacttccttacaggcacactgcaatctgttattaccactgctcattccggatgacaggagaaggctggcttctttgttgtggagaatatcaagatgtccttataattgatgccaaaactttggctgttgttcacagttttagatcatctcagtttcctgactggatcaactgcatgtgcattgttcactccatgagaattcaagaagattctctcttggtggtatcagtagctggtgggctcaaagtatgggatctttcctcatctatcaacagcattcaggaaaagcaagatgtctatgaaaaagaatccaagtttcttgagtccttgaactgccagacaattcgattttgcacatatactgagagacttctattggtggtattttctaaatgttggaaggtttatgattattgtgatttttcccttctgctgactgaagttagtagaaatgggcagttctttgctggtggagaagtgattgctgctcacagaatcctcatctggacagaagatggtcacagttacatctatcagctgctgaacagtgggctttcaaaaagcatataccctgctgatggaagagtgcttaaagagaccatttatcttcatttactgtgctctacttctgtgcaggaaaataaggaacagagccgtccctttgttatgggctacatgaatgaaaggaaagagcctttttacaaggtacttttctctggagaagtctcaggaagaattactttgtggcacatccctgatgttcctgtatccaagtttgatggttctcctagagagataccagtaactgccacctggactcttcaagataattttgataagcatgatactatgtcacaaagtattattgactatttctctgggcttaaagatggggcgggaactgctgtagtcacttcatcagagtatattccaagtcttgataaactaatatgtggctgtgaagatgggacaattatcattacccaggctttgaatgctgccaaagcaagacttctggaaggtggttctttagtaaaagattctccccctcataaagttcttaaaggccaccaccaaagtgtcacttcattactctatccacatggtctctcttcgaaattagaccaaagttggatgttgtctggggacctggactcatgtgtgatcttgtgggatatctttactgaagaaattttgcataaattctttttggaagctggtccagtaacaagtcttttgatgtcaccagagaagtttaaactaaggggtgagcagataatttgctgtgtgtgcggtgaccattccgtggctctccttcaccttgagggaaagagttgcctcctgcatgcccggaagcacctttttcctgtgaggatgataaaatggcacccggttgagaattttttaattgttggatgtgcagatgactcagtttatatctgggaaattgaaacaggcactttggaaagacatgagacaggagaaagagcacgaattattcttaattgttgtgatgatccacagcttgtgaagtctgtacttcccattgcctcagagacacttaagcacaaaagtatagaacagagatcctccagcccctaccagcttgggccattaccttgccctggtctgcaggtggagtcttcatgtaaggttactgatgccaaattttgcccaagaccttttaatgtcttgcctgtgaagacaaaatggagtaacgttggctttcatattcttctatttgatctggaaaaccttgttgaacttttgctaccaactccactcagtgatgttgactcttccagttcattctatggtggtgaggtcctgagaagagccaagagcacagtggagaagaagacactgacactgagaaaaagtaaaactgcctgtggtcctctttcagcagaggcactagccaagcctattactgaaagcctggcccaaggagataataccatcaaattctcagaagaaaatgatggcattaaaaggcagaagaaaatgaagatctccaaaaaaatgcagcctaagccatcaagaaaagtagatgccagtctcacaatagacacagcaaaattgtttctgtcttgccttttgccatggggagtggataaagatttagattatctttgcattaagcacctcaatattttaaagcttcagggtcctatttctttgggaatttctttgaatgaagataatttctcactgatgttgccaggttgggatttatgcaatagcggaatgataaaagactattcaggagtaaatttattttccaggaaagttttggacttgtcagataaatacacagccactcttccaaatcaggttggaattccaaggggattggaaaataattgtgattctttgcgagagtcagatactatagtttatttgttgagcagactatttttagttaataaattagttaacatgcctttagaattggcatgtagagttggcagttctttcagaatggaaagtatacataataagatgagaggtgctgggaatgacattttaaatatgtcaagcttctacagttgcttacgaaatggtaagaatgaatcccatgtacctgaggctgacctttcacttttgaagctaatttcctgttggagagaccagtctgtgcaggtaactgaagcaatacaagctgttctcttggcggaagttcaacaacacatgaagagtttgggaaagatacccgtcaatagtcaaccagtgtccatggcagagaatggtaactgtgagatgaagcagatgctgccaaagctggaatggacagaagaactagagttacagtgtgttagaaacactttgcctctgcaaactccagtcagcccggtcaagcatgacagcaactcaaactcggcaaacttccaagacgtggaggacatgcctgacagatgtgccttggaagagtctgagagtccaggtgagccaaggcatcattcatggatagcaaaggtctgcccctgcaaggtgtcttaaatggaatctcatcagtaggagctgaatttggacaaattaagaaatccaaaagatgccatttgtttattactgtataaaagcattgttgttattggtcaagttattaggctgtagtggatttgctaatactttagccaacatgtattaaagtgattttaatacatgctgattacaatgcaatacatactgattgaaaatattcatattcatctaattttagaaaaatattgcctagatcattctctattcctgtttcttactttttctgttaatatttccaacagggaatgccagtccacagacacaaatttaatactgctttaaattttctcctatccttttagtccctgaattatataataaacaatgttaaaaccaatgtagtacacaatacttacttacaaatttaatactgcttcaaggtatttaatctaaaattttaccaactttgatttgtctggttaggatattttgttttagtggatatgctttaattcggatcaattactgcagtaaatctcatccctaagcatgaaatgttgtcaacaaatacccagttccatttagttatcaattagcccaaataagagatacaaagtataacagtgaccaaccttgtactgttgagttaatttgaacttctaatgacattgaggctaatgtctttagctcaaggttgatcttgttggccatatagatgtgaactagggaaggggaatcaacttacagcatatcacaattgatccttattaagtataaactcttgtaggtcttttcccagaaagaagcttgactagcaggaattctaaaactgaaatatatcaaacagcataaataggaatagacataaagtgctcttctattaaagcctttggtgatctatttactatgatttatattgtacagttcctcgatttacagaaaatcatcaaaattattaatctacatatcttatgtatataaatattgcctaatccatagaaaaaaggatataaagtattaaatatgtgatatatagctatatctatctatctatgtatctaatagggaagttcaagtcacttcaattgaagaaacatatctctgagcataggagcagcctcaggtcctatggtgggatgcagtggacaggagagggggaaattagaaaagagaactatataattgaaaaagggatataaagcattaaatatatgatatatagctatatctatgtatgtatctaacagagaagttcaagtcacttcaattaaagaaacatttttgagcatgggaccagcctcaggtcttatgctgggatgcagtagacaggagatggggaaattagaaaagagaactgtgtaattgaaatgacgtgggctgcacccttaaggaacttataattaatgatgatctgaataaacataccaggataaagatgtcaaatgagtgtgactcccttaaagtagattaaagtgtgcattctttgtttcctaaaatatgattttactgcttgaaattacatttgagttgaagtttagaaactaacatagcattaatatgaataatcatggaaaattattatcctttgaaaactgattgataaatatattccccctcctttagaaacagtcaaaagccacttcaaacaagtttcaaaataaaggaaggtagcaagttaggcgatggattatattttcttgcttgttgtataccagttgtcaaggacattataaggactcccaaaagcattttgaagaatggcaatatcaaataagtgtatgtcctctcaaatgaggcatttttaattgttaaaatctatttggacgctcaggttatgatatgtttatgaaaaataagcttcattatttttatagctacatcctattattcccttttagaaacaagaataacaataagttttaatagttgccatacttagcatttatcaggtctaatgaaaccaatattgaatctctgataaatattttctgatgttactagctatgggaaattagaactggcacaaccctgacattactaagtggaaatgttaggatttttcggcatcgcatgttagaatctctaaaatttaaacattcctgttaaatgactaaggtttgcttttatcaatatgaattctgaaggccaatatcataccattaactatgaaagcttttaattcctaaaaatagttttagagatattcaagcaatgctctcctaatatccatacgcaagtgtgtttatgacacaaattcactagtctgtttaaaaatgaattctttatattgactggtgttccacatatttcagtaatttctgttatgagaggacttgaaatagcaaattgccacacagttaactggatagaccacgtacgtggtgatcataaccacttggtactacacccagaaactcaaaattgtctttctcctgatgagatatgggtgcccttttgtacgtctaggcctaggtaaccagtggagtgattatattagcaaatgtgtttgtatccagagtcttcctgtcattgtaataaaaaatttatttaaaaaaaaaaaaaaaaaa

SEQ ID NO: 28298 - DNA, 3143 bp, Homo Sapiens
ctcagtcaggggtccccttctcttcagttgctcaagccagaagtcaaggtcatgtccttgatacttccctcttccccatgcctcacatccagtcaccaatctcctaaaatatctagaatgtgcacagcttccaccattctttctaccaccaccctactcccccatggccatgtcaggccaccacccgcccattcttcaaaactcccttcaggcctcacctcccatgcctcccctgagttcccccagtcccaggctgcttctctctggtggtgttgccattacccatctcttctattaaacagagtgacccaagagtggagagtgggttttgactttgtatccctggtgcttgactcataagtaggtgctcaacaaaaaaaaaaaaaaaaaaaaaaagaaagaaaaagaaaaagaaaagaaacaggcattagtgagttgttagctatttagttccttggttaacagattacttaggggatctggttggctgtcagtttcttgctttgtaggctggctttcttgggcccctcttcttagtctgtaccctctccttgagctctctcatctatgcccatggctcagatgaccatctgtgatttgctgtcctccaaatgtgtctgtaagtgagaccacatgaccagctgcctcctcactggccatcccacccaagtgtctagcgggctcctcacactcaacatgtcctaaatgctgggtatcgcatgaagcactgccaatgtgctaactagaatctctacagcaaccctatgaaaaatgaaggcccagagaggtcaagcaacttccctgagatcacacagcagtcagtgtcaggtcacgtatgaaccatcactgtgccactcggaggtgggcaacgctcctggccttgttcctaatggtgctctgaactgcggcctctgtttcaggtacggctcctacctggtctggaaagagctgggaggcttcacagagaaggctgtggttcccctgggcctctacactgggcagctggccctgaactgggcatggccccccatcttctttggtgcccgacaaatgggctgggtaagtgtggccacagcatgtgtccctgatccctggatccgacccttggaggacgtggggcatcacatatgacactgggtcagtgtctataggcggggccaggggagacaaaaggccatgtctctctagctgtaagcagcccacaccctggagcctcccctctactgactcctccggtgagggaagctattaaagcagaaggggttgcaggggtgggtttgggggccactgtgtaggaaaacccacacgaagcctggtactgtgtgggcagggtcactggcccctctacataacaacttcttcttttttttttttgagatagagtctcactctctcacccaggctggagtgcagtggtgagatctcggcccactgcaacctccacctcctgggttcaagtgattcccttgcctcagcctcccgagtagctgggactacaggtgtgcaccaccactcctggctaatttttgtatttgtatttgtatttttttagtagagatggggtttcactatgttggccaggctggtcttgaactcctgacctcaggtgagctacccgccttggcctctcaaagtgctgggattacaggtgtaagccaccgcgcccggctgactgcttcttttttaaagttttaaacttttttaagagatgaagactcgctgtgttgcccagggcagactcgacttcctgggctcaaacgattgattctcccgcctttacctcttgagtagctgggactccaggtcacgtcactgtgcccggcagccttttttttttttgagacagagtcttactctgttgcccaggctggagtgcagtggcatgatctcggctcactgcagactccacctcccaggttcaagtgattctcctgtctcagcctcccgagtagctgggattacaggcatgcagcaccatgtccagctaattttctgtatttttttttttttgagacggagtctcgctctgttgcccaggctggagtgcagtggcgtgatctcagctcactgcaacctccgtctcccaggttcaagcaattctcctgcctcagcctcctgagtagctgggactacaggcacgtgctaccacgcctggctaatttttttatttttagtagagacggggttttaccatattggtcaggttggtcttgaactcctgacctcaggtgatccacccgtctcagcctcccaaagtgctgggattacaggcgtgagccactgcacctgacaaatagcaagtttttgtttgggccttgtagtaatgctgggaggtcagcatcgctctcagtggaggctctaagctcagagaggggaagggacgtgcaagacctcctaagccaccaccgcacccttgaacaaaccgagttcacttcaggcatgtcatgtgcaccccacacaaggcatgggtcaggtggcatgactgttcccattttacagatgaggaaactgaggctgcgatgggggaggggcttggccaggtcactcaagggtggagtgggggtgagtgaggctcctgactcccaaatccagtgggagttgggcagtgggacaggcacttgggtgaacgcggtgcctcaggcctccccatcctccgtcccccaatctctgcaggccttggtggatctcctgctggtcagtggggcggcggcagccactaccgtggcctggtaccaggtgagcccgctggccgcccgcctgctctacccctacctggcctggctggccttcgcgaccacactcaactactgcgtatggcgggacaaccatggctggcgtgggggacggcggctgccagagtgagtgcccggcccaccagggactgcagctgcaccagcaggtgccatcacgcttgtgatgtggtggccgtcacgctttcatgaccactgggcctgctagtctgtcagggccttggcccaggggtcagcagagcttcagaggtggccccacctgagcccccacccgggagcagtgtcctgtgctttctgcatgcttagagcatgttcttggaacatggaattttataagctgaataaagtttttgacttccttataaaaaaaaaaaaaaaaaaaaaaaaaaaaaa

SEQ ID NO: 28299 - DNA, 3425 bp, Homo Sapiens
agacttccctctagaatcctccaacatggagcctcttgcagcttacccgctaaaatgttccgggcccagagcaaagcttttatgcctttgaagtgaaggatgcaaaaggaagaactgtttctctggaaaagtataaaggcaaagtttcactagttgtaaacgtggccagtgactgccaactcacagacagaaattacttagggctgaaggaactgcacaaagagtttggaccatcccacttcagcgtgttggcttttccctgcaatcagtttggagaatcggagccccgcccaagcaaggaagtagaatcttttgcaagaaaaaactacggagtaactttccccatcttccacaagattaagattctaggatctgaaggagaacctacatttagatttcttgttgattcttcaaagaaggaaccaaggtggaatttttggaagtatcttgtcaaccctgagggtcaagttgtgaagttctggaggccagaggagcccattgaagtcatcaggcctgacatagcagctctggttagacaagtgatcataaaaaagaaagaggatctatgagaatgccattgcgtttctaatagaacagagaagtgtctccatgagggtttggtctcattttaaacattttttttttggagacagtgtctcactctgtcacccaggctggagtgcagtagtgcgttctcagctcattgcaacctctgcctttttaaacatgctattaaatgtggcaatgaaggatttttttttaatgttatcttgctattaagtggtaatgaatgttcccaggatgaggatgttacccaaagcaaaaatcaagagtagccaaagaatcaacatgaaatatattaactacttcctctgaccatactaaagaattcagaatacacagtgaccaatgtgcctcaatatcttattgttcaacttgacattttctaggactgtacttgatgaaaatgccaacacactagaccactctttggattcaagagcactgtgtatgactgaaatttctggaataactgtaaatggttatgttaatggaataaaacacaaatgttgaaaaatgtaaaatatatatacatagattcaaatccttatatatgtatgcttgttttgtgtacaggattttgttttttctttttaagtacaggttcctagtgttttactataactgtcactatgtatgtaactgacatatataaatagtcatttataaatgaccgtattataacatttgaaaaagtcttcatcattttcagtatttctctctgcattattttttagaagcaactcaaattctgtaatcataatattaccaagtaagtcagtctttatttttgcgtgaaaatcccaagtgtagaaaaaaggacatgagtataagatcatttaacttgattccttataggctgatttgggttgctaatgtattcgtactagattagccacttgggaggaattcaatgctgcatcattctgatagctgaaatagtaaaagtcaactccaaacagcctaaattctagtataaaaagggggtgatcatacaagtcctaaagtgtagatcagcagtcactgaacctcttagagtcacaaggcatttcttctcccaaagtcatgacctttatattttgttagccttataattgactaacaaagcaacctgccaagttggtgaaggttaattattgcctcatgaaatatacattcatcgcataaaagaattaaataggaagatggccaaaaatgtaaaaaagtcgtataaatttgtctaagaagaaaaagacccaatttaagtagtctgtgacttgactcccaaattctgacctgatggatgaaagtgaagatgtttcgtatggcaaattcagtaatgctacctcagtatatagttctgtatacgtatttggaccaaagttattagataaaccaaaaatatttcatgaagcatcttctgcttcagagtccatatccagccacccagctatgaatgtatttagaaagatatttggtggaggtggaatttctaccagaggtcaagaggatttgtagggatagcctcaagaatgccagatgagtgtgtcagaaagcctgctcctacctctcgccagctgcgtgactttaggcaagtcacttaagtaccttatttcagtttcctcacctgtaaattgaacaggggttgaatggaataaaaagccctttgcaactctaaaagtcaattaacacacttactaaggtgttttaagtgaccaggaaggaaatcaaaactaacctggattgttagcgaagaaaacagaagccaccaacaagcctatctgtcctttgcaattttgctccaagagcctattagcaatttgaattctgagcctctaagaaaacttatgctcaggtggcccctccaagtgttggtgccagagcactcttgccttgtatcctcacctacgccttccatgaactcatagcagtgctgtggcactgcaggggtgttttatgcattcacgttaggagcatgagcagaactgcatatgccagcaccacatgggcagcagagactccccactgccagatggatgataatggagctgcactgggaacaaccaggactgtcccagtcaacatgatacagatgaacatcctgccttaagtcactagctctctccaaagccagataaagtgggtttcttcacttacatctctctaatcttggctgccttattcaacccacagactctatgtcagtgctggattttctccccttgccctttaggtaagcagagtaggcaggaggagatttgaaagcgtgtcatacatattgccttgaaagaaaggacattcaggtgtcccttcggggttctgtaacaattaggctatgtgtgctgagagagggagcggagtcatttgctgatgtgctgctacctgtaactcaaatgcctcataggaataccagcggacaaacacatagaggaaaagttgaatctttcctatattggacaatcttccttcagtcttgtttctgcatcaaaaagtctgggacacagagtgctacaggatgcctgggctaaggactgtaacagaaaaatatcaacatcagagcctggcacagtggctcacaccggtaatcccagcactttgggaggccgaggcgggtggatcacttcaggtcaggagttcgagaccatcctggccaacatggtgaaacccccatctctactaaaaatacaaaaattagccgggcacggtggcacatgcctgtaatcccagctacctgggaggctgagtcagaagaatcacttgaaaacaggaggctgaggttgcaatgagccaagattgcaccactgcactccaacctgggcaacagagcgagaccccatcttaaagaccctgtctcaaaaaagagaaaaaaaagaaaaaaaaaaaaa

SEQ ID NO: 28300 - DNA, 5722 bp, Homo Sapiens
agagcaggaatttcccttcaaggtagcaggagatgaacgcgtgctgctccaggattttacagaactgattctgcagcaaagacaaatgttgcctgtatttgccagatagtataaacaggagcaaaagttgcacagctaaaccaggggctcattcccaggacagacatgcagttatggattccgaaagacaagtcaaggacactgatgacattgaaagccctaaacgcagtatccgagacagtggctacatcgactgctgggattccgagcgcagcgactccctctctcctcctcgccacggcagagatgattccttcgacagcctggattcctttggctctcgctctcggcagacgccttcaccagatgtagtcctcaggggaagcagcgatgggagaggaagcgactctgaatccgacttgcctcatcggaagctgccagatgtgaagaaggatgacatgtctgcacggcggacttcccatggtgagccgaaatcagcagtgccttttaaccagtacctcccgaacaaaagcaatcagacggcctacgtccccgcgcctctgagaaagaagaaagcagagagagaggaataccgcaagagctggagtaccgccacctccccgctgggtggggagaggcccttcaggagcaccagcatgtttgacatgcggtgtgaggaggaggccgcggtgcagccgcacagcagggcccgccaggagcagctgcagctgataaataaccagctgagggaagaggacgacaaatggcaagatgacctggctcgttggaagagtcgtagaagaagtgtttctcaggacttaatcaagaaagaggaagaaaggaaaaaaatggagaagttactggctggagaagatgggacaagtgaacgaaggaaaagcatcaaaacctacagagaaattgttcaagaaaaagagcggagagagagagagctgcatgaagcatataagaacgctcggtcccaggaggaggcagaggggatccttcaacagtacattgagaggttcaccatcagtgaggctgttctcgaacgcttggagatgccaaaaattctggaaagaagccattcaacagagccaaatttatcctccttcctgaatgaccccaatcccatgaaatacctgcggcaacagtcactgcctccacccaaattcactgccactgttgaaaccaccattgctcgtgccagtgttctggataccagcatgtcagcaggcagtgggtctccaagcaaaactgtcactcccaaagcagtgcctatgctgacacccaagccttactcccagcccaaaaattctcaagatgttctgaagacctttaaggtagacgggaaagtcagtgtgaatggagagacggttcatagagaggaggagaaggaaagagagtgtcccacggtggcacctgcccactccttaaccaaatcccagatgtttgaaggtgtggccagagtgcacgggtctccactggagctgaaacaagacaacggtagcatcgagatcaacataaagaagccaaactctgttccccaagagctcgcagcaaccactgagaaaacggaaccgaatagtcaagaggacaagaatgatggtggaaaatcaagaaaagggaatatagaacttgcctcatcagaaccacagcattttacaacaactgtgactcgatgcagcccgaccgtggcctttgtggaatttccctccagcccccagctgaagaatgatgtgtcggaagaaaaagaccagaagaaaccagaaaatgaaatgagtggaaaggtggagttggtgctgtcacaaaaggtggtaaagccaaaatctccagaacccgaagcaacgctgacatttccatttctggacaaaatgcctgaagccaaccaactacatttgccaaatctcaattctcaagtggattctccaagcagtgagaagtcacctgttacgacaccttttaagttctgggcatgggacccagaagaggagcgcaggcgacaggaaaaatggcaacaggaacaggaacgtttgctccaggagagataccagaaggagcaggacaagctgaaagaagagtgggaaaaggcccaaaaggaggtggaagaggaagaacgcagatactatgaggaggagcgtaagataattgaagacactgtggttccatttactgtttcttcaagttccgctgaccagctgtctacctcttcctccatgactgaaggcagtgggacaatgaataagatagacctgggaaactgtcaagatgaaaaacaagacagaagatggaagaaatcattccagggagatgacagtgacttattgctgaagactagggaaagtgatcgactggaggagaagggcagcctaactgaaggggccttggctcattctgggaaccctgtatcaaaaggagtccatgaagaccatcagctggataccgaggctggggccccacactgtggaacaaacccacagcttgctcaggatccatcccagaatcagcagacatcaaatccaacgcacagttcagaagatgtgaagccaaaaaccctcccgctggataaaagcattaaccatcagatcgagtctcccagtgaaaggcggaagtctataagtggaaagaagctgtgctcttcctgtgggcttcctttgggtaaaggagccgcaatgatcatcgagaccctcaatctctattttcacatccagtgtttcaggtgtggaatttgtaaaggccagcttggagatgcagtgagtgggacggatgttaggattcgaaatggtctcctgaactgtaatgattgctacatgcgatccagaagtgccgggcagcctacaacattgtgacacggctttcaagcttccggatcactcaccatttctttactgagagtgtcccctggcaactgcttaacaaaatcccaagctcaggggcttctcagcatttacctaatttctgaaaggctcttctgaaaggtggtatctgttctttcgtagcacagtgtttatgtttttcctgtttattgttttggttttttttttttttttgcatttgcacagtatacacaaaagaatatggggttgtaatgatcctgaatagctcaaaaaaggttttagcatggtcaaacaggcttatggtttaaaatgtgttattctcttctttgggaattagctaaatgatgcaataaacctgttttgttttagaatgtctaggaattaaacactttatgtttacagaattgagctgcagaaagtgcaagacatgccaatttgagacacacggtcttctaagactgaaggataaatttaatgcatttcagaaactaaacatcacagcaagctctatctctgagctataatttgtttttaatgcaaagacactagtttgataatatatactgtaatcctgaaacatttgtgttacttacctttggaggtagaaattataccaataaattattgcaccgttagtattagattctgtgtaccttggaagttatgtcattaatataggctggttcatcaaataaagcaaaaccttgcaatatcagctagatttacactccgggacgttgcccaaaggtaggaagaaagcagagggaaatatttcagtcatcatttccaaagtcattatcaaaatctgtgaggaagtttaatcttccaaagagtcaatgtcagacatcaggcctctgttgcctgcttctctcgaggcactagattaggagtcttcaataagagacttaacatgaggtatatggaagatgaggcaccgagataagttcatcattaggtgtgagcactgctcacccttgctggcaagttctccttaagggcctgaagcacaggtgtccaaagaaaagcgttaagtccatcttaatggaatctatgtggtatatgatgtggtcagcccctggtctgtgatcagcaagaacctacagcacagattatgccctgcccacttcaatgaatacctactctcctccattctccatcactttttttgctgtcaagaactccggaccttgcccatggagaagtttagagaggaactcttgtggagagctggtttattttctgccctgtgcgacgagtttcagctggccaagaaaggagtcaagttattaaaaagcatcacaatgtagatctccaggctggttttttgttttttgttgttaagactggggaaagggggactatttattctgccttaaatcaatggcaaataagtcaagatgacattttgtgaatgtagactatggatacactcctaatagattgatgtagtcataaaagggggtcaagtagatgtttttctgttatgtaagcaataatttttccgtgtcttattgagtatggctagcgatcatttattacatgctagatgggttctttgcatgtgggttccatataggtgcagaaatttcctcagccactggagggatttcgaccatatttgtcatttggatgagctgttattagattgaaatctacacatcatttcattaaaaattgtgccttagaaaacgcaaagctgttgcacatggcgataaattatggatgcagtacattgaagagagatgaagtcacttccaagtttccaagacttctcatggaggtgtttgctgttttacaggaaaaaataaaaagaaaaaaagaaaaaaagaaaaaattaaaaagaaaaattgttttgaaaatgtacagatcaagtccaatattttgattatccacctgcatgttttattaaatattttgataatgtggatgtttacactttgcatgatattagcagagtaccactagtaatgcacaaacatgtacaatatggtcattcataaccgatttttatagaatactttttacatgtgcaactccatccgttatgtaaggattacgtgaatattgcacattcccttctggtttcacaaacccatttatacatatttcttagtgaggctcattgtacatgtattgaagctagaatcgagtcaagaaaaataaagccccattctccaactgcaaaatgtgctttcccataatgaacactagtcaccagcacagaataatctccaacattttctaaattctaattgccaactgtttctatttatatttgatttatatttcatttggagtctgttacatggcagcttaggcagactagatcttgttttttccaatgcagcataatgagtatgatctatttcttttcaaataatctttgagatcccaggaaaaaaaaaatgctctgctccattgagctataatgtaaatgtgcttgtttaaaaaacaggtgaggcaagtgagtgatttattgttcctgaggaagtatatctgattttttttctcatactccaaaagctagtccctactctttaataaaaataatgggtaactttttgtttttcactagcgaacttccatgacatttcttttctatgtagtgtgattaatgcaatacatattatagttatctatacgcagtgtaagatttaacaaactgaaatgatccacctcatatgtgagtccgtccaaaagatgttactgctctgggtgggccagtgttctatatcggttatactaactttcatttaaagtatttattctaaaatgcctctgagaaacagtaaaaaataaaaacaacaagttgtctaaaatgcaacagcttttatagtaaatgtacatttataaataaaatactcaaatcaaaaaaaaaaaaaaaaaaa

SEQ ID NO: 28301 - DNA, 4701 bp, Homo Sapiens
cagtggaacccttcccccatgtccatccagtgcatccctgtgcggtgtggagagccaccaagcatcatgaatggctatgcaagtggatcaaactacagttttggagccatggtggcttacagctgcaacaaggggttctacatcgaaggggaaaagaagagcacctgcgaagccacagggcagtggagtagtcctataccgacgtgccacccggtatcttgtggtgaaccacctaaagttgagaatggctttctggagcatacaactggcaggatctttgagagtgaagtgaggtatcagtgtaacccgggctataagtcagtcggaagtcctgtatttgtctgccaagccaatcgccactggcacagtgaatcccctctgatgtgtgttcctctcgactgtggaaaacctcccccgatccagaatggcttcatgaaaggagaaaactttgaagtagggtccaaggttcagtttttctgtaatgagggttatgagcttgttggtgacagttcttggacatgtcagaaatctggcaaatggaataagaagtcaaatccaaagtgcatgcctgccaagtgcccagagccgcccctcttggaaaaccagctagtattaaaggagttgaccaccgaggtaggagttgtgacattttcctgtaaagaagggcatgtcctgcaaggcccctctgtcctgaaatgcttgccatcccagcaatggaatgactctttccctgtttgtaagattgttctttgtaccccacctcccctaatttcctttggtgtccccattccttcttctgctcttcattttggaagtactgtcaagtattcttgtgtaggtgggtttttcctaagaggaaattctaccaccctctgccaacctgatggcacctggagctctccactgccagaatgtgttccagtagaatgtccccaacctgaggaaatccccaatggaatcattgatgtgcaaggccttgcctatctcagcacagctctctatacctgcaagccaggctttgaattggtgggaaatactaccaccctttgtggagaaaatggtcactggcttggaggaaaaccaacatgtaaagccattgagtgcctgaaacccaaggagattttgaatggcaaattctcttacacggacctacactatggacagatcgttacctactcttgcaaccgaggctttcggctcgaaggtcccagtgccttgacctgtttagagacaggtgattgggatgtagatgccccatcttgcaatgccatccactgtgattccccacaacccattgaaaatggttttgtagaaggtgcagattacagctatggtgccataatcatctacagttgcttccctgggtttcaggtggctggtcatgccatgcagacctgtgaagagtcaggatggtcaagttccatcccaacatgtatgccaatagactgtggcctccctcctcatatagattttggagactgtactaaactcaaagatgaccagggatattttgagcaagaagacgacatgatggaagttccatatgtgactcctcaccctccttatcatttgggagcagtggctaaaacctgggaaaatacaaaggagtctcctgctacacattcatcaaactttctgtatggtaccatggtttcatacacctgtaatccaggatatgaacttctggggaaccctgtgctgatctgccaggaagatggaacttggaatggcagtgcaccatcctgcatttcaattgaatgtgacttgcctactgctcctgaaaatggctttttgcgttttacagagactagcatgggaagtgctgtgcagtatagctgtaaacctggacacattctagcaggctctgacttaaggctttgtctagagaatagaaagtggagtggtgcctccccacgctgtgaagccatttcatgcaaaaagccaaatccagtcatgaatggatccatcaaaggaagcaactacacatacctgagcacgttgtactatgagtgtgaccccggatatgtgctgaatggcactgagaggagaacatgccaggatgacaaaaactgggatgaggatgagcccatttgcattcctgtggactgcagttcacccccagtctcagccaatggccaggtgagaggagacgagtacacattccaaaaagagattgaacacacttgcaatgaagggttcttgcttgagggagccaggagtcgggtttgtcttgccaatggaagttggagtggagccactcccgactgtgtgcctgtcagatgtgccaccccgccacaactggccaatggggtgacggaaggcctggactatggcttcatgaaggaagtaacattccactgtcatgagggctacatcttgcacggtgctccaaaactcacctgtcagtcagatggcaactgggatgcagagattcctctctgtaaaccagtcaactgtggacctcctgaagatcttgcccatggtttccctaatggtttttcctttattcatgggggccatatacagtatcagtgctttcctggttataagctccatggaaattcatcaagaaggtgcctctccaatggctcctggagtggcagctcaccttcctgcctgccttgcagatgttccacaccagtaattgaatatggaactgtcaatgggacagattttgactgtggaaaggcagcccggattcagtgcttcaaaggcttcaagctcctaggactttctgaaatcacctgtgaagccgatggccagtggagctctgggttcccccactgtgaacacacttcttgtggttctcttccaatgataccaaatgcgttcatcagtgagaccagctcttggaaggaaaatgtgataacttacagctgcaggtctggatatgtcatacaaggcagttcagatctgatttgtacagagaaaggggtatggagccagccttatccagtctgtgagcccttgtcctgtgggtccccaccgtctgtcgccaatgcagtggcaactggagaggcacacacctatgaaagtgaagtgaaactcagatgtctggaaggttatacgatggatacagatacagatacaatcacctgtcagaaagatggtcgctggttccctgagagaatctcctgcagtcctaaaaaatgtcctctcccggaaaacataacacatatacttgtacatggggacgatttcagtgtgaataggcaagtttctgtgtcatgtgcagaagggtatacctttgagggagttaacatatcagtatgtcagcttgatggaacctgggagccaccattctccgatgaatcttgcagtccagtgtcttgtgggaaacctgaaagtccagaacatggatttgtggttggcagtaaatacacctttgaaagcacaattatttatcagtgtgagcctggctatgaactagaggggaacagggaacgtgtctgccaggagaacagacagtggagtggaggggtggcaatatgcaaagagaccaggtgtgaaactccacttgaatttctcaatgggaaagctgacattgaaaacaggacgactggacccaacgtggtatattcctgcaacagaggctacagtcttgaagggccatctgaggcacactgcacagaaaatggaacctggagccacccagtccctctctgcaaaccaaatccatgccctgttccttttgtgattcccgagaatgctctgctgtctgaaaaggagttttatgttgatcagaatgtgtccatcaaatgtagggaaggttttctgctgcagggccacggcatcattacctgcaaccccgacgagacgtggacacagacaagcgccaaatgtgaaaaaatctcatgtggtccaccagctcacgtagaaaatgcaattgctcgaggcgtacattatcaatatggagacatgatcacctactcatgttacagtggatacatgttggagggtttcctgaggagtgtttgtttagaaaatggaacatggacatcacctcctatttgcagagctgtctgtcgatttccatgtcagaatgggggcatctgccaacgcccaaatgcttgttcctgtccagagggctggatggggcgcctctgtgaagaaccaatctgcattcttccctgtctgaacggaggtcgctgtgtggccccttaccagtgtgactgcccgcctggctggacggggtctcgctgtcatacagctgtttgccagtctccctgcttaaatggtggaaaatgtgtaagaccaaaccgatgtcactgtctttcttcttggacgggacataactgttccaggaaaaggaggactgggttttaaccactgcacgaccatctggctctcccaaaagcaggatcatctctcctcggtagtgcctgggcatcctggaacttatgcaaagaaagtccaacatggtgctgggtcttgtttagtaaacttgttacttggggttactttttttattttgtgatatattttgttattccttgtgacatactttcttacatgtttccatttttaaatatgcctgtattttctatataaaaattatattaaatagatgctgctctaccctcacaaaatgtacatattctgctgtctattgggaaagttcctggtacacatttttattcagttacttaaaatgatttttccattaaagtatattttgctactaaaaaaaaaaaaaaaaaa

SEQ ID NO: 28302 - DNA, 3681 bp, Homo Sapiens
ttttctgttcctgtcttagtttgctgaggataatggcctctagctccatctgtgttcctgcaaaagacatgatctcgctgttttttatggttgcacatcttttgttctaacatttggtccttaaacctggttcctgacacagagctcctaaatcccttggaattttctgggtgatagaagcgtcctttgttctcatgaggtgactcttggtgggctccttatttggggactggtcaccaaaaagacctatggttggaagcgttgtgctgtcagccccattccccatcctctggcgtggggagtagagctggagctcaatcatgcctatgtgataaagcctccagaaaactccttaaaagacaggacttggagagcttccgggttggcgaacacatccatgttccaggagagtggtgcaccccaactccacaaggacccttccaaacctcaccctgtgtatctcttcaactggcttcatcatttgtgtcctttaaaatatcctttgtaataaatcagcactagtaagaaaactgttttcctgggttccatgagctgttctagcaaatgttcaaacctgaggagggagttgtggggacctccaatttacagccagttggtcagatgcataggtgatgcttggccttgcacctggggtctgacatgcggatggtcctgtgtgactgagcccttaacctgtggagtctggtgctcactctgcttagggcttctcttgcctttttagtgtccttctaggcggcctttccttcctcttgtcagctcagaaaactcttcttccacttcccttcttctaaaccatcccttacatctactcctttccagccgaccaagagcagaaccacggctggttccactgccaccatgctgtcccacactgtctcctcaggatgtattcagatgtccagccctccccccagtctaggagccccccctttgaggaaagggatgctggcctagtcaactctttcccagcaccaggtacagcatctggcacgttccatctttttcatggactctccccaggcggcctgaccttccctcctctgaaccggtgcatttcttgtctgcatcacgtttgccctaatcagatatcaccttatttcctcttttaaaaaatgctttttttctctggcaggcttcatcggaatcacaattttcattcatttagtaactgttgttgtttattctatgtatttttgcaggaggcctgaggtgggctgtgttctcctcctatggcagggcttcactctcctcctcctccgttggggcttcgctgtccctgggataagaataacaatgccaaggttttcattcttgaaaggagcaattaagcttctcaccccctcctcattttagatgggaactgtgagggccccatcatttacccagggtccctgttgaggatcttgtcctcattagatgacttcttgtgcagcttccatgcatgattatttattcttgtggcactgagaggtttgtacatatctttaaaccagagcggctgtccaaatgaggaaagtccatcctagaagatagaaagggaaatattaattttgcatgtcctctgctttccctggccacagcaatgaatcctccaatgtacctgactctcccttcgcgaagagcatcccctccgtggcagaaatctgaaaatgcccctggggagacacatgcacaagacagtgagtgatgcagccgtttcccacgtatctcacaatgtacttctctggtcttattaggactaaatgagtatctcagtccataatcacagggagaaccaccaccacagaccacatacccggggtcttgaaaataattccatgcatgtgggactttcagaagctctccatgtctgcccagaagggccccacaatatactggggggactttgtatgtggctcagcatggagcaggggcaggattttcagtcccactcactcccttggccaagtgcccttgtgcagtgaacaaactgcacgaccatgctgggcagaagcattttatatcagtccccttcggacttagtctcacaggcatcatttgatgggggatgggagatgaagtggttcttcgttttctagatactttattctataagttggatcacctcaagcaaatgcgtgagtgcagctagccaagttctctatctcacagtcttcatatggctggctgtcgctgatgagtgagtgagctacgaaatcagcttaaagcacaacatgttatttttgaatatgaataaaataggaaaaggcagagtgcattgtgtgaccatggggtaagtaagacactctccctttctccttctcagttttcctgtcataaaaggacaaactactatctaaggtctccgtagttaaaattcttttttgttgttttttttttatttgagacagtttggctcattccccaggctggagtgcaatggtgctatcttggctccctgcaacctgcgcctcctgggctcgggcggttctcctgcctcagcctcccaagtagctgggattacacgcctgcgccaccacacccagctaatttagtatttttagtagagatggggtttcaccatgttggtcaggctggtcacgagctcctaacctcaagtgatcccaaagtgctgtgattacaggcgtgagccatcctgcctggcctttctggttaaaattctgtgaggtttgcataaaaggaatagagtaggggcccaaaaaccagtaagatgagaaaatagtgtttcctcagttctaggatccaggggaaaaaaaaaagaaataaaagagaaaatactgtttcctgccacttaagaggaaggactcacatatcctaccttccatcagccttgaaggagacaagtgccctctctctcacacccggtggccttcccttcccctttcccagagcctccaagaaggcccctggcctggcctgatgcccaccatcagcagcaataggcaccaaaacctttctccttcctatccctccccacctcccgaaagggctggggacagcaggtgtgtccttgttagttccatccagctcagctttggctggggagctaatttcactggagccaggctaagcattagggtaagtatttgtcctgtcttgggcagtttcctcactgaaaaatgagggcagagttctaagccctcctctaattctaaaattctaattaaaacgtcgcgagactagtggtgcatgcctgtaatcccagctacttgggaggctgaggcaggagaatcgcttgaacctgggaggtggaggttgccgtgagccgagatcgtgtcattgcactccagcctggcaacaagagggaaactccgtctcaaaagaaaaaaaaaatcaccagactaatatttaccttgagaatccttcttcatcttcttgtaatgaccttcggtgacaacatatctgttttagaagaaaacgcaattaagattatctatgacaacaaccaccgtctccaaatctgtattgattccttttattcattataagtctcatctacctgatgaggtaacttttttgaagaccggaaaaaaaaaaaaaaaaaaaaaaaaaaaaaaaaaaaaaaaaaaaaaaaaaaaaaaaaaaaaaaaaaaaaaaaaaaaaaaaaaaaaaaaaaaaaaaaaaaaaaaaaaaaaaaaaaaaaaaaaaaaaaaaaaaaaa

SEQ ID NO: 28303 - DNA, 8022 bp, Homo Sapiens
gagcagaagaaagagaggacttatctccagcatctagcactacagagcagaggctgtgtggagaatggctgaaaaatcagaattggttgtagaagcagttttctttctggttgtgagtatgagcccggcagacaccatgagcgctgttgcaggggagtcggcctgtgcttgacacatgtgtttcccattgatagctggagacagcccagtagctgtgagtcggtctgacaaagccatattgaagtacggagtacggtttcaaagcagtcagaaaaagaacgggaatgctgttcaggaaattcttcaggcatgggcagggacttggctgcagttctgcagttggaaaatctgactggggcagcttctgagcgcaggctgggcctgcacacactcagcgggccgagtggccacctccttcagagctgctcagcacgccgtgggatcgcgggcggttttcatcggccggtttgtgaaacggacaagagagatgcctcaggagcagtacactcaccaccggagcaccatgcctggctctgtggggccacaggtatacaaggtggggatttacggctggcggaaacgatgcctgtatttctttgtcctgctcctcatgattttaatactggtgaacttggccatgaccatctggattctcaaagtcatgaacttcacaattgatggaatgggaaacctgaggatcacagaaaaaggtctaaagctagaaggagactctgaattcttacaacctctctacgccaaagaaatccagtcccgaccaggtaatgccctgtacttcaagtctgccagaaatgttacagtgaacattctcaatgaccagactaaagtgctaactcagcttataacaggtccaaaagccgtagaagcttatggtaaaaaatttgaggtaaaaactgtttctggaaaattgctcttctctgcagacaataatgaagtggtagtaggagctgaaagattacgagttttaggagcggagggcacagtgttccctaaatctatagaaacacctaatgtcagggcagaccccttcaaagaactaaggttggagtccccaacccggtctctagtgatggaggccccaaaaggagtggaaatcaatgcagaagctggcaatatggaagccacctgcaggacagagctgagactggaatccaaagatggagagattaagttagatgctgcgaaaatcaggctacctagactgcctcatggatcctacacgcctacaggaacgaggcagaaggtcttcgagatctgcgtctgcgccaatgggagattattcctgtctcaggcaggagctgggtccacttgtcagataaacacaagtgtctgcctctgaaagactatccatagtggacattgttggcagcataaaggccttttttggctttggacactggctgccagctatttttactagaacacagaaagcctatcaaagaccttgtgtgtatgtgtacgtgtgtgtgcgtgcttgagtgtgttcgcgtgtgtgggtggatataaatatatataaatatatataaataaatatatatatcctctgtataaaatgaggtttcagtacaaaaggaaccatgggtgaccctgcgatatccactgtcattttccatcccatccccaccacctgagtgacagaaatctaaacacacatccgtcccaacattccccagaccattcagaatcacacagcgtattaaacactgacagaatcttcatctagatattcgagtagcagcatatcttctcttttagtgtcattacgagggagtgatggcaggaatctcagtcgcactcaagctctgagacctttgtatcaaaaataggcatttgatttcctgttttagctttagtaaggctggctaacttccccctcttcaagctaggaactggcaatgctgtagaagtcagccgtaggaattcaaaatggctggcctaccttggctaccagacatattggggtttttgtagttgaatgaatgaggaggatgaatttcagcaaattttgaactgctcacccaacttctgctatcttgctccctccaaactcacagattctcctacagtcaaattaggagctgtaaatcagcacaaaataagataacagctgttcctcagtgagctggaagctacttaatggcctgatgggcaatgaacaaacggatgatatgtctctgtttaagggaaaaatggcttaaaagctgttctgttctcacttctgactttaaccaaaagatttcaacccacaatgatcaggtcaatcaaaatccctaagagcagaactcctaccccaaaagaagcctggaagtctaattaagagtagcataaggaacctaattatgtttaccatgtttcttgggattggtgggaaatgtcaaaacatgccctttatttttaaaggcattcacaaactctctgactttgttcttcttatatattttttcagtgccgggatattcatattcctaaagccactattgtgttttctctaagaagcactacatgccaccagaattgtgcactgaaagataatacaaactgagtgtctttatgagaatcactgtgtcccctgaggcccagcagtacctgcttccctgtatgtggaagcagcacctcattcccgccatcagctacctctcatcaccccaccttcatcatcatgctccagggtcaccctggccagctcttgtgctgggacaggggattacaccatctctgttcaaagagggggaaatgtgcctatgccttaagtcaatgcactcagcaaggagaagcacatcttatttatcttgttacctatagtttactttgggtgattggaggggaatgacttagttatgactggacatcttaaaagctgatagacaagccaaatggctggcagatgatgtggatttcaaagagcccagaatgaactcatcactggcttagacagtcctggatgccatttggaaagtagtggccctgcaagcctaaatgaagtagtatttgtaggcctgggtggcatttggatttttcttttccctcaacaaggttttactttttcttactttacaagcaagggaagttttgtgataggagagaaataaaagatttgatattttttgagatgacactcaagcatcaggctgagatttgcacacatgggatgtaaaagcaagctgtgtgttgcttagtcacttacttagaagtagatggtgggggacagcggcgtgggtcctagcctggccagtgatgctgctggcgtccagaccccagactcactccaagcactcttgttcaatatctcatgcagaagagttgggctggtcactcttaggggtgagaccccgtgattggttggtttgtagcactaaggtctaaaaaggaaaaccataaaagacatcagattacgctggatcagtataattaatattccatagggccatgttgccagaatctgtatgtatcaatacagggtttttccaagccaggaaacgccctccttggctactaggagcacctatcccatatcattcagataaacaatgatagctacaaagtcatttgtggctagataggttaagacaggtgattttttaaagtagactgtctttgcattttgccatctgaagttcattaatctttagatgacaaaaaaagcaaaaagttcccagaacgtttttgcttagattttgttctaatcaccacgtgaaggaatgagattagcaccacaagtttcatgccaataaaagagactggtgtgatcccacatgcaaaatttaatcctaagggtagtgagatcacaaacagaataaaaataagagcaatcaaccatataaatcaagtacctattgggaacagacataacattcaatttttcatttatgctaagtgaccacagtatacaaagtaataagcaggaaatttgatatgggttaaattatgcattttgttcagattttggaaattggtatgcattataagtttctcaatgtacatctttttatcccaacaccctcaaactagaatatttgtcagtggtcaagagaaaaaattttacctgaattcttgggggccggcggggagcttttacattaaaaatctactaacgcctactttttaaaaaatgagattctttctaatctttatatatgacattttctagacaatcgcacctttgggtatattaaacagctggtatcataacaaagaatccaaatgaaccttcaatatactagaagttctagtaggttaatattgttcagaagatttttacaaattaaaaactgatttccaaatatgttcaacatttacttctatttgatatctgctcaagaagtcatagaagtcttgggaaactattcgagtatcacagaggttttcaaaagcccttatggtgacatctacctaggtaaaagcctgacatgtggctttataattgttatgttacccaagggataaacttgaactggctttgaacatcctttaggtcattttctctttggataattttcatcgcatatccggcaactatagaccaaagtttgcttaaggtttgaccctagagcagaggtgggcaaactatgacctggaaaccaaatctgacttaccaccttttcctgtagttaaagttttattgtcacatagccacatacattcatttacatgttttctgattttacactacagcagcaggatggagtagttgtgtcagagactatgtatcccacaaagcatagattacttactatttagtcctttacaggcaaagtttcctcacccctgacctagaggtttttgtggtatgcattggatatagcaggaaagaaagcacatttccaaacagcagggagtaagcttacatttctgtgtaggtttgggaatatagttacttggcaaagtctttcaggaaggaagcccttccttatgttacatgtggaaagcctgccttccaagacatgtggaagtaattgatccacctgccagagaaacacaggctcagaggatgcctgggaacagggaggatgggattagtggaagcttaatggaaaaggaaagttatgatcctccaagacccttaattgatagaccataccaggttctgcaggtcagcatcattgtgtaatgagagtgaagtaggggaccctgtggttcaaccttagaatctgtttcctgtaggctctttctgctgtctatattcattaaagttttccacttcaccctcccatagtctagagggatgcccattccatggtcctccagagaatagttttgacttaacatgtctgtttagcccacatcacgtcagttatcaacaccgccactgtgcttactgttcctacagccacaccaggcttgaagagttagtgagaccaacaaataattggaagtattggaaaaagcaaaatacatggggacaaaaaaaatacagtgaaattctttttatcaaactgatgctgtgagaaaccagatgaatgccagtttggctttatttctaagaatctgggtcttcattctctggtgtagaaggaatgcaaaaaactataacaacaacaacaaaaacatattttgaaaagacatattctgacatctctgcttgtgtgtggtaaggcaggttcctatcagacatttatccctttggtcaagatcccttttgctcatccagggtttcatactcaatatcgcttaaaaaaaaaaaagtatcagctagggatgactctggaagtatgagtatcatggtggggaggaaggaattttttttaaatgtaaatgacccccatttaccagaccctaatcaaagtcacttaagggaatccctcagccttttatttggaaacagttgaaataaactggcagcagctagatcagagtatcttgctttattttataaaggccaaaggtagtatgaagtttggaccaaaaaggtaaatagatccattccagcacctgatactgatttttcaaggctctatgaaaggtcaaaaatttcattaaacaagaccagttctccctcttccccctgtcccaagaaatcttaggcatgaaaaggataaggaaacagctcctggaatgatacatttgcatagtgccctagtagcaggttgggaaagagttataatataagaaacaaccttcgaaaacaggccttttatctcaaagataaaatgtctttcttgtggtctttcatcactatctccgtggtggaaggttcccctagttccaacatatttccattaaaatagtcaaagccacggcattgggatgtcagatgcctctctttctttgtggtaatcggaatttaaaattatacagttgcctctgaatttctcatgcacaaagccaaaccactgataagagataaagcagtctgaagcctgctgcttcagccagcacagcacaccacacacgctcgcactttcaaaagcaatgtgatttctatggttcttaaaagctttcttcataagggagtccctgaaatttctcaaggcaggtttgaatggcaaagggaaaataattacttgtgggaggtcctccttttgagtattgttagagcatacatgtaaaagaaaataacctttttggggcaactcatgctcacacatgctgttttctttggttctccccctaccttccttttgtagatattgacagaataggaggaaatgagcatccttatttgagaaagagcaagaatgtcatgagcccttgatgcaatagtaagtgtgatgtcatcatacagtgttaatgatgctatcaaatccatcaataaacagtctcaaaccttccaacaacagtgctcactgctgctcctcaacttcagcccagcaagcagtaatatcatcacccattttgagatatgcaggtggaatagaacaaagaaacagccactgtaatcgagaagcatgtttactgtctaaatccacctgttgcagtaggaagccagagtggggttccaaatgcctcattaagtatgtggacagcctcactagtaagtgagtgaatttggcttcatcactgaacattagctaaggtcagcttaataacacaaatatgaggccgacttctttgcgagaagagaaaagaaaacatctgcttgatttaaaatccaccccacatgcctagagttgtctaatagtccctcactttccaatggcttcacatcctacttctacatttggggttttttggtgaaatcagagatagctcaggatttcataaaacgagaaactccaaactggtctattaggttccatgggaacacttgtagccaaaggattgtctgagggcaggaagacgacacttgtcaacaaggaagacagtgtttctttagttcccatattcatctaattcatggggttctaacattttggggggccatagattcttttgacaatctgagccaatctatgaaacttctccccaaaaaagaaccaccccacaaaatcttgcaaaacgtaagagattttcctggatctgaagctacccgaagacatgggaagagttgtattctattattcaattttaagaatatttattaatattcactgagctattgctagccactgtgctaaacattttacatacattctcctatttcatcctcaaaacaatcctttgagttgggttttaatatagttccaatattcggatgtgaaaactgaggcttatagtggctaagaaacttgcccaaagccactacctagaaaatggcagagctggaatgtaggtttaactcctgaccactatgctataaagtcaccacatgtcaaactaattttcaagttgttgggacatgtcccctactaggttttaaactagatcttccttggtagatgaagctatagaacttctattttccctgctttctgtagtctctcacagtgacagcatctatactaaagtatagatacctaaggggaaaatatagaaagcctgcctgaataatagaatctagaacaacaacaaaaatattaattttttctgtgtatgcttaggtcaagcttaaaaaaaaaaaaaaaaaaa

SEQ ID NO: 28304 - DNA, 3409 bp, Homo Sapiens
gactcaagatggctgcccccatcaagatgaccggggtgtgccggggggaaaggggcagcatgatggtctgagatggtgtagcgtcggaccatgtggaagtttctgaggctggggagccggataatggggggtggggcccgttggggggtaaaggggcaatagcgtcctttcacaggctaacctcggctcttcccagtcctctggactaaaatggggaacacattgggcctggcaccaatggggactttgccccgccggagcccccgccgagaggaacccctgcccaaccctgggagcttcgatgagctgcaccgtctatgcaaagatgtattcccagcacagatggagggagtgaagctcgttgtcaacaaggttctgagcagccatttccaggtggcgcacactatacacatgagtgccctgggcttgccgggatatcacctccatgcggcctatgcaggggattggcagctcagtcccactgaggtgttccccactgtggtaggggatatggacagcagtggcagcctgaacgcccaggtcttgctcctcttggcagagcggctccgagctaaggctgtcttccagacgcagcaggccaagttcctgacatggcagtttgatggcgagtatcggggagatgactacacagccactctgaccctaggaaatcctgacctgattggggagtcggtgatcatggttgctcacttcctgcagagcctcactcatcggctggtgctgggaggagagctagtttatcaccggcggccaggcgaagagggggccatcttgacactggctgggaagtactcggctgtacactgggtagctacattgaatgtgggatcaggcggggcccatgcaagttactaccacagggcaaatgaacaggttcaggttggagtggagtttgaggcaaacacaaggctacaagacacaacattctcctttggttaccacctgactctgccccaggccaacatggtatttagaggcttggtggatagtaactggtgtgtaggtgctgtgctggagaagaagatgccccctctgcctgtcaccctagcccttggagccttcctcaatcactggcgcaacagattccattgtggcttcagcatcactgtgggctgaggttgtccagagccagcccccacagcagctggaacctctgagtcaggtgccctagggccaaagactaggcccctcttcggagcccaccttgctgggtgatctctaggacccaggagcagagtggtggacaggaccatgccctcctcagaactggagctgccacaggggcagttgatgaggcagaggtttgaggatcccccctctgctaccagccccagtatcaccttccccatgctcttgtggctgtggactaagggagaaggattaaggggtatggctgaattcccccggcaccccttgccctcaggcttccttcttcctttccctttggttaatcctgcatgggattagctgaccatcctgttttccatcccagagcctcccaaggctgggaaagtagggctgaagggctagatgtttggtctcaggaagtggggcccacccattcccagaaggagcttctttacctcttagccctgaggtttcctccttcccatcttctgtgcttccagagaacaactttgttcctatggtcacccccactatccccatgaccgcatgaagaggcagttattgctttagtctttcattgcaaccactgggctccctttgaacccggcccaatctttggtcccagcattttcccactccagtgtatccagggtgttccaggtgagctggggaaggaagtgagcatggcctcagctgcagatctcctggagcagcggcatcatggcagacaggccctggatgtgctggatttggtacccgtaggcctcattaatgctccggagctcagccagcaggcctagcaacttcgcatacagaaacctttggaggaagtagtggggttgccaggaaaacaggagggaaataaggcagttgggagtcttgtctctaggccctgatcccctgaactattcctcagtgaagccaggtctgaacattagagaaaatcatgctctggtatgacagactatcagaggttccaaaggtcctccagggggcctcggtctgacactgtcttctctcaccatgctcagttttttctgaacccagagctctgagagccgagtgtgaagaaagctccagacttggccagaactccaaccatgtggaatctgagggcctggccttctagagcaggttctagaaggtggatgtgttctatggtataaagcatcccctttctggccaaactagctcttggaggaacgagcaaaacagaagcggtgcatacctcagagcctggataaatcacagactattgaacctggaactggctttgaccatgaaactgtgaatggccctaacttcaagggaaatgagaaatcgaaggaattggcccaatggcgaggagaggaaaggccaagggaagagaaaagtctgcgttagtctggagaagttggactagtgagatacaaaaccagaaactggtgagtcacctagtctcctttctctccctcactccctataaatgaccaaatgccatgacctgtcattcctatcttctgacctctacatgcccactacctcttagctgagtttaggccctcatcatttttcacttactgctgcagtagactattcaattattctccctgctcccagcctcatctccttccaacccatcctccatgctgttgctatttctaaaatgcaaatttgatcatgtctctcctctgcttaaaattcttcatttgctttccatcaccttcacaataaaatccaatctctttagcatgtcacacaaagtcctttgtgatctggcccctatttaatcactctggcctcatctattctgtccccacttccctcccctgacctagcacatcacactttggctctagatgtgcttaggcatttagagttccctgaacaagctgtgctcactcacctctgaacaactgcccttgttgttccctctggttggaatcacgtcacacacccttactttcaaaccctcctcctcgatcctcctgatcctcttggtccttcaggcctgggtagagcagatcacctctgtgagcctaatagatctacacctctgtacacaaatttgtgacagcacttatcacattgcagaacaactgactgtttctttttgactctatcaatcaactgtgagttgatgaagtcaagggctgcacctgtcatttggggatccttagggtcttatgtactccaagcatatataataaatatttatggaatgaataaatggactaggatacaaattaaaaaaaaaaaaaaaaaaaaaaaaaaaaaaaaa

SEQ ID NO: 28305 - DNA, 4660 bp, Homo Sapiens
ggcagcggccggggaagatggtggaggacggcgcggaggagctggaggatctggtgcacttctccgtgtctgagttgcctagtcgcggctacggcgtcatggaggagatccggcggcagggcaagctgtgcgacgtgaccctcaagattggggaccacaaattcagtgcccaccggattgtcttggcagcctcgatcccgtatttccatgctatgtttacaaatgacatgatggagtgcaagcaggatgagattgtaatgcaaggaatggacccaagtgccctggaggctctgatcaactttgcctacaacggcaaccttgccattgaccagcaaaatgtccagtcattgctgatgggggcgagcttcctgcagctgcagagcatcaaagacgcctgctgcacattccttcgagaacggcttcacccaaaaaactgcctgggtgtgcgccagtttgctgagacaatgatgtgtgctgtgctgtacgacgctgccaacagcttcatccaccagcactttgtggaggtgtccatgtcagaagagttcctggccctgcccttggaagacgtgcttgagctggtgtctcgggatgagctgaatgtcaaatctgaggagcaggtctttgaagctgcattggcctgggtcagatacgaccgggagcagaggggtccctacctgcctgagctgctgtccaatatccgcctgcccctctgtcggccccagttcctttcagacagagtacagcaggatgacctggtgcgttgctgccacaaatgcagggacctggtagacgaagcaaaggactaccacctcatgccagagcgccggccccacctgccagctttcagaacccggccacgctgctgcacatccatcgctggacttatctacgctgtagggggcctcaactcagcaggtgattccctgaatgtggtggaagtgttcgaccccattgccaattgctgggagagatgccgtcccatgacaacagcccgcagccgcgttggcgtggctgtggtgaacgggcttctctatgccatcggaggatatgacggccagctacggctgagcactgtggaggcctacaacccggagacagacacatggaccagagtggggagcatgaatagcaagagaagtgccatggggacagtcgtgctggatgggcagatctacgtctgtgggggctacgatggcaactcttccctcagctccgtggagacctactcacctgagacggacaaatggacagtggtgacctcgatgagctcgaatcgcagtgctgctggggttacagtctttgagggcaggatatatgtgtcaggcggccatgatggtttgcagatcttcagcagtgtggaacactacaaccaccacacagccacctggcaccctgcagctggcatgctcaacaagcgctgccggcacggagccgcctccctggggagcaagatgtttgtctgcgggggctacgatggctctggcttcctcagcattgccgagatgtacagctctgtggcagaccagtggtgcctgattgtccccatgcacacgcgcaggagccgggtctccctggtggccagctgtgggcgcctctacgctgttgggggctacgacggacagtcaaacctaagctcagtggagatgtatgacccagagacagactgctggacattcatggcccccatggcgtgccatgagggaggggtcggtgtgggctgcatccctctcctcaccatctaaggcagaggatgggatgtggtggggcagggatctggtacagacataggcgcttccttccaggaacagtccctcaggagaggcagtggaccagaagagatggcgaaacgtgagctcgccggaggtacagtttttccaggtgcttaagccctcccccactgtgccacccttgtgaccttcaggcttgggtcatcaagatgcacagcatggaacacaagctcctctggatcctgcagctggtgacatggaactgttttctggtccacatgaacacaggctccatccaggcccagctcctacccaccgcctctctgtgggccagctgttcacagaaggccttccatctgatgctccccatcgcctgcttgctctccagccgagtctggccaatttgccatggggaggctgcagtgtccaagcctgctggaaactgggatgtagctggggacgaaaggacagacccaagcgttctccctgcctgagatggtgtggccacagcagtggaaggctgcacacaggcacattccttcttccacagtggggcaccaaggattctgtcctcattgctgggtaagcagggagaagagaagttttccccatgtctaattttgggatttcagtgaggccttttccatctgtccaggagaacagaagggaaaaaaagatacttgaaagaaactgaaggaaatttaaacaaagaaacacttgaaagaaactggaaagaaaaataatttttttatgtgaacaaattttgcaagaagaaaaaagcataaaagacactaacggcaaatctatgtttaaatggaaaatcgtctaactggagaagggcggtatccaccccacattcggatcccagggtcctgaggcctcgcattgagctgggggttccctctgagccccagtgtgtgtggaatcagtgcactcttgactgggcctgtagtaaggtgctcatggggtttgtcttctcacccaccatcagaggacttttaaaatcataggcgtagagagttagctatctgctgaattactgccactcttcttggtgggggctcctagctgtggctgggggctccaggcgcccctgtgattacctcctactgccaccatggcgctcattcagattccccactctcactaacattgcttccttttttgaccagcaggaaacagcaggtctggccagattctcacttgcccatcaatctcgttcttggatgatttccctcattgtgatgcttctggggcacgttgaccatatgcacctctagaacctaaccagggcttccttctaccagctgtgggcgggcttggtctggtaaccttgtctgctctgccattccactgctcctccatccactcgccaatcccaagagtctggcctccctccagccctgggcagactgaccagcaaggtggacctttacattcaagcacagctggcttttatgacataaagaactaaaggccgaaagaatctcttgctgctgcaaagaacagattttatatttcttcctctaatcttggcaaatgacctttaccttttggaaagatttcatattgcttcctcctccctggataggacctaatgtagcacagcgggactcaaataggaggacattttctcttgccagtgcactgggcagtggggctgtccttcaactgctgctgccaaaattggttttctaaaattcttccagtagagactaaaagaagattcaattcctgtaacccaagactgagtcttagggctccagtctccacctgcttggtttcctatcctttgctgcctgcctggggtggcctggaagcctgttcagaaaggcacaatgtggagcctggggtgtctcccccaccccaggaccgtcaggtttaccagtgtgtgcaatcgccatgtattcagagggaagtacctttgttacctacaacttaggagctaggcctctgctacaagcacttgaaaatgatatttttatttttaacgtctcaacaatctgatatcggatgtcgtttaacctgggctcgtggtagggctccagcatttctccctccttcctggtttgcctgtaggggtagactcggaaggtgggtggggtgtgcatttcctgttaggagtgtatcagtgcttgtcttattataagcccctttcttttgtgaatttgaagtagcaccaacaagcctggattgtgaaggtattaagaatcggtctgtgggctactgagtgggtccttaggatactggcccagattttgccactgggtatggcagatcattttctaccatggcctgctgctcttgtagtggacttcctgagtccaatcccacctcctggtgtagaatttacactgctgcacctgaggtcgatgtttcaaagtaagatcaagccagtgttttgatctgggctctgagcacaagtcaggaaacaccaacatattcacactctcccagtaggttcctcagtccgatggtgaatggctattcgtaaatggctggtctggctctttggtgttggagcctttccaatagccccatgaaaagaagcatcacccaaggatattgtaaaaaggatgtaacaaggagatagggtagacattgtactcagtgggccttggggcctagcccagctctgagcagaggactgtggcattcactgtccttgagtgtttcaccttcttggataacacacgggccttctcttctggatttcatcagagattacagccagatgggggctgaagaccatcctcttgaccacagaggtgtgactgtgggaattcctcccaatttatggtttcccagaaaatcttagttccttttatttatagaatgcatgtcttttgtgttaagaaaccaaagagaaataaagagaacgctcctaataaaaaaaaaaaaaaaaaaaaaaaaaaaaaaaaaaaaaaaaaaaa

SEQ ID NO: 28306 - DNA, 5823 bp, Homo Sapiens
ggaggtccggaagcggctgccgggcagcaaaggaggatggcgaggggctgatactgaacccgggaagggtgggctgtgctgaagccagagccggagccggagctggggccagaacccgagcagtgagttcctccactgacgagttccggctggcggcgctcgccgccttgggcaggacccacctcgccttcctcccggcgtggcagatgctccagctgccatgtccacgcagagacttcggaatgaagactaccacgactacagctccacggacgtgagccctgaggagagcccgtcggaaggcctcaacaacctctcctccccgggctcctaccagcgctttggtcaaagcaatagcacaacatggttccagaccttgatccacctgttaaaaggcaacattggcacaggactcctgggactccctctggcggtgaaaaatgcaggcatcgtgatgggtcccatcagcctgctgatcataggcatcgtggccgtgcactgcatgggtatcctggtgaaatgtgctcaccacttctgccgcaggctgaataaatcctttgtggattatggtgatactgtgatgtatggactagaatccagcccctgctcctggctccggaaccacgcacactggggaagacgtgttgtggacttcttcctgattgtcacccagctgggattctgctgtgtctattttgtgtttctggctgacaactttaaacaggtgatagaagcggccaatgggaccaccaataactgccacaacaatgagacggtgattctgacgcctaccatggactcgcgactctacatgctctccttcctgcccttcctggtgctgctggttttcatcaggaacctccgagccctgtccatcttctccctgttggccaacatcaccatgctggtcagcttggtcatgatctaccagttcattgttcagaggatcccagaccccagccacctccccttggtggccccttggaagacctaccctctcttctttggcacagcgattttttcatttgaaggcattggaatggttctgcccctggaaaacaaaatgaaggatcctcggaagttcccactcatcctgtacctgggcatggtcatcgtcaccatcctctacatcagcctggggtgtctggggtacctgcaatttggagctaatatccaaggcagcataaccctcaacctgcccaactgctggttgtaccagtcagttaagctgctgtactccatcgggatctttttcacctacgcactccagttctacgtcccggctgagatcatcatccccttctttgtgtcccgagcgcccgagcactgtgagttagtggtggacctgtttgtgcgcacagtgctggtctgcctgacatgcatcttggccatcctcatcccccgcctggacctggtcatctccctggtgggctccgtgagcagcagcgccctggccctcatcatcccaccgctcctggaggtcaccaccttctactcagagggcatgagccccctcaccatctttaaggacgccctgatcagcatcctgggcttcgtgggctttgtggtggggacctatgaggctctctatgagctgatccagccaagcaatgctcccatcttcatcaattccacctgtgccttcatatagggatctgggttcgtctctgcagctgcctacccctgccccatgtgtcccccgttacctgtcctcagagcctcaggtatggtccaggctctgaggaaagtcagggttgctgtgtgggaacccctctgcctggcacctggataccctgggccaggtaacctgagggcaggggagaggtggggtggcagacacgcagaagtgctactagtgacagggctgccatcgctcacctgtacctatttacacccagaactttccagctccccctcatcatgcctcctccttcctacctgcctcccctctgctggtgcacctcgcccaactcattcttactgcacagttcactttatttaacaattttcatgtcccccacctcatgttttcaccttttctgggccaggcatagattaagtaactgggaacgccccctctttataaagctgggcttctttctcatctctctcccaaatgttgtatctcagtattcttcctattcgagtctccagggggtggctggacctacctggtcatttgaaacaggcccccaagctggagtttttaatctggactctctggcttgctgtgacccctaaggcaatgcttctcttccctggattccttagtgtgggtcacagtactgtgttcttagttgctttagctcttaaaacatacgaagtgttgcctaaactgaaaatatttatcttttatttaaaatcagatttttgtttttagactgtcttagatctggggctattacgaatcacttcttcttcagtaaactttgactcaacttctcctgctgaaaagaagctcgctccagatgtctgcatgggtcctcggcactcttggctgaggactcaaaggttttaatcaggatcgtctaaaaatgtacctcggtgaggaggcacagattttgcctcctgttgaccagcctggtttcataccgaaaagacattgaaggactgcagaaatgtatgggtgcaccgggccgagggaagggtggctgagtgagaggcgtataaaatggggctgtgtgcatgcaggcccatgtttcagcctcagcccacgccaggtgaaaggatcagcaatgctctgttgccatcgtgctgggacgacaccagctctattgccaccgatgagtagctgaggtcagtgtgcacagagtttgaaattaagttaatagactttacagcagctggtctgacactacgcgcagtgctcggttgtttacaatcagtggggaaaagggcagaactagtgcccggccccacactgcctctgtggcctggactttgaaaggaacccactgaacactaattatgagccctgtctttcccccagaatgcctccctgggtttcacaaacagccttgaggttggccctcctcaaggtcagccttcagatttgggagcaaacttcagagaaggcagaggaagatacattgccttgctgtgggctgcctcttctttcctcttggtgtgcgaagtatttcagaaggccattgatgaattccccctctttagctgtgtatttgtgcacgtgtgtgtgtacgtgcgtgtgtgtgtgtgttcctgtgtaagtaacagaccagactccttttctcttctgtcccgtcaccaggctcttgcttcactgcagatacagttcactctgaaagctggttgaaggagagcagcaaaaatgtatcaggggttttgcttctgtgtttcgccaaagctcataagggctgtgacccacccatatggccccagttttttctgtctcttctgttccaaagccaggagagctgacttccaggtgaagggatgggaaaagtggactctcattgtagtgactcccaacctacctaataatttgttaacttaggaatatgctatcattgttgacttgttcttccttaggagaaggacgattttcacccaccctttctgttctatggtggactcttaacaggtgctatgtgaccaggaatctagccgggagtagcagaggccctgtcttctgaagtctcaggcttagaagttaccaaagtgggctcagaaactgtcatctcctggttccaagttcgggctctggcagcccagccgctatcttagctgtctttcccagcggtgctaagagtggtctcagtgagaaggtagatgccaactggagggccagacctgtgtcctgcccatgtcctccttggtggacgtttctgctactcagagctgctagagaccatcctgcccatccgagttctgagattgggactgtgatgttgggacctgaggactggatggtagaatactggggtcccccagctcttagcaggatgcaggctattgcttccacacccctggccgtgagaacgtggtatgtaggagagttggctgtagctttaggatttctggaagccaatttggcatggcctatttgatctctggcttgtgctcctgctacactgacagactgattgcgtggctctttcagaagacccaggaagggcagctccagccagaggaccttcctggctatgcaggtgcacagctcttaggcatcaagcaaagggtcagccagtcagtagtagtgggaggaagcccttcctcctcttatgcaagcagctcgcagccagcccagaatctcttatgcagcccaaagggcttcttgaggtagagagccctccccagtgtcttcccaggataagtagaaatatgatcacagagcaacggagcaaaggctttcgggagtgtgaggctgcatctgctggagcaaagggaaaccgtgggcttttccggccagatactcttgagctctgtgaccctgctcctgtcaccccaatttctccaagccagaggtagctttctcagagccccttggtggttctgtcctccaaatgctgctgttgggagcgggcttccagctctcagtgggcagtgcacctcctcctaaatgcaggcacttgctaggaagagtgtgagctggcgtcttctgttcaccctgcctagcagttgtcaccattcacaagtggcattatttatgttgtgctgctgtccagctgctaagatcccctcatctgcacaagccctggctagatatgtgtgaatgcgtggcatcatttcacttcagccgcccaattccatctctcctctgcagccagattcactggctgatgctcactgctcactgtctatccccacgaaatttagttttatcagtagtcttaaagtgttgatctcaaacaagtacattagaaaaatcatgtttcttctctctcatcttactttttcttctcagatttctcccttcctagaacattctctctgtttagcactaatgttcacctcgtattttttggaagtgcaaaaatctcaatttgtgtctgtttacagctctctctcctcactgctcacagcaaggggttctgtatcagtggatttcattttgtagctgctgagatgttaaggcaagcctcagcatctgcccctgctgggtgcacaatgctgcttcctcgaagagaagacacagagtccaagtggcaggacttgaggttggcttccactctgccttagaagttaattttccaaagtacattacaaatctctgaggccattaggggaaaaggaaggggtgtggtttgtctttgaaattacggttaatacttttagacagtaagtccggctggttgcagggctatttgccccgacagcatcagcctgtaacatttcttctctttcctttgtgccactgagtcgttccctggccagaggacataaatggtgctggtaggaggttatcagagtaaggaaggtagcagatataggtgcagggtgcctgtcattcactgtgttatttggtttaaatcaaagtgattctgggggaagctatgctctttcagtggataataaaattggtaactctattgtaaaacatgtcaatggtgtgtgaagaaaaatcaaccaatctgtaggtgttgataactagacagtactgtgtatgttacgtgcctgtgtggatgtgcacttccagcatggtatgtgtagcgatgtggatcatgccagagttcgtagatcctgttttggggtttgcacatggatcgtatgttaagctttttcttttcaataaatgaattttatttttatttttgaaaaaaaaaaaaaaaaaaaaaaaaaaaaaaaaaaaaaaaaaaaaaaaaa

SEQ ID NO: 28307 - DNA, 3625 bp, Homo Sapiens
gggggccgcggcgggacaaatgcagagcgcacgcgcttggctgcctggcgactgcacaagcagggatggcgtcgcttcagcgttctcgggtgctacgctgctgcagctgccgcctcttccaggcgcaccaggtaaaaaagagtgtcaagtggacatgcaaagcttgtggagagaagcagtcctttttgcggagttccccagacacggagctcctgcttccgagcttcctgttccttcaggaagtgaaatggatggagcagaatctggaaaggcttatggtgaaggctctggtgctgattgtagacgccatgtccaaaagttaaatctactacagggacaagtttcagagctgccactcaggtctctagaagaaactgtcagtgccagtgaagaagaaaacgtgggacaccagcaggctgggaatgtgaagcagcaggaaaaatcgcagccctcagagagtcgctggctgaagtatctagaaaaggactcccaagaactggagctggaaggaacaggagtgtgtttcagcaaacagccttcatccaaaatggaggagccaggcccccgcttcagtcaagacctgcctagaaaaaggaagtggagcgggagcaccgtccagcctccgtgcagccgtggcgtgcaggactcgggtggctctgaggtcgcctggggaccccagaagggacaggctggcctgacatggaaggtgaaacaaggcagcagcccctgcctccaggagaactctgcagactgcagtgccggggagctgaggggtcctgggaaggagctatggagtcccatccagcaggatggctacaaagagatcttattttaaaagcagctgatggtttggaaatgagagaactacagtggtgaagagaccaggaggcagctctcagtgaaaccaacattgcggatgcccttcgtgagccttctcagtcccagcaggaagcccacaacactggcctccccagcctgcctgctgacaacacctaggcttactttatctaaaatcagagtgtaccaggtctgtagcagaaaataatcaactaaatgtcagggacctatgagtcatttaaaacaaaagagaaagtgaaagccattaggcaagctatgtgctgggctgctaacgtagcccctgcagggaggggtcaggagcgcgctgcagtgagccttgggtctcgcaggcccagccctgctgcaaggagccagggcacccaggaaacatcagcacacacacacacagggaccctcccttcatgtcacttgttttgctgccctaaatggcttcttgcaccctaacccctgatcctggaagaaggcagagaaactggcccgtacagagacctgcaattctacgcaagcttaacacaactatgagacagaagaggggcacgcagaagaggtgggcaaaagtggtcacaacggcgggggatgctttgaatactggatggtgtccagagccgctccgatgtcatagttcttggtctgcaggagcctggtgagccagccgccttcatcagagaagcccatggacagcatctgggagagggactcaatcagccgcgggtcagcctctgccgaaacagtaaggaagccatgaggagtggtgctgagccctgtgagtgacccgaaacacataccctgctgccttggccagccaggaccagggtctgccagtgtccgagcctgcccagagctctcgtcctcacaggccacagtggacctgctttccctgtaaagggccaagcagtctttttcacactgctcaactctgccactgcgacaccaggcagccaggtggtgtgtaagcagaaccatcaatggacactgaaataggcatttcacctgtcacatcttttgattttaaaatgtaagaacaggccagttagccaattattacactcctccatgcaagagatgatggggcattgaaatagattgaagatggagagagatgaatggatacaagatacattttggaggtagaatgaacaggacttggaaatgtatgtggagaaggcaaaggagttaaagatgatatctggagcagcacaactcacaattgcaaagatgtggaaccaacctaactgcccatcaagcaatgagtggataaagaaaatgtggtatatatacaccatggaatactactcagccacaaaaaggaacgaaataataccttttgcagcaacttggacggagctggaggccattatcctaagtaaagtaattcaggaatggataccaaatatcatatgttctcacttatgagtagatgccaagctatgatgatgcaaagacataagaatgatatagctttccctctccctccacggtctccctctgatgccgagccaaagctggactgtactgctgccatctcggctcactgcaacctccctgcctgattctcttgcctcagcctgccgagtgcctgcgattgcaggtgcgcgccgccacgactgactggttttcgtgtttttttggtggagacggggtttcgctgtgttggccgggctggtctccagctcctaaccacgagtgatccgccagcctcggcctcccgaggtgccgggattgcagacggagtctggttcactcagtgctcaatggtgcccaggctggagtgcagtggcgtgatctcggctcgctacaacctccacctcccagccgcctgccttagcctcccaaagtgccgagattgcagcctctgcccggccgccaccccgtctgggaagtgaggagcgtctctgcctggccgcccatcgtctgggatgtgaggagcccctctgcctggctgcccagtctggaaagtgaggagcgtctctgcccggccacccatcgtctgagatgtggggagcgcctctgccccgctgccctgtctgggatgtgaggagcacctctgcctggccgcgaccccatccgggaggtgaggagcgtctctgcccggccgccccgtctgagaagtgaggagaccctccgcccggcagccaccccgtccgggatgtgaggggcgcctctgcccggccgcccctactgggaagtgaggagcccctctgcccggccaccaccccgtctgggaggtgtacccaacagctcattgagaacgggccatgatgacaatggcggctttgtggaatagaaagcggggaaaggtggggaaaagattgagaaatcggatggttgccgtgtctgtgtggaaagaagtagacatgggagacttttcattttgttctgtactaagaaaaattcttatcctgttgatctgtgaccttacccccaaccccgtgctctctgaaacatgtgctgtgtccactcagggttaaatggattaagggcggtacaagatgtgctttgttaaacagatgcttgaaggcagcatgctccttaagagtcatcaccactccctaatcttaagtacccagggacacaaacgctgcggaaggccgcagggtcctctgcctaggaaaaccagagacctttgttcacttgtttatctgctgaccttccctccactattgtcctatgaccctgccaaatccccctctgcgagaaacacccaagaatgatcaataaaaataaataaataaataaataaataaaaataaaaaaaaaaaaaaaaaaa

SEQ ID NO: 28308 - DNA, 5314 bp, Homo Sapiens
gggtcctcctcctcctgctgccctttctccttctcctcgctctccctgtggctcccatttctctctctctttgttagttgtaactagaaaggcagggcagggtagaaaaatcccccggaactttaaatggcctctccgggcttccctgctgcgggtccgggctgggagtcgccccaagggcgggggtgtgcgggggcccttccccaggagctgccgcctcgttcgccagcttttcctttggcgttctatttaaaaaggcggcctgaagaacatgatttattcccgtaaaagaaccccccaaacaaactctggctctcgccttgaacttctcttgactgcaaaaggcctttctctgctcgaaacacacatcttggcgcgttgcacgtctgttctctggggaggcagtaaggggccgtggagctggcctcggcctcggcatcgggagaggctggacttcctgtctctctgtgctgaatggctgcgatggcgcccgctctcactgacgcagcagctgaagcacaccatatccggttcaaactggctcccccatcctctaccttgtcccctggcagtgccgaaaataacggcaacgccaacatccttattgctgccaacggaaccaaaagaaaagccattgctgcagaggatcccagcctagatttccgaaataatcctaccaaggaagacttgggaaagctgcaaccactggtggcatcttatctctgctctgatgtaacatctgttccctcaaaggagtctttgaagttgcaaggggtcttcagcaagcagacagtccttaaatctcatcctctcttatctcagtcctatgaactccgagctgagctgttggggagacagccagttttggagttttccttagaaaatcttagaaccatgaatacgagtggtcagacagctctgccacaagcacctgtaaatgggttggctaagaaattgactaaaagttcaacacattctgatcatgacaattccacttccctcaatgggggaaaacgggctctcacttcatctgctcttcatgggggtgaaatgggaggatctgaatctggggacttgaaggggggtatgaccaattgcactcttccacatagaagccttgatgtagaacacacaactttgtatagcaataatagcactgcaaacaaatcctctgtcaattccatggaacagccggcacttcaaggaagcagtagattatcacctggtacagactccagctctaacttggggggtgtcaaattggagggtaaaaagtctcccctgtcttccattcttttcagtgctttagattctgacacaaggataacagctttactgcggcgacaggctgacattgagagccgtgcccgcagattacaaaagcgcttacaggttgtgcaagccaagcaggttgagaggcatatacaacatcagctgggtggatttttggagaagactttgagcaaactgccaaacttggaatcgttgagaccacggagccagttgatgctgactcgaaaggctgaagctgccttgagaaaagctgccagtgagaccaccacttcagagggacttagcaactttttgaaaagcaattcaatttcagaagaattggagagatttacagctagtggcatagccaacttgaggtgcagtgaacaggcatttgattcagatgtcactgacagtagttcaggaggggagtctgatattgaagaggaagaactgaccagagctgatcccgagcagcgtcatgtacccctgagacgcaggtcagaatggaaatgggctgcagaccgggcagctattgtcagccgctggaactggcttcaggctcatgtttctgacttggaatatcgaattcgtcagcaaacagacatttacaaacagatacgtgctaataaggggttgatagttcttggggaggtacctcccccagagcatacaacagacttatttcttccacttagttctgaggtgaagacagatcatgggactgataaattgattgagtctgtttctcagccattggaaaaccatggtgcccctattattggtcatatttcagagtcactgtctaccaaatcatgtggagcactcagacctgtcaatggagttattaacactcttcagcctgtcttggcagaccacattccaggtgacagctctgatgctgaggaacaattacataagaagcaacgactgaatctcgtctcttcatcatctgatggcacctgtgtggcagcccggacacgtcctgtactgagctgtaagaagcggaggcttgttcgacccaacagcatcgttcctctttccaagaaggttcaccggaacagcacaatccgccctggctgtgatgtgaatccctcctgcgcactgtgtggttcaggcagcatcaacaccatgcctcccgaaattcactatgaagcccctctgttggaacgtctttcccagttggactcttgtgttcatcctgttctagcatttccagatgatgttcccacaagcctgcatttccagagcatgctgaaatctcagtggcagaacaagccttttgacaaaatcaaacctcccaaaaagttatcgcttaagcacagagcacccatgccaggcagtctgccagattcagctcgtaaggacaggcacaaattggtcagctccttcctaacaacagccaagctgtcccatcaccaaacccggcctgacaggacccacaggcagcacttagacgatgtgggggccgtgcccatggtggagcgagtgacagcgccaaaagcagagcgcttgctcaacccaccaccacccgtgcatgacccaaaccacagcaaaatgagattgcgagaccattcatctgagagaagtgaagtgttgaagcatcacacagacatgagcagttcgagctacttggcagccacccaccatcctccacacagtcccttggtgcgacagctctccacctcctcagattcccctgcacccgccagctctagctcacaggttacagccagcacatcgcagcagccagtaaggaggagaaggggagagagctcatttgatattaacaacattgtcatcccaatgtctgttgctgcaacaactcgcgtagagaaactgcaatacaaggaaatccttacgcccagctggcgggaggttgatcttcagtctctgaaggggagtcctgatgaggagaatgaagagattgaggacctatccgacgcagccttcgccgccctgcatgccaaatgtgaggagatggagagggcacggtggctgtggaccacgagtgtgccaccccagcggcggggcagcaggtcctacaggtcatcagacggccggacaaccccccagctgggcagtgccaacccctccaccccccagcctgcctcccctgatgtcagcagtagccactctttgtcagaatactcccatggtcagtcccctaggagccccattagcccggaactgcactcagcacccctcacccctgtggctcgggacactccgcgacacttagccagtgaggatacccgttgttccacaccagagctggggctggatgaacagtctgtccagccctgggagcggcggaccttccccctggcgcacagtccccaggcggagtgtgaggaccagctggatgcacaggagcgagcagcccgctgcactcgacgcacctcaggcagcaagactggccgggagacagaggcagcgcccacctcgcctcccattgtccccctcaagagtcggcatctggtggcagcagccacagctcagcgcccgactcacagatgagcgggagacagccatctaaacagactcactaactattggcattaaagcttcagaaatctctgcgtttgatattcaaacatcatatgccggaaattttcacagtttttagtgaacttaaggaatttagatcctactttggtatttttttttcttgttttaatttttgttttgtttttgtttccatgttttcttgtcacacacctgagcacttcctcccgttggcaaacagaagttcaggatgagaccctgctggcctggtcctggcacatcctctgcactgttgaatcactggacttactgatcttagatgaccaccccctccctcacacctgtgggcagggcagaacagcctggcgggctacagtttagcatggccttcttgagctagggtggaatggggcagggtgctctggactcttaccccctcccctcccatctgtggcttggctctgctgtggccctcctggctgggtccccttggtttttcgtgctggaacatccccaccagagcctctctgccataactgccagctgctctccccgagtgctcagctggcagaacacctttcctttctcacccagaacttaagagactgattttttgtttcatctgcatttggtcttctctgttttgactctttcactgcagtaacctggctgtggctgctcaggttcccctcctcatgccccttggtacccttccctgtctgctctcccatgccatgtacacacccacaacccgtccttccacttggaatatttttaccacctatcctgatctttgaaggtagggttaggactacttaacctctattcccactcccctgcaaactgggggttgtgggaagtgagcagccatctccctgtgtgatttttttttttttttttccctctgattcactttgccatgtttccttcacatccagatccctgtcggtgttagttccactcttggtctttcacgctccccttgcctgtggaacattgtctggtcctagctgtggttcccattgttcccccttcacccttctctgttaaccttgtgcctgtctcctgtatgatcacatcaccaaaaagggggaggggggagaagactctttttttttggccattttgtaatcgtataaaaatagtagacaactgcttaatggttggggttttttcacaattttcaacattagtgatttttttttctgtttgcaagttaaagggtttgtcattgtttctttaaaaaaaaatacaataatgcaccatatccctatgcataaagtgcttcttctatttataaggttgaaaattctgaataacccttttagcattgaaaaaaaaacaaaaacaaaaaatggaaaaaaaaaaccttgtattttgtaaatattttcttttcctgctttggagctgtgtaatggcagcgaaacatgtagctgtctttgttctatagaaatgcttttcttcagagaagctgatctttgttaatgtcttgattctgttcgcaaagcacagactagtgcttaaaaaaaaaaaa

SEQ ID NO: 28309 - DNA, 5736 bp, Homo Sapiens
tgtgaagcgagcaacatttgatgaagtcttagaactcatggccacaggatttctgcgtggagggtcaggtttcttaaagagcggtggagaaatgttaaaagttggagggtccgttaatcgtgaagtgagagttggagttacgcaggcgtatgttgtttttgtgacaacattgggtggtcagtggttggggcgcagctttgccacgttcctgtcccatgtacttgatctggtttcccatcctcgggcaacacaaacacatgtggaggctgtgtactccagacgatgtgtttcctttatcctaagagctactgtgggcagtttgctaggtgaaaaagcccagattgcagctgccaaagaaatctgccaagctattggaaaacaaatgaaagccgtagaggcagtagtgaatgacacaagtggagaaaacaaatctggcgcagcagacattgcagcaagccagcatgtgatggtctgtgccctccaggaactcgggagcctggtgcagagcttgaatgccaccgcatcccctcttattcaagaagcatctatagggcttttggagattgtgacttcagtgctgcttcatccaagcatggctgcccgacttgctgctgcatggtgtttgcgctgtgtggctgtggcattacctttccagctgacaccatttctagacaggtgtgcagaacggctcaacaacttgaagacctcaccagaagctgtcagtggatatagttttgcaatggctgctttgttaggtggagtacatcagtgtcctttgggcattcctcatgccaaaggaaagatggtagttagtattgctgaagatcttttacgaactgctgcccaaaatagcaggctatctttacagcgcacccaagctggctggcttttacttggagcacttatgactttaggaccatctgtcgttcgttaccatctgcccaagatgttgttattgtggcgaaatgttttcccacgttccttaaaggaattggaagctgagaaggcccgaggcgattcttttacctggcaggtaactttggaaggtcgtgctggagctctatgtgccatgaggagcttcgttgcacattgtcctgagctactaactgaagatgtgattcgaaaattgatgacccctattgaatgtgccatgactatgatgtcacacattccatctgtaatgaaagcccatggagctcatctgaaagctagtgctgcaatggtccgtttaagactttatgatatcttggctttgttacctccaaaaacttatgaaggatcttttaatgcacttcttagagaactggtagcggaattcactttgactgacaactcagccaacacaactacttccctcctcagatccctctgccattatgatgatagtgttcttcttggttcttggcttcaggaaactgatcataaatcaattgaagaccagctccagccaaacagtgcctctggaagtggggctctggagcatgatccttcctctatttatttactgctgttcttagtgcactaaaaggcttagctgaaaacaaaagtactttaggacctgaggaagttcgtaaatctgccctgacactggttatgggtcctctggacaacccaaaccccatcttacgttgtgcagcgggggaagctcttggaagaatggctcaggtggttggagaagcaacttttattgctagaatggcccaatatagctttgacaagttgaaatcggctcgagatgttgtatctaggactggtcattcattggctcttggttgtttgcatcgttatgttggtggaataggctcaggacaacatctgaagaccagtgtcagcattttattggctctagcacaagatgggacatcccctgaagtccagacttggtctcttcattcacttgcttgatagtggattctagtggtccgatgtatcgtggctatgtggaaccaacattatctctagttcttaccttgctgttgacagttccgccttcacatacagaagttcatcagtgtttgggtcgatgcttgggtgctataataactactgttggccctgaactacaagggaatggagcaacaacttctacaattcgttcctcttgtttggtgggttgtgcaataacacaagaccattcagattcccttgttcaggcagctgccatatcttgccttcagcagcttcacatgtttgcaccacgacatgtcaatctatctagccttgttcctagcctttgtgttcacttatgtagttcccatttgttacttcgacgagcagctgtggcatgtcttcggcaacttgcacaaagagaagcagcggaagtatgtgaatatgccatgagcctggcaaaaaaatacaggggacaaagagagcagtagtgccaatgtcagtccttttgcccctggggttagttctcgaactgatatccattgccggcaccaaggtgttaatataacagaaactggtcttgagggacttctttttggaatgctagaccgggagacagatcgaaaattatgttctgatattcatgacactttgggacatatgctttcttcgctggcagtagaaaaactttctcattggctaatgctttgtaaagatgtcctggcagcttctagtgatatgagtactgcaactctcttaagtagtggaaaagatgaagaagctgaaaagaaagatgagatggatgatgataccatgtttaccacgttaggtgaagaagataaatcaaagccctttgtggcccctcgctgggccactcgagtatttgctgccgattgcctgtgtcgaatcatcaatttgtgtgagaatgcagaccaggctcactttgatcttgccttggcacgttctgctaaacttcgaaaccctacaaatgacctcttggtacttcatctctctgacctcattcgcatggcattcatggctgcaactgatcatagcaaccagctgcgaatggctgggctccaggcgcttgaagacattatcaagaagtttgcgtctgtgcctgagccagaatttccaggtcatgtgatactggagcagtatcaggctaatgtgggagctgctctaagaccagccttttcacaagatacaccatcagatataatagcgaaagcttgccaggtatgtagtacatggataggaagtggagttgtcagtgatctcaatgatctccgtcgagtacacaatcttcttgtttcttctctggacaaagttcaggctggaaaaggatcttccagccagctgtaccgagagagtgccacgaccatggaaaaactggctgttctcaaagcttgggcagaggtatatgtggtcgctatgaatattaaaaaggaagcagagtcaaaaccaaaaagagcaattaaaaatactgacgatgatgatgacgactgtggtaccatcgatgaactgccaccagatagtttaataccactggtacaacctgaactaccaacactcagtcgcctgtggttagcagcattaaaagattatgcactcttgactttaccagccgaattttctagtcagcttcctccagatggtggagcattttatacccctgaaactattgatacagctagacttcactatcggaattcctgggccccaattctccatgcggtggcactttggttaaatagcacaggatttacgtgctcagagtctacagaagcagcagcaatatctggtttacaaaaacgttctacatctgtcaatttaaaccaggcatcaggagcagtgggtagtgctaaatctttgccagaaattaacaaagacagaatgcatctgattttaggtgtgagtatacagtttctttgttcccctagacctgaggagcccattgaacatgttacagcatgcctgcaggccttacataccttgctagactccccttatgctcgagtccatattgcagaagatcagctgataggtgttgagttgctgagtgttttgcaccgccttctattgacctggaatccatcatctgtccagctgttggttactggagttgtacaacagatagtaagagctgctcaggattatttgcaagagaaaagaaacactctaaatgaagatgatatggaaaaagaggcctgtaccgtattgggagaaggaggtgacagcggtggtctcattcctggaaaatctcttgtgtttgcaactatggagctgctgatgttcattttagtacggcatatgccacatctcagtaccaaggtgtcagactctccaagtcacatagccactaaaactcgactatcagaagaaagtgctcgtttggtggcagccacagttaccatactctctgatttaccatccctttgttcacccgctggatgtatgacaatcctgcccacaattctgttcttaattgcaagaatattgaaagacacagcaataaagtctgcagataatcaggttcctccaccagtcagtgcagctcttcaagggattaaaagtattgtgacactttcaatggccaaaactgaggctggcgttcaaaaacagtggacagctctgattcgcagcacgcttgcttgcatcctggaatattctcaaccagaagactctgtacctacacctgatgaagtaagcatgctaacagcaattgcactcttcctgtggtctgctagtaatgaaataataggagtccagtcattacagaatggctgcatgaacagatttaaaaatgcattaaattcatgcgacccatgggttcaagccaaatgttaccagcttctcctctcagtcttccagcattccaatcgtgccctttcaactccttatattcattcattagctccaatagtggttgaaaagctaaaagctgttgaaagaaacagaccagccagtaacatagagcttttagcggttcaagaaggaataaaagttcttgaaacactggttgctcttggtgaagaacaaaacagagtccagctacttgctcttttagttcccactttgatatcttacctgctggatgaaaattcttttgcctcagcaagttcagcttccaaagatcttcatgagtttgcactccagaatttaatgcatattggacctctgtatccacatgctttcaagacagtaatgggggctgctcctgagttgaaagtgcgtctagaaactgccgttcgagcaagccaagcgagcaaagctaaagcggctgccagacaaccagcccccgccatacattctgcaccaacaattaagctaaaaacaagttttttttaatttgtaatttcatttatttgtatttatgttgtcaactagcccctaattagtgatggccactgtatcattccaggctacctatgggttctgttttatttgtatattggtattatagtgcttccaagtaggttaagtgaaataatgctcacaccacttattgatttttaaggagtgattttttttatcatgtggtgaatatgttttcattttcctcctaataatgtttctcttttgttaacttatttatttttcaaacactgagccatagtcttaaatttaaatgctaaaaacaattgtatcatgtagtcgggcagcctattgatactgtcaggggaaaaaaatgggtcagaactcagcatctgtcatgaaaaaaatcaattgaaaaacaagcagattttaaattttgaagtaatcaaaataatggaaagtgtctgttttgtggtgtatatactatgaataaaatcacagcattttctaagcgaaaaaaaaaaaaaaaaa

SEQ ID NO: 28310 - DNA, 5999 bp, Homo Sapiens
attctagaggccgaggcggccgtcatgtttttttttttctttttctttttctttttaaaatgttaatgcccgttgtctttcctgggctgtttgctagcggaaggatgccagggaagccagcaggagctaggagagagtccgtggatctcgaaagaaatatgggagacagatgcccggcgggtgcgtctggagatggggacggcgggagttgagttgtggcagtagttgagttgtaatttgtgggcggaggcccagagagactccccacccttcacccctgccccactctgtccccagttccgccatttgtgaggccagaggtttccggactgttggcctcgccaggcagccgtctcccgccccaggcggcatcccccagtccctcccgcctccacgagagcctggagctctcagcctcgcccggggctccactctctcctccggctccctgggctgttttgctctaacgatcttgccagatccctccctctgtagacaaccaccaacctctgtttgctgttgaattctctcctcacattacccaggtctgctcaagacatgattttggttttggtttctgagggttctagtgggcagaaggttggagggacacttatgagggtggccgggggtctgacgctgcactttggaaaaactcacacagttgaatttccaaagaaatctgccctttgccctctttgcacctttgatacattctggaagttttctcaggctttggacacttctggggatggaggtgtggagaagtggggagttccctctcttcatagtaaataactctgaaatatgtgaatgtgaatggcaggagaatctggccaaggatggggccgaaaagggtggttctaattgtttgcttctgatgttgagtctttagctgaccccacaggcaggtttccaaggtgcaaagagatctttcccgagtcagcggccccatcctcatcctccctccctttacttcctcactgtgcagtctccctcaaggatctactgtgaaaggtgtgtttgtagtgatatccaacctaactcagtaacgaagtcgttacttagctcttagctgtgaaataactctggaaacttccccaccccaaccataaattcttacttataaagaaacaggtccccaaactggaaacagcttagtccaggcctcagcgagaaggaaggacaccatgactgctccatgctgggcacagccgggcagtcttgccaagtgcctgctggaggctgtgccggcaagaggcctgcagcaaggagattcccttccctcgggccattatcaatactgtctttatctggaggtggggaagcgcagccctctgagacagcaggacaatggtcagttcagagagggtgagggcagcaaacgcttcagaggacacagaagccagaggacccccccccgccccacagctgggtcagcctggaaaatccatctattagggactttttggcagccagatggcagcaatagcccattaggtctcatcccgagttccaagtcttggctgcaaatgagcctcagttcgccttactggagagcacccccagattcctgggcacagttcatttccagccctttctagatctgatcttttagggggaaagacagcttaaaatgttcttttcattttaaagaaaattattctgtctgcttaagttggaggctacttactctttcacctgacattttctttccttttattcttccagatcaggaatgaaatttccatgctgctcataaagataatattattgtactaattatttttattaccattgtaattatgatcattatgttgatattttagtcagggttttaaatgcacatttattccaagtatctttgtgttttctctttaatatttaaacttattctctctgtgagtatataagtagactggagggacatccagatgtccagttttgtcaggcaaaaaaaaaaaggaaagacttaggaagtaggaaaattgtttctgtcatctctatcccaacaagagacgtcaagaaagatccaccacagaacaaaagtttaaagaagaatcaaagccttgattgggcttctgacaacatggtcaccatcaaggttgtcattttctagatcccagaggcctgggatgcgacgtcaggtggcatctcatgggctcggggaatgtcgagtcactgactgtccagcccttagccagcttctctcccacatcctcagagctctcctgtgcttctgaaatctgttaactaaatctttggcttgcctctggtatttaagcaagaaaattccctcccagaggtgaccccatccgcttccccacaatccatccttttgccatcggcgcacctggggcgtggcttaggttcttcaatgcagggacatttgccccctcccagaagctgctgggcacagtgaggtggcgtaagagtgactggcaggtggtaccttccccaggaaatttcaccacaccacccagttcctcagcctgccccctccccctgtgatgcatgcccccagcacccaattctagccagctggaagtgggtggagggacagcaggaggccagagaaaccctgaacaaagctgggcggctgctcaggcatcacaggctgcaccccctctgaaagcatccccactgggctccggccacatcttcagtgcactgtgctgtgtgcgctgggtgctcacacgctgtccccagacccacaaagtgctaggccccagttgaagaaaggggtgaaatggccagcttcaccgaagggaagggaagggaagtattgggcgatgccagccccacagacgctcagcaaacattagtgcacattctcctagtcctcacccaatggcctcctctacccccatgcatggtgctgccacatcagaagccccaagagaagctccctgcaggagaggccagctccctggatgcccaattgcatacctggccgaatctgccattgagtcaccttagcaaataggctgctgtcactaggaccaagctctcaagcagagggatgccaacctagtccttacttagcccacgaatcatctagagcatcctctagtcttttgtgggctccctccttcccatttgaagagacattgttcagaggaagaggggaagatttgaaatgtcaggtcacggaggagtgtttaactggagcctggtgaaccgcagggcaatttgcttctgctcactgggttctgactggcccgtctggacgtgggcccccatgtctctgtgcttagggcctcttcatgatgttttggatgtttccaagggaagtgggtgagcagatcaaggggtgggagagtcgaggcttgatgccagttaatactgtgaagtggagcgtgcggtcagtggaattcagaggaaaaagaagggttggagcaaagcggcattcatctcctggactgttagcctttctagtcttcctggtggctgaggtgttcacgggctgggggagtcagctgacctttgtcctcttcaacctagaagactcagcccgcccagacaccaacgtgtgagacggatggacatcaggaagggaaggggagattagcccaactgctgacagaacgatttcccttggttggaccttgggaatggcaaacactcatattggaacaagcttggggtggaagatttaggccgtgtgagcgtgtgtgagtgagtggaacaaactttcttggaaactggagggaggagatgaggaggcttcgggaagtattactgatggctcatggttgagagagcgacgtggggacccagctcgccccagcttttgtcccaatttctctttgtctgatgctgagggcagggtggggtgtgggaccaccactcttgttggcctgtcaagtagaccctaggacagaaaatggaaagaaggaaatggctcggtgctctcaactagcagagagaattgaggagaggtaagggttccttctgcaggccagcctgggactccacagcgccagcaggagtgacttggccacaagacattccagccccagggactttgcaggcttcattccctgtctgtgtcttttccttctggtgtgttttacagacttctgatggggaagcttcaaacttgagcaggccagagatgtccttaccaaattggaaaggaaggtgaaactgttcctttctttagccaaagaacccttctcaaagacgcctccagaaatggacaaaatggccttcccttcgttcctttccaggcaataatgacatcattagtgatgcaattctatttgtctttctctttcctctctgtcctttttttttaaaaaaaaaaaatgcatttatttcaaaactgtgctattcttttaagaggagtggaggtgaccccttcgatgctgctgctatcgggagacaaggtgccataccaatacgtgggcttgactaatcccaggccaccatgggagagagcaaagcagggctgccaggagttcagttgcatcaagggcgtagagcacgcgggggctgggctcggaatagcagtacctttccactttgatgccttagaactctcacttctcatctccacagaccagactcagtaaaatctcaggccactagagaatggaaggcggtgaaacaggatttaaatgcaaaaaaaacctattggaggcttttggcaccgtggctcactagagggacccagcatagtagaggtttctcttgttgcagcttctgaaaagttcaaaaaagaactccaggccgttcttccctcaaacccagtgagagtttgcagagaagtgccccctgcagggctcccgtcccagaacaccagcaccagagagggtcttcccgatgccccccgctggacttgcccaagcctctgggagcccctcatctcagatccctgtgttgaacatgacactgactgtcccttatttgttaaaatttgcaatatctctcaagtaaataatagccaacatttgttgaatgctttcatgactcccgggctaaggcctttatgagcgttgtctcaaggggccccaacagccatcccacagggagggggataacagcccccatttatagataagggagctgaccggatgctctgagaagtggcaggtgttgaaggaaggataaagcagtgatgggccagaatccccaaggttcccttttttgttcatcaggcccttcctgagatgtgatttttaatcttttaactttttttaattaatagcaatgcgtggcctcatatttctatgaaccatttagtgatactcccgcttcctgcatgccacacactgtgctgggaattgctcatgggttgtcctgtttcatcttctccgtagccctgtgagatcggcaatattagtccccctacagccaaggaaactgcccagagccacacaactcttgaggggcgaggagggcttgaacctgagtctgcccagctccagaactgagcttgcagccattagccacagctgtctcctgcatgtctgagcaaagaaaggcctttacacagcatcaccctgtgccatcccatgcaccgtgggactcagctaaaggactgtgcaaagagggggctcctgagttggatttaggcaaaaggggcagaattcgtttgatttttagagaaaatctctggagagtttcttttgattcatagaattccttttagatttctttccagcataccaactagctttagtagtgctgctacaaccagctcttataagtaagagtgaaaaagtattcttttcttctttaaaaaataagtttttcttgcttatagttaattctagaaaggcaatactaaaggtatatatttttttcaaaatgctattttttactgcacttgataattatcctgacagctctgatctctgtaatagattcactcttcagctctgggcagaaccagaggcagggttcacaccaaatttgtaaataccatatgtgggtctggtgtccaggaacttttttctttctgttaaaaaaagaaaaaaaaaaaaaaaaaaaaa

SEQ ID NO: 28311 - DNA, 2894 bp, Homo Sapiens
gggctttcctgcttccggtctggcggtgagtggggagtgggatccgatcccgtggggctatgtaggggaagttggtggctgcagctgccgtggttttctcctggtgtccagcagaaacggcggcggcgcaaggtgtggctgggccaacccaggatctcccaggaccctccgctctgcgcaacaaggggcccgcgcttgccaaggccgacgggcaggagtgaacgtggcctccgtgggtctgcagccccgataggccaattgtacagaatttaaaccgtctctcagatgtgtacagtagaactcaagaagacagactaccaagggtcatccgaagtcgtgattgggtcactaataacaccaggacaaagttaagggatcactactcaagcataagccccagttttcataagactgctgtgaagatgtttgatataaaggcttgggctgagtatgttgtggaatgggctgcaaaggacccctatggcttccttacaaccgttattttggcccttactccactgttcctagcaagtgctgtactgtcttggaaattggccaagatgattgaggccagggagaaggagcaaaagaagaagcaaaaacgccaagaaaacattgcaaaagctaaacgactaaaaaaggattgaaggactgaacaggctttgcaaccagaggaaaatcatttggaaaattacacagctttggaagaatccactaaagtttcttctttggatttcttgacagtatgatttagtaaatgaaatttgaccaaatggaagaatcatgttagttctgacctcaatactatagtaacttttaggcgtgggtgtagaagtttataggtttctattgacagttattgtaaattagcatttactgtggtacaaattctttataactgacttagtcatttgccgcttagcagtttatatactgaaatgaaaacatcttgtggggaaaagtgactttagattatgaactcaattcaaatgaactctatttaaaatggggtcctattttggacaaaggaaattaagaatgtaaaagtcagaacagtcttgaggtaaaaagtgtgctttggcttaaaagggatacagtatattaattacatcttttattattattgtttatttcttagaatcatttctggctttctcaaaacaaaataatattaatgagtacttctatttgctgcatttttcttattacagcctttgagacagctggtaattataagtcattttccattttttaaaacataattttataaagaattctcttatctcgactatgtagaataccacctactggacagaacaatttttgtactcacaaacactgccattttcttagagatggcttgagaggagtaacactatggtttaaagcttgcagtaaaaatgccaaacactgtagtaccttggaacccagtttattcttgtgctaagcagaactgtaaaatagttaaaatgtcttatcaagtaattcgccgattacaaagacaccatttgttttttatttcattctttgttttaactcatgtggtagtgatatttaatactttctgatcaaacaggttcaaagtaaaacgttaaatttcacatttcttttaaagaactcttaaagtgtaacagttacgccatacttcataagtggtaaagaaaggtataaaatttggaaacattttgttgggcatagtagtgattgggtgaaaaggataaattatatcaaaatgagaatgtgctgtaattggaagtagggagctaaaggatgtttctttcagtttagtagaactggaacgttttactattaaacatggcttttataaatgcatggtccaataattttattcactgttagtatttaattcactgtcagcttattaatgttttctgtacccattaatgaattttaaattacaaaaaattgtctagcagctacagtttaaaaatgaaactagacattaaaataaatttgataattttttataaagaggtcctggatttttttttttttggaggaactaacattttaagttacattatgttatgcaagttagaatttcagttacagctaagcatacttgtaaaatttcaggactgtatctctcagaacctaaggaccactgagaatgtttatggaccagtttgaataacacttaatgctattcttttagattatcagtctctacttggtgccagtgtgagcaacacattataactcaaggcaccgaaattattcagtgtgtaagatatatctataatatgtttggttttctgcaatcaagctgttcatggaaagaatttatgtacatgttttacttagggtcacattttagagtaaaagtattgaagcaaagaatatagtcataattctcagttacctactaaagttatggtttcatcagttctgttgtaacaacttaaaggtatttaaaggtctgtttttctataatttattagtcttaacacatgccagttttgtatttgtttgacatatgctttttttttccacttttttccatcatttagagagcctttctatatatgtgagattcatactttacagtgtgtgtgtgtgtgtgtgtgtgtgtgtgtgtgtgtgtgtaaggggctggagtatagagaatattgtgaggtttgggattcttcagaaaaatcacctctcactgcaacagagtactgttgttaaagaatcccatttgctattatctagaatacttttaagaaattgtttacttattacattgtttctgaagttctgagaactaagtacaatcaattaccattctaaagctggtcttgggggagaaagaaagctgtcccctggctgcctctaacaaacactttatcaaaaatcagcaaataaataaaagtttgtatgtcagaaaaaaa

SEQ ID NO: 28312 - DNA, 6325 bp, Homo Sapiens
gagacagatgtgggtccatgttctagctttgctctgtgtcgccttgagcaagtcatttaactttgttaagcctcaatttctcatctacagaatgagaataataacgattccaaagggccactgtaagagttagatgagaaaacacagagctcttggtgcataatcccgctcagtaatgatcattgttggtatactgctgtgctcaaaggtcactgagcggcagtgattatgtagcattctgcatataggtggtgttcaggtattgctgtgacagttcctctctccttcctgcctgacaggtattcgccaactacagctcatcctattcaaggtggccctgatgctgggagttgaaatccatgtgaatgtggagttcgtgaaggttctagagcctcctgaagatcaagaaaatcaaaaaattggctggcgggcagaatttctccctacaggccattctctgtcggagtttgagtttgacgtcatcattggtgccgatggccgcaggaacaccctggaagggttcagaagaaaagaattccgtgggaagctggcgattgccatcaccgccaacttcataaacagaaacagcacagcggaagccaaggtggaagagattagtggtgtggctttcatcttcaatcagaaattttttcaggaccttaaagaagaaacaggcatagatcttgagaacattgtttactacaaggactgcgcccactattttgtaatgacagccaagaagcagagcctgctcgacaaaggtgtcatcattaacgactacatcgacacagagatgctgctgtgtgcggagaacgtgaaccaagacaacctgctatcctatgcccgggaagctgcagactttgccaccaactaccagctgccatccttagactttgccatgaaccactatgggcagcctgatgtggccatgtttgactttacctgcatgtatgcctcagagaacgcggccctggtgcgggagcggcaggcacaccagctgctcgtggcccttgtgggtgacagcttgcttgagccattttggcccatgggtacaggctgtgcccgtggcttcctggcagcctttgacacggcatggatggtgaagagctggaaccagggcacccctcccctggagctgctggctgaaagggaaagtctctaccggctgttacctcagacaaccccggagaacatcaacaagaactttgagcagtacacgttggacccagggacacggtacccaaacctcaactcacactgtgtcaggccccatcaggtgaagcatttgtatatcactaaggagctggagcactaccctctcgagagactgggctcggtgaggagatctgtcaacctctccaggaaggagtcagatatccggcccagcaagctcctgacctggtgccagcagcagacagagggctaccagcatgtcaacgtcaccgacctgaccacatcctggcgcagtgggttggccctgtgtgccatcatccaccgcttccggcctgagctcatcaactttgactctttgaatgaagatgatgctgtggagaacaaccagctcgcatttgatgtggccgagcgagagtttgggatccctccagtgaccacgggcaaagagatggcatctgcccaggagcctgacaagctcagcatggtcatgtacctctccaagttctacgagctcttccggggcaccccactgaggcccgtggattattggcgcaaaaactatggagaaaatgctgacctcagcttggccaaatcatccatttctaataactatctcaacctcacatttccaaggaagaggactccacgggtggatggtcaaaccggagagaatgacatgaacaaacggagacggaagggcttcaccaacctggacgagccttcaaacttttccagccgtagcttgggctccaatcaagagtgtgggagcagtaaggaaggtggaaatcagaacaaagtcaagtccatggcgaatcagctgctggccaagtttgaggagagcactcggaacccctcactcatgaagcaggaatctatgcgaaagtcatttccccttaacctgggaggcagcgacacgtgttacttctgtaagaaacgtgtgtacgtgatggaacggctgagcgccgagggccacttcttccaccgggagtgtttccgctgcagcatctgtgccaccaccttgcgcctggccgcctacacctttgactgcgatgaaggcaaattttactgcaagcctcacttcattcactgtaaaaccaatagcaaacaacggaagagacgggcagagttgaagcaacaaagagaggaggaggcaacatggcaagagcaggaagcccctcggagagacactcccaccgaaagttcttgcgcagtggccgccattggcaccctggaaggcagccccccaggtatctccacctccttctttaggaaggtgctgggctggcccctcaggctgccgagggacctgtgtaactggatgcagggactcctgcaagctgctggcctccatatcagggacaatgcttacaactactgctacatgtacgagctcctgagcctggggctgccactcctctgggcgttctctgaggtcctggcagccatgtacagggaatctgagggctccctcgagagcatctgcaactgggtgctcaggtgcttcccagtcaagctccgctgacatggctggctgccccaaagtgccttcacatttccagggaggcttcagatggcagtgcgtttgcagtttgctcaggctctggccaggaagcctagcattctctaagcaattagctcaaagccaaagaatttcacatgggccacctccgcctggccttatcagggtgaacatctactcacggtgctagggccagggatgatatgaaggatcttttctatagctttgtgagccatacttctgggtttacatttcaatttttttaattttaattagcccagagaaagcatttttttctatgagtgtcaatttttctaaacatgggtttgaagcttataaccagttttataaaccccttgaacactgcagtgagttatcaaagccactgcctgcaaagtggatgatttaagattttacacgcatgaaaatgagtgtgccatctcctgaccagtgccttttgacttaggtacccagatgccacttgtcagcagcaggatactttttacaacacgaaagcataattattttagaagaagagagtagaagggcagaatagaattcaacttacagaagcacggagtagtgtgtggttggctgttatctgtccccctgggaggaggactgttttgctcccttgttttgatgttaaacagtagcttaaaggctttcccccccataccaactcacagccaaatgacaaagaaccgtggggtttcaacagattctacaaacatgcattttcccttcccactaatgggcactgcagggaaagcccattggcatttgaccatggagctgatgcagtgccaaagatgagctctttcaactgatggcattttagcccctgtggctcccagcggatcccccagcccgggctgcaggctgagccaaggctgtgcaggttccatattggtcaggccaagtggagtggaagactctgtccacttatgtggtgtcctttgggactgagggggtttgttagcacatcaggctattgctgggaagcgtggcctgcccagtgagcattgcctgtggacatcctgactgcttagctgctccgctgccacacatatgtggtcaaaacagaaaccaatttcacactgccctgggaaaggaatgggtctgacctccaggggaagctctaccatatcttgactggcagggaaggctgggagtggaagctatttatgggctgatccaaaggacatatgcatgagtaagggtaaaaatgagcatgcaggtccacctgtgttcttactctgggtatctagaagagtcctcagctctccctactccacgctgcctagacatacacagctgcagggtctggctgaacaatcaaggggccgccagagaaaggccatctacggtgcgcagtgtatctggagttgctgggcccaagatagctctgtggagttatcactagagatgcctctggattaactaagaggtgtgcctgggtgtgggtgaggagtcagaacctttgagagctttgagatgacagtttctatggggcgggaagaaggaggtgcatttctacaaacacttccctgaaatccttgggaaaaacagaggcatggccgtggccaactctgtgggaactggcgcctctgtccttgttggcactgttctcagtccgatgacttgcattgtgttttctccaatttttgctgggattttaatgttcagcatggtgggaggaacccttgattccttttgtttgagtatagaaagtaaatttttgaggtcatgatgtgaacggccatgttattgtgattatcttcagctcaggataggctgagatgctttgtggagtgttccatgaagcccgagtcggaatctctgactgtcgtgtacagccataaggagactggtatgaattactgtggcgagacagggcgtgcctgtcagaaatctgagatgtttgtacgctctgagatgttgaacctttctggtgggcagcaccgacacccaggggtggacccccgaggatgaatgcctctaggcctccgcaacatattcaagaatgaatgggagacgctagagtaaaatgggggcagagaggatatcagggagcaagatgcaaactgtgtgcatccactctcgtaaacaagtagctggtcacaaccagaaaggttcatctctcctaagcaaacagcgactctttcagaggaagtttccctctttcaatcgtggccttattttcaactctggtgccttctcgtgatgttaatcatttccttttttccccacactaagctctcttttctatctttctctctctttccaatcttacgccatggccatcagttcatttcagccttccagtgctacacccacttcttggctgacacacttctgctctaaggtgactggttttcttgccaattttcaaagagtggtactaacccccaacccgctttccgcaccccgtcctctccgccagcagtactggttgcactaactgtgagtgtcttgcatactgatggactcatttggtggcatggttggctaacagcatggcggggggtgttcagcttgagacccatgcctgtgttcatttcccatggagctggcagcctggtctaccccaagtgcatgccccgcctctcctctctcccttgggtctgcctgcgtgcatgcttctccagttgcgtctgcgaagctacctactttcttgggagggtcgaccttgatcatgaaacaataccatgagggggcctctgtcacctttgaaaagaacactttttgagcagcctcaaaaagctcatacataccagcaccttcttaaattggctctaatgtaaagattgttaatgtcatttatcaaaaccataggtgattatttggagggatttaaaaaacttaattactctcaggcctcatcccaagcttgacacatgctctgtaggttgaacacataatcacaaatattctagcaaatgctgccttggttgcagcctgcactgtagacccaagggttttgctgtggctcttcttatctcccttggctcataaagcccctgatgatgccagagcttcaattagagccatcatcatcccaggcagggatatctttgagaaatgactcagttcagccccaggcccctgtgactctgcttaaagcacacatttctgctgactcttgtacctggggcagcaggataatcaccaacacactcttaacgagaaacaacacaccaagcacagtggagctgtcctaggcaacactcgcggtctcaggctgcggtgggcgtctgtcctgcatgtggcccagaccaccctgacccccgggcctgcctgcctggccctgcatgctgcacgctcactgtatttgtgcagatcctggccagtacaaagtcgttgctcttgtcttatcttctcttacagagtctccctccctttatagaatgtcaaccaaagagtgccctcctcccctctcagcctcctctttagctagcctccccatctcatcacaacgcatgtctgtgacctttggtaatcatttacagtgccacacggaaccctgtattttgcacacagcaaaacaaacaatgtttagctttatttatggtatttgatgctgtaaatggaaataaatattgttctttataaaaaaaaaaaaaaaaaaaa

SEQ ID NO: 28313 - DNA, 2840 bp, Homo Sapiens
ggagttgccaggggagattgaaaagcagcctatgcgcagagctgcagctggagggcttgcggtgggacagcttccaggagagggtcccgcaggagaggaaggggcagccctggggaaggcgatgcgtggaggaggctgctcaccccattccccatctgggtgtctttcaggagtcatggccggcttcaacatggggggcgacctcagggagcctgccgccagcattcccctgggctccctggcagctgttggcatctcgtggtttctgtacatcgtcttcgtcttcctcctgggcgccatctgcactcgagaggcccttcgctatgacttcctgatagcggaaaaggtatccctcatgggcttcctgttccttttgggcttatacatctcgtccctggcttcctgcatgggaggactttatggagctccccgcatcctgcagtgcattgcccaggagaaagtgatccctgcacttgcctgtctgggacaagggaaggggccaaacaaaacacccgtggctgccatctgcctgaccagcttggtgaccatggcctttgtttttgtgggtcaagtgaacgttctggcccccatcgtcaccatcaacttcatgctgacatacgttgcagtggactactcttacttctccctgtccatgtgttcctgcagcctgaccccggtgcctgagccggtgctcagggagggcgcagaaggcctccactgctctgagcacctgctcttagagaaagctcccagttacggctctgagggacctgcccaaagagtcttggagggcacgctactggaattcaccaaggacatggatcagctcctccagctaaccaggaagcttgagagtagccagcccaggcaaggagagggtaacaggaccccagaaagtcagaagaggaaaagcaagaaggccaccaagcagaccctacaagatagcttcctcttggacctcaaatcccctccttctttccctgtcgagatctctgacaggttgcccgctgcctcctgggaggggcaggagtcctgctggaacaagcagacttccaagagcgaagggactcagcctgagggaacatatggagagcaacctgttcctgagctgtgcaaccaatcagagtccagtggagaagatttcttcctgaagtccaggctccaagaacaagatgtctggagaagatccacttctttctatacccacatgtgcaacccctgggtctccctgttgggggctgttgggtcccttctcatcatgtttgtgatacagtgggtgtataccctggttaacatgggtgttgctgccatcgtgtatttctacattggccgggccagtccagggcttcaccttggatcagcctccaacttcagctttttccggtggatgaggtctctcttgctcccctcctgcaggagcttgcagtccccccaggagcagatcatcttggcgccgtccctggctaaggttgacatggagatgactcagctcacccaggagaatgcagacttcgccactcgggatcgctaccaccactcctccctcgtgaaccgggagcagctgatgcctcactactagatgcagtgctgggaccttcctcttttggagctgtcccatgtacagtggacccaagcccaggaccttcgtggagctgcttctccaacctgagaaactcaagacccatcctcccgctgtcactttggacaatggaaatctacattttcttttcccttttttttttttttgagacagagtctcgccttgtcacccaggctggagtccagtggcacaatcttggctcactgcagcctctgcttcccgggttcaggcagttctcctgcctcggcctcctgagtagctgggattataggcatgcaccaccacacccagctattttttgtatttttactggagacagggtttcaccatgttggccaggctggtctcgaactcctgacctcgtgatccacccgtctcggcctcccagggtactgggattacaggcgtgagccaccatgcctggccagaaatctatgttttcttagaacatgtggaagaaggaaaaagacaaaaaaggaagtctggattctgaggaccacgtctcacccagggtgacatcaggaatggtgctagcctctgcaacacgacacccagtctgaagagctctatacaggtactaagactagcaggggacaccaagactctgcacaaccagattgcttgtgcagagggccacaataagtgtatgttttatattttattgtattatttattcaaaaataaataatacactcacatgtttccacacccaaaagatatatagagtgaaaagtctccctccaatccttattctccacctgctcagttcctgtctaccctggcctagaggtaaccactattctcatccatacatccagcatttctttatggatatacaagcaaatgggaatgtagagtctcacattctctctttatacacaaaagttagcacgttatacacatgttctgcaccttgcttttttcccttaacaatctatcttggagacatttcatatcaattcatatgccatttgttcatttttttcattgtatagatgtgttataatttatttcgccagttccacaatgatgagcatttggattctttccgatcttttgcaatgacaatcagctctgcagtgaataatcttgtacaaatgtgcaagcataaagtgtatctctaggataaattccaaaagtggaattgcaggatcaaaaggtacatgcattgtaaactattattgtttagtgagggtctttttaattaaagaattaacatgaattgccaaaaaaaaaaaaa

SEQ ID NO: 28314 - DNA, 8015 bp, Homo Sapiens
catcagccgctctccctgactaggggtagctagcggcctccctcctttgggttctgtatccctacttccattaccctcggctcctcccactcctcgggggctccgtgctttccgcgggtctgtccgggggctccggaccctcggcgcagctgagttgatggcttccggagaactggcatagccgcagaatatgagtagtgtcccaagaagagtgctttgcctttggcacaaggatcagaataaaggtgaattgctattacatagggtttttcggtaaaagtcactgaaaattatttgccatacagtaaccagagacctccaactaggggcccccaaactgtatcctgcctgtagccagaagcaatttttaaagaaaatatgtctcctctgaagatacatggtcctatcagaattcgaagtatgcagactgggattacaaagtggaaagaaggatcctttgaaattgtagaaaaagagaataaagtcagcctagtagttcactacaatactggaggaattccaaggatatttcagctaagtcataacattaaaaatgtggtgcttcgacccagtggagcgaaacaaagccgcctaatgttaactctgcaagataacagcttcttgtctattgacaaagtaccaagtaaggatgcagaggaaatgaggttgtttctagatgcagtccatcaaaacagacttcctgcagccatgaaaccgtctcaggggtctggtagttttggagccattctgggcagcaggacctcacagaaggaaaccagcaggcagctttcttactcagacaatcaggcttctgcaaaaagaggaagtttggaaactaaagatgatattccatttcgaaaagttcttggtaatccgggtagaggatcgattaagactgtagcaggaagtggaatagctcggacgattccttctttgacatctacttcaacacctcttagatcagggttgctagaaaatcgtactgaaaagaggaaaagaatgatatcaactggctcagaattgaatgaagattaccctaaggaaaatgattcatcatcgaacaacaaggccatgacagatccctccagaaagtatttaaccagcagtagagaaaagcagctgagtttgaaacagtcagaagagaataggacatcagggcttttacctttacagtcatcatccttttatggtagcagagctggatccaaggaacactcttctggtggcactaacttagacaggactaatgtttcaagccagactccctctgccaaaagaagtttgggatttcttcctcagccagttcctctttctgttaaaaaactgaggtgtaaccaggattacactggctggaataaaccaagagtgcccctttcctctcaccaacagcagcaactgcagggcttctccaagttgggaaatacctgctatatgaatgctattctacaatctctattttcactccagtcatttgcaaatgacttgcttaaacaaggtatcccatggaagaaaattccactcaatgcacttatcagacgctttgcacacttgcttgttaaaaaagatatctgtaattcagagaccaaaaaggatttactcaagaaggttaaaaatgccatttcagctacagcagagagattctctggttatatgcagaatgatgctcatgaatttttaagtcagtgtttggaccagctgaaagaagatatggaaaaattaaataaaacttggaagactgaacctgtttctggagaagaaaattcaccagatatttcagctaccagagcatacacttgccctgttattactaatttggagtttgaggttcagcactccatcatttgtaaagcatgtggggagattatccccaaaagagaacagtttaatgacctctctattgaccttcctcgtaggaaaaaaccactccctcctcgttcaattcaagattctcttgatcttttctttagggccgaagaactggagtattcttgtgagaagtgtggtgggaagtgtgctcttgtcaggcacaaatttaacaggcttcctagggtcctcattctccatttgaaacgatatagcttcaatgtggctctctcgcttaacaataagattgggcagcaagtcatcattccaagatacctgaccctgtcatctcattgcactgaaaatacaaaaccaccttttacccttggttggagtgcacatatggcaatttctagaccattgaaagcctctcaaatggtgaattcctgcatcaccagcccttctacaccttcaaagaaattcaccttcaaatccaagagctccttggctttatgccttgattcagacagtgaggatgagctaaaacgttctgtggccctcagccagagactttgtgaaatgttaggcaacgaacagcagcaggaagacctggaaaaagattcaaaattatgcccaatagagcctgacaagtctgaattggaaaactcaggatttgacagaatgagcgaagaagagcttctagcagctgtcttggagataagtaagagagatgcttcaccatctctgagtcatgaagatgatgatgagccaactagcagcccagataccggatttgcagaagatgatattcaagaaatgccagaaaatccagacactatggaaactgagaagcccaaaacaatcacagagctggatcctgccagttttactgagataactaaagactgtgatgagaataaagaaaacaaaactccagaaggatctcagggagaagttgattggctccagcagtatgatatggagcgtgaaagggaagagcaagagcttcagcaggcactggctcagagccttcaagagcaagaggcttgggaacagaaagaagatgatgacctcaaaagagctaccgagttaagtcttcaagagtttaacaactcctttgtggatgcattgggttctgatgaggactctggaaatgaggatgtttttgatatggagtacacagaagctgaagctgaggaactgaaaagaaatgctgagacaggaaatctgcctcattcgtaccggctcatcagtgttgtcagtcacattggtagcacttcttcttcagatcattacattagtgatgtatatgacattaagaagcaagcgtggtttacttacaatgacctggaggtatcaaaaatccaagaggctgccgtgcagagtgatcgagatcggagtggctacatcttcttttatatgcacaaggagatctttgatgagctgctggaaacagaaaagaactctcagtcacttagcacggaagtggggaagactacccgtcaggcctcgtgaggaacaaactcctgggttggcagcatgcactgcatatttgttactgctgcccacctcacctttcctctgctgaaggagaatttggaattctacttgatgcgggagcaacaaacagctcagggccaaaccaaaagacaaaaattggagtaacgtagaatgctccatgctattttatggaaactttggtctcacatccgtagctgattatcctctttttctcctatgagtggcacttcttttgtcttaggaatacatgttgtaaatatatatctgtgtatgtgtgtatacacacacacagacacacacacacacacacgggatgaatggagccttaaagagttaggatgagccaccagaatatgcctgctcaaaattaatagcacagcagtttggagaagaaatgaaggtgtcaaagagtccattcacctgagaaatgtgtgaagacatacttatcagttggcttttagcttttatgttccttgagtagtttcactcaagtctgtaaccttttgtgttccttattagtaaaattcactggaaagccagctcttcatgttacactaatgacagtttgttctctttgcaagagaggggcattactgtcacctgacttgaggagctgttttgttgttgttgttgtctgcaaatttcatgaatttgtgatgtctttgctgtttacatgcagtcccaagaaatggattgttggtgctttggaatatgttacagtcccacatttgatatttcttatatactttgttttctctaaggagatttcttcacacagtatgttcatcatatatcatcatcattattatggtggtaaagatagaatcttttttcttttttgtcattctgccatggagcagcattaccctaatggattgcaaccaaaactttaaacaagtagaaagataatatttctccaattgggactccccagcaggaatacttagggataaggaagaatgctagcatctctgtctctcaaacatagggaggataagaagagtgttcttctggtaaagctaaaattctggaccactgaagctaaaagccctattgcaagtatgaaattaagtacttgagctataggacaaaccttgggcatttaaccatttactgtctggctttgcccttaaaatagggttgcaattaaaatgtgattggcttaggtaatcccaaaaactaacaaataacaaaggtgcataatttatttatctactttttaggtgctctgagttgaggcaaagtagagcggcaacattaagtgctatgctagtcacttagctgacgtaaccagcttggttaagcagcttatgaaaccatataaagaattcttttgaggatggaattctgtccacaaaataattttgtgagcccagatatcattaggatcacacagagttaaatatagaaaaatgaaaccatcattatattctttcgtgttttttcttttattataaacaaggggattattctttagttctcagaggtagggacaaaaccacatcaggttttcagaaggaaaaaacatttaaaaacccaccatcacatgagagaatcacttgaacccaggaggcagaggttgcagtgagctgagatcgcatcattgcactgcagtctgagtgacagagtgagactccatctcattaaaaaaaacgaaaacaaaaacaaaaaaaacacaaaccatcatcacagaagatgcaacatcttttctgaaagattgccttaagagagctccagtcctactcttggaacttggatgtattctaatgtagtaaactattctaagttttcattctttgaattataaatggcctcagcagttttgctcaactactgataaatgctttgcctcctaccatctacctatataccttattgtaatgaatgttccaaaatggtagagtggtagaaaacgccagagtagtttagagcagaggaaaatatttgttttaaaactagctttaaagttttgtttcatttctaccaggagcctctttggtttggtttgattttgcttggaaataattggttttcttataaatgagtgaagcggtgataaaattctttggctagttattaattcttttacgtgtctttgcatttgagaggcactgttaaaaattattgggaaagatttaaagtgcaggctgcaattaaaacatggagaaaagtagaaataatgccataagtctagattgcctcatgaagcagcctcatttgaattgctttcatagctttcatgtgtgtatggtttagaagtacacttacctcagaaacctgatttgatcttcatgtcttgggcaggagttgttgaaaataggttattggaatatataagttatctcactgctcatgtacttgcatgtttgggactcaaattttacttgatgtctgtccattcttgtggccctatcagccttctccttcctttactcctttaatctacttctttgactaccagtggagatttcagctggactatgttgatggggtttgttgttgtttttgagctggctgtatatattttaaaattataaatagataatatattattttttgcacattgtgatcagtttgcccagaattggggatggggcagttagcatgttggggccaggaagggacaagttagataaggactgagtgcttccgttgcaggcagtttgcacaatacctaattaaccttcctattgaaaataccaaatgtgtggttacattactttaaatgacattgaattggaacttgatggcaattagttctagatacaaccttttgatctttgttggaattttaagggaaaaatgaactaaacttcatatttgttgattttaatcacctaatagtactgaaggttggaaagttgcatgtggctggatgctgttaatttctttaatagccatgactataatttaagcctatgagaagatagactgtttcgtagggatatatttacatgtgtgtgcacactcatgagttttgtctcagcaggatagaataagcaaatccatgaactggtcttctattaatactttgattctaaaaattatttgtttacttgctatggtctgttcattctgggcctaaccctaaaggctcaataacaaatacaacaaatgtaaatatgtttacattttaagacatatgcagtggttcttacagatcagttaattaactccagaaagcaaatgttagactacacatttatttttctccttgatcaagtgtaaaattctgaaacagaggctttaaaatttaaaacctcagcaaaataatccatgaatttactgattcttctgtatcgtgtgtagttaccattatgtaactatacacacatacagctatggatatagttgtataatgaaaattatctgcaaacacctaaattaaagagaaaaaaaagtagtttgtaaactcatttgtgatctactgaaaagaggttatattaaagcaaattaaaatattttccttctctgtcctctgaaatgactgcagtagatactcttagttatcccatttagggtggttggagggcctttttaatttaattgaccccccgaggtggtcttttgttttaaacagggggcaacagctggatctccaagtacatatggattttgtatatataggagatttttagaaaaatcaacaacctaacaccagattcaagtcacataaaagtgttccaataaaatggatggatgtctttttcctccccattttgctttatactgagtaatgcactcttgcaagtgtatacaaaaactaaatagacttctgccctccaacatctttttattgcattacttcaaaatcctaattttgtctctactgatatgtcttattaacatctgaaaaaatatatattttttattggaaaattctaatttgttaggccttgaaagttttgtgacaattattttgctgtgtttaaccacaatcattcaccttatggcatgctttgattactagacttcaggcagtctcattcattgtatcatacttacacacaattagtaagttgtctccatgtgtgctatatgtctgaggtgtatggagtttttatttaaaaagtgtgccagtctgaatataagcatttgattttgtaacattggacttttcttaaaagtacagaggttcaaagtataggtatgtccattggcataagaatagagtgggtgagggtctggaccaggttccaggttggtccagtcagatgccagaacaaagaagaacagtcaactaaactggtctacttcaaaaatagtgggcctgtgtgaagaatgagaccacatgtgggtgtgcacacctcttgtccccaggtttccctccctttgagcttttctttccctccctaacttctctggcctattgtcattgttgtttctttaaacttaaggagagaaaaacaaaaatgagattcctacactttgcctaattgagccactaccaggttttctggcagctgtggccacattatttgtgagatgattttttttctttatgttcagagtgacttttgattctgattctttatgttttgtatggagcggcacttttatctgtgttttagcagaactgttcctctgtatcctttacggtttttctttgtttttgtttcctttttaaattatgcatagagtttttttgtgtgtatgaaattaaagcctttattaaccttcaaaaaaaaaaa

SEQ ID NO: 28315 - DNA, 2684 bp, Homo Sapiens
ggcttctgagcggctcgggttccgcgctgccggcagggcttgggggcgccttagagccgaaccccgttttttcaggaaagggcgctgcgaccacccccgtcccgggcctcagcccctctgctgcagaccctcgggatcgtcgctggaaagattctgaagcttggcggagaggggtgtgtgagtggacaccagtgaagtaacggtttttgtgttacgatgatttctgttttcctctgctgccctgtaatggcaggaactcggatagtctggtcttcagaccaggaggactcccaggagagaacggagagccagtgtgctgtgtgtcacggtccctggatgaacgtttgtggaactggattgaattaaacaagacgtgcaaagcaagtggttcacgagattcgattgctgtagggaccccgtgggtgtggaatcagacagtattggtcctttcatgactggcttatttcacaagacccgatgccgtcgaggtccatccatgctgagatatttacggagcatccccagctgctggatgctgggacccaccagtgggcaagagggccgtgcccaccccttcctggaagagacactcactcagtaaatgcagagattcagtgttggggtaaccccagcacacagccctgagggaggaagcccagtgatttgatcggatttgcttttctcttctgcctcggattctgtccaacccctggaaggacctctgaggtgtcccgtggctggttctagaccccattcaagcctcctcctccaggaagccttcccagtcctgggcatctgtagccagctcggtgtttctcacctggggcctgggacgtctcccattctgaactgccgtgttttgggtttactgttctctggcttttggtcccagccggacggtggcctcttgtgttcagggacaaggcaaggagcatccatgcacccccacagtacccaggctgggtctgtgcccgccaggcccccggcaaagcttggatgatccgggctgggctgttctcctgctgctctcctgctgctggcctcgctgtatcagctgatggccatcgcgcctcctgcacccgtcatcccgccctgcacgcccccgccacgtggatgagctccctggggagttagtggctaatggagtctccgctctctcttgtcaaatgcagccatcatccgctggtgctttaagggactctctcccgtccccaccctattctcaggtggctcctaccgacaccacctaatggtgaaccccaacacgaggacacaggcaatgccctctcaggaccactgtgggtgccaccaggcacgacttcctaaacacccacagagcaaaaacctggaaattcagccgaggcactgggaccccaacctctcccagagtggccccagctccacggcgtctgcatggctctggccgtgagcagggcagccccgacctccgtcctgacccagggcgccggagcgccactgcggatctcaccaccacacaagccagacctgctaggaagcccttcccggccaccagctctcgggcgatgcacacaacagggccttttgaattccctgaggttaaggttccccttgagtctcctgggctacaagcaaatcccccgaggggagaagtccaggctgacacagcctcctgcacccctgccttgggaggccacacctcgtttgcctctagaaccgacgactggggagcactgtttgcagagttctctctctctgggtaagttccggagccacatctcactggatccaccacggcctgggtggacggctctcgtgtgtttatagctgggtccctcgcttgggagctgcctccgggtgggcggcctctccagcctgtttgagtgctccacccggagcaggaagagggccgtgtgctctgggcagtggttccttgggcactgcatggtccttgcctccctccagggcccaccttccctggccgctgcatcccagccgagggcaggccccttttgccagctgaaggcagaaaggccggcagccctggggtggcggcgggcagagaaaccccccggagtggtctccgttcttctaaaagtgatgttgacccccgtgtcgcaggcagctggcagggtggcagttcgatctgtcgttacgggcttgcaccactgcggtctcccacccagggagcagctctgtccaaccacagcgagcctccagctcctaccctctgcctgggctggggcagagcctggggtctgggtgggagaagcgtgactctgggatgagaccttacaaagcaggttcctcctgggagtcagcccgggtctaaacgcagctgggcatgaaggggtgccatcggatgtcgagttaggaggacgagagacctccagccccggcacccgcatgtctctttggaaaccagctttggctgcgcccctggggacactgtctgccgtggcctcccgctctcctccccggcacaggcagggggtctccctcctccaccgccactcccttggcctcgccctccccgccaggcacctggtttttccccaccgacccccccgggggactgcggcccccagaaaggctgcactctgggagcaaagtggcctgaaaccagagaaaagaacgccgggggatttggcttaaactcgttaaacccaatgaaccctcttgccgaaaaaaaaaaaaaaaaaaaa

SEQ ID NO: 28316 - DNA, 2602 bp, Homo Sapiens
gacaggtccaggtggagaggccgggctggccagggcttcggcctccggcgtcgggaaatggcggcggggggcaggatggaggacggttccttggatatcacccagagtattgaagacgacccacttctggatgcccagcttctcccacaccactcattacaagctcactttagaccccgattccatcctcttcctacagtcatcatagtgaatcttctgtggtttattcatctcgtgtttgttgttttagcatttttaacaggtgtgctttgttcttatcctaatccaaatgaggacaagtgcccaggaaattacacaaacccattgaaagttcaggcggttataatccttgggaaagttattttgtggattctccatttactccttgaatgctacatccagtatcaccacagcaaaatcagaaaccgaggctataacttgatctaccgatcaacaaggcatctcaagagacttgcgttgatgatacagtcctctggcaacacagtgcttctcctcatactgtgcatgcagcactccttcccaaagcctggcagattgtatcttgacctcattctggccatcttggcactggaactcatctgttccctgatatgtctcctcatttacacagtgaaaatccggagatttaataaagctaaaccagagcctgatatacttgaagaagaaaaaatctatgcttaccccagcaatattacctcggagactggattcagaactatttcaagcctagaagaaattgttgaaaagcaaggagacaccattgaatacctgaagcgacacaatgcgctgctgagtaagcgattgttggctctcacttcctcagacctgggctgtcagccaagtagaacgtgagaggctcacggtcatgacagcaattgcagaggaacccagagtaattgagactgactgaccacctgacaagctgccacggggaactgcagcttttgctgaatagcattttacagtgtttgttggaaacctgaatttggttctgacttctgtggctgtttaaaatatagggcttgtgggtcacttgaaaagtacctgtagaagcccggataacttgaggggaatgtctgtttgtacttttggaaattatttaactgcttggtttatcctaggatcagaggctaaacaactccatagtcaacacttttccacctgacattagaaccctgtaatgatttcattatggataggggaagtctaacaagacaatcgattttaaacagggttttaatcaaataagttcttcccacttttaagctgatgaaagaagtcattatttcttgtgaatattttttcctggagagccttatcatgtattttatatgcttatgtggtgttggatgacatcatggaccatatagcttttatagagaatttttctcaccataggactgaggtctcaccaggtgatctactatgcaaattcctacagttttctattcttaagaaataagggccgggcacggcggatcatgaggtcaggaaattgagaccatcctggctagcacggtgaaaccctgtctctactaagaatacaaaaaaaattagccgagcatggtggcgggcacctgtggtcccagccacctgggaggctgaggcgggagaatggtgtggacccaggaggcagagcttgcagtgggccgagatcacgccactgcactccagcctgggcgacagagcgagactccgtctcaaaaaaacaaaaaagaaaaagaaaagaaataagatatgatgattgattacttggaccagtgttagaccgacctgtgttagacgaacctgtgttgcctattatattggcagcaccttccattagcaatagctgaaaaattcagagaagaatttagaactttcactttatttttgccattcttcaagaagttgctgtatatttcagtctggttataccttcaattgatcaataacttcaattataggaaaggcatcttctataattttaaattactgtaaaaaaaagataccttttaaagccttggattatacttaaaaattgtaatggaagaaatgcatattaagttatatgcagatattaaacatatctgattctgaagataaaactgaagtatttttcagagcaaatggcattatttctccatttttcctagtatgcccctttaatttgtcagtttgctgttagcactgttatatgctgccttagaaagacttttggttgaaggctgaatatgaggggaggggatatttatgactgtgttaatcttttttgatcattagctgaatattcaatatttgatatgtaaccatatagggatgtgttcgatataactatataggcaagggatatattgatttggccacatctatttgatttatggagggcaaatacctgtttcttttagatacagccattgccggggcattctaaaagttttctactaagataaagatgattgtgtatggctgggagcagttgctcatgcctgtaatcttagtactttgggaggctgaggcaggaggatcactcaaggccaggagtttgagaccagcctgggcaacaatgagacactgtctctcaaaaaaaaaaaaaaaaaaa

SEQ ID NO: 28317 - DNA, 5325 bp, Homo Sapiens
ggtcacaggcttgtgtgttgtagtcacacgggtgttgtcccaccaccttgccatgttccgtcccctgggtagaaaacaagccacgggccccactcacactcatggggaggagcctccacaagggcgggaccaccaggaggtgcgggtcatgggggcacttagaatctctctgccacagtacgggtgttcctcccactttacggagaacttgctgaaggtcgttacagcctggattcaaacacgttctggctgcagcatgtgtgctcttagctccacctgtcctatttctggcctttggtagaaggccagaatctatcccctgaattgcaggggatagatttaggaattattggtttataggtactgaaaccatgggtgtagaaaccatgcatattctggccgggcgcagtggctcacgcctgaatcccagcactttgggaggccgaggtgggcagatcacgaggtcagaagatcgagaccatcctggctaacatggtgaaaccctgtctctactaaaaaatacaaaaaaaacaaaaaacattggccgggcgtggtggcaggcccctgtagtcccagctactccggaggctgaggcaggagaatggcatgaacctgggaggcggagcttgcagtgagccgagatcacaccactgcactccagcctgggcgacagagccaggctctgtctcaaaaaaaaaaaaaaaaagcatattctgattgtgtaggccccaggagggggctgagattctggatttcccagaagctcccaggctgctgcagaccacacagtagaagcaaggatgtggatgagattgcttagggtgattggatgggtgagaaagatcaaggagagaaccttgaggtgtgtaccagcttggtagagattttaggaagaatgttgggatgaaaagaaggtcaagtgaagaatgctgtagaaaggtgggatggggagatgtctccacccagtctcctacatgcagggggttaggtgctgccgttctgtccaggatattcaatcttagaagaacctagtagaaaactctgatctaccactgccttcattatcctcttattctgtatttatagataaagaaatagaattgcaaggatgaaatagcctttgcatagtttccttttattatcacttaactcaattcctgctgggcgcagtggctcacacctgtaatcctagcactttgggaggcagaggcgggtggatcacctgaggtcaggagttcaggaccagcctgaccaacatggtgaaaccctgtctctactaaaaatacagaattagccaggcgtagtggtgcgcgcttgtagtcccagctactcaggaggctgaagcacgagaatcacttgaactcaggaggcggaggtttcagtgagccaagattgcgccattgcactccagcacaagagtgaaactgtctcaaaaaaacctcaattcctgttaccagctttacttttttatttacattcaaatacttaggcaatgtgttactctcttcctaagaaagatgttagtggctaataaatcaagcccttttttattttttatttttgcagttgagtcttactgtgttgcccaggctggagtgcagtggcgtaatctcggctcgctgcaacctccgcctcctgggctcaagccatcctcccacctcagcctcctgagtagctgggacaatgggtgtgcaccaccatgcccagctatttctgtattttttgtaaagatggggtcttgctgtgttgcgcaggctggtcttgaactactgggttcaagcaattctcccacctcagcctctcaaaatgctgggattacaggtgtgagccactgtggccagccaagaccttattgtaattaaatttttattaaagcgtttcgagctaaatgtacattattaaaggaggaaacgtgggaggttgtattaatttcctagggctgccataacaaattaccacaaatcaggtggcttaacacagaaatgtattcactcacagttctggaggtcggaagtctgaaatcaaggtgttggggctgtgcttcctctagaatccttcctggtctagtccagctcctgctggctccgggagttctttggcttgtggcagcataactccaatctctgcctctgtgttcacatggctgcctcctctctgtctctgcgtttcttctcttctttttaaagaatacttactgcacgttggatttaggacccaccctaaatctcggatgtcattctgaggtccttaattacattttcaaagacgctatttttgaataaggtcacattcacagggtctgggggtcaggacttggacatattcttttgggggctgctgttgagcccactacagaggtgagcactacatgattgtgagcagtgtgaaaaaaaggtgagatgcagtgatgtgtggatttttgcacattttatttctaaaatgttaatgtcaattgtttttccattaggaaatatgcaaaagctgaaactcttatgacagtcactgatcctgttcatgatattgcattcgctccaaatttgggaagatctttccatattctagcaatagcgaccaaagatgtgagaatttttacattaaagcctgtgaggaaagaactgacttcctctggtgggccaacaaagtttgaaatccatatagtggctcagttcgataatcataattctcaggtctggcgagtgagttggaatataacaggaacggtgctagcatcttcaggagatgatgggtgtgtaagattgtggaaagctaattatatggacaattggaagtgtactggtattttgaaaggtaatgggagcccagtcaatgggagttctcagcagggaacctcaaatccttccctaggttcaactattccaagtcttcagaattcattaaatggatcttctgctggcagaaagcacagctgagtacaagctaactggagtaactttgctgttttgctgcttgttgcatgcacacaggaatggaaagcgagctccttttccccttccccagcgccgtttgacctctcccaagatacaccagcagcctgcttactactaaacgcaatccaaaaggcctttaaaaatacagtgtatattttttgtactagtcagtttattgacactatttgaaacttttgaaatataaacggagaggctttctgttgagacattgtcaccaaaacaattttttgaaatgttcctgaaactaatttgggtttaaagattaaaagggttgttaccattcttatctgagtagttgggaggaggggaataccactttagttcatttggaaaatatagacatatttcttttgctttcttaaaacagcttaaaatgatgaacttttataattttaatttgaagattgaataaatattttttataaagattgttttgagtgctgatttgtttactttttgtagatttgctttatccatgatattcagtacaactctgtcatttctttgtaatatttaaaaaatattagtaaaggagtgaattaataaagtagtaatagtaaaatgaaaggaacttgactgtacagtttgtagccaggttaagcatttggtattgtttcatttacaatttgggactaagatggaaacactttttttataagtttttaattcatagtcactaaagagataaatgtttcttatatacatttgtgtatttttatggtgttatttattccatggcttagcttccttcaaatcaaaatttggacacacactattaagagaagccattaaaattttactaaaattgtgcatgtaaattaattgtcagcattccatgtctcaagattttcttaatttagttcgctgtttaaattaattcatgtcctgtaaagttctgaccttgataacaaagctataaatatttaagtttgctaatatgcgtaagtattatcggtaagttacaagatggaagaagaataacagtagggcacagtcattctgtgaatccttttacttatcaaaatttggtagctattctaaggcttttgcagaaaaataagtgttcaatgtttgtagttcttcaaaagcatgttgcagtagccagccatactatgtgtattcccagtatcatgtacgcactaaaaaaaatgtgtgcttgctgctgctgtgagtgaaccattgcttaagataaaaaacttaactagatctgtaaatgtacagaatagcatcagatgtttctgagagattagaaaatgttttgaatttataaaattaatgtttttctttgtaacatttatatatattttttaacattttaagtttaacagattgtattcctttcaagtttctatacttgcttaagcaatcttgatttgagtaagggtcttgatttgtgctattatgttctgttagttttggcatgaatatactaaagcttttttttttttttttctagcatgtgttttctcctctttggttctctttgtatttactacttttctctttttcttgtgttttttttttcctgtttttgttttgtttggtgttttgttcctgtcttcattgtttcaggtatttctttacccctctggattccccacgggctggatcgagatggtccagttatgcccagctccttcctcctcctcctcctcctctggtagagcactcttgcgatgctgacactgccaacctccagtatcctcaccctcgcagacgatatctctctcggcctcttaatcccttacctgagaatgaagggatttaaaacactgatttaacattgaaaggccttattcaagtgcttgtaaatgctttcatttctggctgctttttgtttttcattttctttcagaagatttttctaacttagggtctgtcttgcatgtattacaaccagaatacagtgtttggaacctaaatctgtttgtgcgtctgcatcaaaggaacatttgcttcactgggtgataacctttgatgaaatgagatatgtccaagtaacgttaactgtgaagttacacacagtagctgacttcaaagtgcctgttctgtaaattttattttaaactgttaccatagtcttaagttgtttatgctttatcagactggctaatgtgaaagcataatattatgaagtttattctgccttatgagaccttaaaaaatggatttcattttacaggctaatgttgtaactgactagtatgtaaaataaatcattcctgtgtataaagcaaaaaaaaaaaaaaaaaaaaaaaaaaaaaaaaaaaaaaaaaaaaaaaaaaaaaaaaaaaaaaaaaaaaaaaaaaaaaaaaaaaaaaaaaaaaaaaaaaaaaaaaaaaaaaaaaaaaaaaaa

SEQ ID NO: 28318 - DNA, 3038 bp, Homo Sapiens
gggccttggcggccgtgctctgcaggcagtgcctccctcgggcgtgggtctgcaggagagccggacagggcagcggccggcactaccgcgctgcgatttgcgcagagctgaagaagcccctgaccattgaagaggtggcccccgccccgtcgggcctcacgaggtcagagttgatgtccatttctgtggagttaactttggtgatattttgatctgccgtgatcaatatcaggaaaggccccatcttcccttcacacctggaatggacttttctgggacagtattggagacaggcacagatgtcaggacagttaaagagggagatagagttattggcacaagaaactttaattgtatggctgaagaatgcgtcactgaccagaaggacctgtggcagattccagaaaaggtctccctataagaagctgctgtcctccctataacttatggcactgcgatttttgctcttgagcattgggcccgtacccagcctgggtaatatagctgctgctggaagtgacgagaagtgcaagctggcgatgcagaggggtgcgcagtccagcgtgaactacagtcagggcagcctgaaggatgcacaaggagaagtgctggagaaagccccttataaaaccatcagatcttttgagaacctactcactatcacgagaacagcatgaagcctggcatgggagggcaggattgtggtggtgggatttgctggaggaaacattgcttctgaaccagccaaccttctgctcctgaagaatatctctgctatgggcctgtactgtggtcaatacaaagatatgaactttcccgtcttctccaagagcctatcttcagtgcttcagtactgccagcaagggtgcatccagctatatgtcagaatggttttcaagctggacgaggtcaatgatgccttccttcatgtgatacaggggaaatccgtgggcaaggtgcttctcgctcttaaataaatccttgcctgagcagcaaagttaacatgtccagatcaaaactccacatctttccccaaaacctgatttcccttctgtgtttccaaaggtgttaccactttccttactaatccaggtttaaaatcttggagtcacctttgattctgttcactaattgctcctaattaatatgattatatagtttattgtccaaaccttttcgagagtaaaagggtgccattagtaattacatcaggaaaacatatcccaggcaaaccaggatatatggtcagcctacttgatgcattatgaaatgcggtgattgccgagttctgtcattctcacctctaagatatctctcatgtccatatcctcttttccattctgactaattaagcctcaactgctattaccagtgaccttctaactgcttttcctacctttaagctattctcaccccctccatccttgtgatgcattattgccatcgtgatcttcccgaagcatagctctgactatggcccatctcagaaaacctacagtggctcaccattgcctgatggtggagttcagagcccttgagctagcatttcattatgaccgtgatttttccccgcaccactttccagccttgtggtccacaattccactgggccttaagtatgtactgaactttcctgcctccctcattttgctctgcttgtgcaattttttccaccctccatctctgtcaaacgtaagccttcctgacctctaagacctacctttgtcatgtacctttaccctcaggcaaggaacaatctcttctcttcctcttctaccttgctgtagcttctccccaaggatttatcacattctgccttgaatcatagggaacagcatgtgtagtggaatgaacacaggcctctgaatccaagatatgagtttaaatcccagctttggaggtggttacttaaagtctcagtgccttcattcttcttcctatataaagtagatattacaatatctaacttacagagtcattgggagctatacatgcagcgattgggtaaagcacctggcacatggcaagcgattagcaaatgctggttacttctacttctttctcttcccttttcccagtctatcataatttccttgagagcaggcaccatgtcttatttacccttgtatttcccacagtacttcccatagtgagttacccttagtaaatactcagtaagttgaattgaatttaaattacctgtaagtcttaaaatgtgggattaaattaagatatattgtcctggaaatacccaaatgtctatcgatggatgaatggataaacaaaatgtggtatacacataatggaatattattcagccttaaaaaggaatgaaattctgacatgtgctacaatatgatgaacctggaagacattatatgtgaaataagccagacagaaaaggacaaatactatatgattccacttatatgaagtacctagagtagtgtaattcatagaaacagaaagtacaggttgacatccaaaatctgaaatgagaaatgctccaaaaactgaaactttttcaatgccgacacgatgctcaaagaaaatgctaattggagcatttcagattttggatttttggattcgggatgctcaactggcataatgtgaatattccaaactctgaaaaaatctgaagtctaaaacacttctggtctcaaggattttggataaaggatactcaatgtgcaacatgtagaatggtggttgcaaggtgggaggagagaatggagagttactgtttaatggtacaatgtttccgtttgggaagatggaaagttttggagatgtgtgatggttatggttgcgcaacaatgggaaggtacttagtactgcttaactgtgcacacttaaaaatggtaaaaatgataaattttgtgtatgtcttaaaacaataaaagaagttttttaaaaaaaaaaaaaaaaaaaaaaaaaaaaaaaaaaaaaaaaaaaaaaaaaaaaaaaaaaaaaaaaaaaaaaaaaaaaaaaaaaaaaaaaaaaaaaaaaaaaaaaaaaaaaaaaaaaaaaaaaaa

SEQ ID NO: 28319 - DNA, 3720 bp, Homo Sapiens
cagaaactacttcctcagtttcttcttcacttggacaagatccggaaatgcattgatcataatcaagaaatactactgaccattgtgaatgattgcatacatatgtttgaaaataaagaatatggagaagatgggaatggaaagattatgccagcatctacatttgacatggataagttaaaatccacgctgaaacagtttgtgagagactggagtgaaactgggaaagcagaaagggatgcctgttaccagccaatcattaaagaaattttaaaaaattttccaaaagagagatgggatccttctaaagtaaatattctggtacctggtgctggactaggaagactggcctgggaaatagctatgctaggttatgcttgtcaaggaaatgaatggagtttttttatgctcttttcttccaactttgtactcaacagatgttctgaaattaataaatataaactttatccttggatccatcagtttagcaataaccggagatcagctgatcagattcgacccatctttttccctgatgttgacccccacagtcttcctcctggttctaacttttctatgacagcaggagattttcaagagatttattcagaatgcaatacctgggactgtattgctacctgtttcttcatagacacagctcacaatgtaattgattatattgatacaatatggaaaatactcaggccaggtggaatttggataaatctaggtcctctgctgtaccactttgaaaatctggcaaatgaactttccatagaattgagctatgaggatataaaaaacgttgttctgcagtatggattcaaggtagaggtggaaaaagaatctgtattgtcaacatatactgtgaatgatctctctatgatgaaatactactatgaatgtgtcttgtttgtggtccgtaagccacaataatggtctcaagtgataccacctggaaaaaagtttagtaagaacaaatgctgaaatcaacgactcaaaatcaactatcagtgatgacaggacacaacctcaaatcagtggtgccttcttattcctaacgaaatttagaaatagtgtctattttcttaatatgtctattgctttttcagaaatatactatgccatgcagatttgtactacacaagtaaaaatggaggaaatgtcttgaagtatactttttccttgaagcccagaattgtgtttcagtaggaaaaaaacctaatctccagtgtcttcatgatgctgtccattgcaagtctgccgaattaatgactaatagtattgaagtacataataatcttcctttttttgttgttttgtatgcattgcacatgtaacttttagaagagtctaaggatcctcagtcatattcaacatctggagttgggactttgttcactttcaatctaagaaaactatgcgtaaaatatgtctttttttttttttttcttcagagacaggatcccgctctgtctcccaggccggagcgcagtggcacgatcatagctcactgtaacctcaaactcctggactcaagcgatcttcctgccttagccttagcctcctgagtagctaggactgtaggcatgtaccaccgcgcctggcctgtgtctattttatcattcagattaatttaattttgtattttctggctcagatgaacttaaagaagcatcaaacatttcttttttatgaaatgttaaatttaatagcatcacaggccggtaaaatatattcaagtaacagaaatatcaaagtcttttggccacaataaactgaacactttatgaaagcatactcatcatggatcactttgaaatatacgagatctcaacattcaaagtgagaaataaaaagcctttattaaaagtagtgctaggaaacagagaaaataagaataaaatttacccatttgaaatatgtgattttcagactctaaatgaatacagagtttgacagtgtgatgtttacaataatgtcttttctttagaatatctggattatgaaagcaagcacttttttcattaaaaaaattatatactaggaaaaactgtcataatagtattaatgtggggaattttgattatgaaattcagggatatattactgcccgtggtctgtgtcttcaatattgtaagcagcagccatcatgtaatttcagattaataccaattttgttccctgatagatggagcttaaacagtatatgctgctttaaatttctacctctagcagatctttattggagggagttttcctttgtattttttaatgtatgatattctgtttccagtagcttggaaagtagagatgactaatgttttagccttttcttggagaaaaggaagaactcttcttgaatattttcacagatgattgtgattgctttaaatgacctctgtggcaatttaaattagatggatttaatctcagtaatgtgctggtcgcataaatgtcatgttttaataggaaaagttacttgtaaatctttagacctttgttgtcacttaggctggggagtcactaccctatttggcatcttactagttggggggaccttttccgtgtacagtggtgggacttttgtgacctttactctcactatgcaatagagggtttcatgtagttaatctgacatgtcaaaattgggaagactgtaaccttttttttttttttttaagatttctcttttttgtgtccctcaatacttagcagatgttcatttggtggaaattcttattacttacatgaatgagtttgaatttagtggcaaggaagaaaaaaaactcaaattattgttttaaaagaagaaaacttgcaaagtacataagtattttttaaaaatcaatcgaacagaaaggaatgcatgctgtttttcaatggcttagacatgctttttattcactgactagtattcacttttttacaacttgtatcaaaacaaatgatctttgtttttgtcacaggcaaaaacaggttgacactggtgggttggctttattaattaattttttttctattaggttttctttaataatgttaaatttctaaattatagcatatgttttagttaattctgaaatcagttacttcatttgttaatttatccctcatatcatgaatattgttttttaaatgttctatacaaatttgcatcacttcttttcttacagcttttgcagttaatatattctaaacttgaaaatgtggtatcaatcaataatagaagtatcactggaggatttatttagctttgtatttcttaattttagtcctagctactaaagtatgtaagccttaaagtttaaaatgtttttcttaaattagctttatacacaaacattttcatttactttatgaaatgggaggagatagtccactgtgcttatgtttttttgtttaatttctatattctgaagcagtgcagatatagggtatgctaatcaagtgagcaaggtggaacatgtacaatataaggagaagctgtaaaaatcacagtataaaattatgaagtttggtaactgtaaaatgtactgtatttatatgtaactctcattctaaaagttgccacaaaagctgaattggaagcttcatgtctgcatgaaatttcctatatttttaatgtgtatgatgaaattaatttttcttgaatattaaagtctgccaattgctatgaaaaaaaaaaaaaaaaaaaaaaaaaaaaaaaaaaaaaaaaca

SEQ ID NO: 28320 - DNA, 1500 bp, Homo Sapiens
gggactcgggctgcggcgtcagccttcttcgggcctcggcagcggtagcggctcgctcgcctcagccccatcccctaccagcgagggcgcctccgaggcaaacctggtggacctgcagaagaagctggaggagctggaacttgacgagcagcagaagaagcggctggaagcctttctcacccagaaagccaaggtcggcgaactcaaagacgatgacttcgaaaggatctcagagctgggcgcgggcaacggcggggtggtcaccaaagtccagcacagaccctcgggcctcaccatggccaggaagctgatccaccttgagatcaagccggccatccggaaccagatcatccgcgagctgcaggtcctgcacgaatgcaactcgccgtacatcgtgggcttctacggggccttctacagtgacggggagatcagcatttgcatggaacacatggacggcggctccctggaccaggtgctgaaagaggccaagaggattcccgaggagatcctggggaaagtcagcatcgcggttctccggggcttggcgtacctccgagagaagcaccagatcatgcaccgagatgtgaagccctccaacatcctcgtgaactctagaggggagatcaagctgtgtgacttcggggtgagcggccagctcatcgactccatggccaactccttcgtgggcacgcgctcctacatggctccggagcggttgcagggcacacattactcggtgcagtcggacatctggagcatgggcctgtccctggtggagctggccgtcggaaggtaccccatccccccgcccgacgccaaagagctggaggccatctttggccggcccgtggtcgacggggaagaaggagagcctcacagcatctcgcctcggccgaggccccccgggcgccccgtcagcggtcacgggatggatagccggcctgccatggccatctttgaactcctggactatattgtgaacgagccacctcctaagctgcccaacggtgtgttctcccccgacttccaggagtttgtcaataaatgcctcatcaagaacccagcggagcgggcggacctgaagatgctcacaaaccacaccttcatcaagcggtccgaggtggaagaagtggattttgccggctggttgtgtaaaaccctgcggctgaaccagcccggcacacccacgcgcaccgccgtgtgacagtggccgggctccctgcgtcccgctggtgacctgcccaccgtccctgtccatgccccgcccttccagctgaggacaggctggcgcctccacccaccctcctgcctcacccctgcggagagcaccgtggcggggcgacagcgcatgcaggaacgggggtctcctctcctgcccgtcctggccggggtgcctctggggacgggcgacgctgctgtgtgtggtctcagaggctctgcttccttaggttacaaaacaaaacagggagagaaaaagcaaaaaaaaaaaaaaaaaca

SEQ ID NO: 28321 - DNA, 3909 bp, Homo Sapiens
ggtggcgtggcgacggagtcgcgcgagggacacgccgcgttgtgggttctcggcctgaggtgcgagagaagcggtgaccgcggccctggctgctcggacccgggaacatgatggtcgctggagcagaaggcgctgagaagggaccacggcggcgctgggtcgtgcgagccagtagcgggctgaaacgtagaggccagaaccaggtctcagggggcactaaaggcggtcggaggtaatccccacaccgcttcctcctggaagtcaggctggccgggagctcccgtatccaggacggttggtcgcctctggcctggcagggatcctagtgtctcgggacctcccggtgacgcgcttgcctcccctgctgcaccataggcccgggagtacggcgtccccacagcttggaccggcaggggctcgtgaaatgtttgtcaagtggataaatgaccatggccgtggtctccgcgggaggtgaggaaactgaaagccaccgaggaaaaggggggcgctccttaagaagtgccgcggtcacgtgtacgtttcaaaagaatggcgtgactgagtagggaggggaccgcggagaccctcagaccctggactgtaaggagatgaggggccgtgaaggggaacccaggaaactgagtcctgaaagcaaggaggaacttccagaatgaagggcgccgacactccttcctgcctttgctcaagcggttccttcaccccgatcaagttccttcccatttctccatctgggggatcctgaacgtgcacatcctcagagaagccctcctggggtctccaattctagtttattgccccctcctatcgatcccccagcgcgctcatcgggcctgtggacaaggacaggtttgaagagaggattccctggatcgcggaagggctgcaggaatggcacagccccttccgaggatgccaaaggagcccgggcaaaggaaagtggccgtgcccgggcctgcctaccactagatccccacccacctatgactgctcagtcccgctctcctaccacacccacctttcccggcccaagccagcgcaccccgctgactccctgcccagtccaaactccaaggctgggcaaggcactgatccactgctggacagacccggggcagcctctgggtgaacagcagcgtgtccgccggcagcgaaccgagaccagcgagccgaccatgcggctgcacagacttcgtgcgcggctgagcgcggtggcctgtgggcttctgctgcttcttgtccggggccagggccaggactcagccagtcccatccggaccacacacacggggcaggtgctggggagtcttgtccatgtgaagggcgccaatgccggggtccaaaccttcctgggaattccatttgccaagccacctctaggtccgctgcgatttgcaccccctgagccccctgaatcttggagtggtgtgagggatggaaccacccatccggccatgtgtctacaggacctcaccgcagtggagtcagagtttcttagccagttcaacatgaccttcccttccgactccatgtctgaggactgcctgtacctcagcatctacacgccggcccatagccatgaaggctctaacctgccggtgatggtgtggatccacggtggtgcgcttgtttttggcatggcttccttgtatgatggttccatgctggctgccttggagaacgtggtggtggtcatcatccagtaccgcctgggtgtcctgggcttcttcagcactggagacaagcacgcaaccggcaactggggctacctggaccaagtggctgcactacgctgggtccagcagaatatcgcccactttggaggcaaccctgaccgtgtcaccatttttggcgagtctgcgggtggcacgagtgtgtcttcgcttgttgtgtcccccatatcccaaggactcttccacggagccatcatggagagtggcgtggccctcctgcccggcctcattgccagctcagctgatgtcatctccacggtggtggccaacctgtctgcctgtgaccaagttgactctgaggccctggtgggctgcctgcggggcaagagtaaagaggagattcttgcaattaacaagcctttcaagatgatccccggagtggtggatggggtcttcctgcccaggcacccccaggagctgctggcctctgccgactttcagcctgtccctagcattgttggtgtcaacaacaatgaattcggctggctcatccccaaggtcatgaggatctatgatacccagaaggaaatggacagagaggcctcccaggctgctctgcagaaaatgttaacgctgctgatgttgcctcctacatctggtgacctgctgagggaggagtacattggggacaatggggatccccagaccctccaagcgcagttccaggagatgatggcggactccatgtttgtgatccctgcactccaagtagcacattttcagtgttcccgggcccctgtgtacttctacgagttccagcatcagcccagctggctcaagaacatcaggccaccgcacatgaaggcagaccatgttaaattcactgaggaagaggagcagctaagcaggaagatgatgaagtactgggccaactttgcgagaaatgggaaccccaatggcgagggtctgccacactggccgctgttcgaccaggaggagcaatacctgcggctgaacctacagcctgcggtgggccgggctctgaaggcccacaggctccagttctggaagaaggcgctgccccaaaagatccaggagctcgaggagcctgaagagagacacacagagctgtagctccctgtgccggggaggagggggtgggttcgctgacaggcgagggtcagcctgctgtgcccacacacacccactaaggagaaagaagttgattccttcattcacttcgccattcattcatacttccgtccatccattcagaaagcatttattaagaatttactcaggcatgatggcccatacttgtaatcccagctattgggaaggatgagatgggaggatggcttgaggccagaggtttgagaccgaccagccagggcaacacagtgagaccccttctcaaaaaaaaaaaaaaaaagagagagtgtgtgattagaagctaaataggaaagttttgagcttcaagtcagtgaggagtaaaaaagatttttaaaaagcaaagaaaacaaaatataagggaaaaatatgagaaaaataaaaataaaaagagaataataggccaggcactgtggctcatgcccctaatcccagcacttttgggaggtcaaggtgagcagaacacctgaggacaggagtttgagaccagcctgcccaacgtggtgaaaccccatctctatgaaaaatacaaaaatcagacgggcacagtggtggtgcccacctgtgatcccagctactcaggaggctgaggcaggagaattacttgaacctgggaggcagaggttgcagtgagctgagattgtgccactgtactccagcctgggcaacaagagcgagactccgtttccaaaaaaataagagagaatagaagaagctactgcatgatgttagttaccaagcctgccatgggtcctctcttgctagacacactccatagatccccccactgagctgtggatgggcaaaccccggtggaatcccaccctccccaacaccccactgagccctgggccccctcctcccttcctcacctccaccttctccctgccttctctcttctctcgtctgagcccccaggccttttccactttgagggaggtgcttcgaagaatgttgcccacacctaagtgttagaagcctatgtccgttcatccctgagaggtctgaaagaataaaaataaattctaaaaaaaaaaaaaaaaaaaca

SEQ ID NO: 28322 - DNA, 2727 bp, Homo Sapiens
cgtggctgggatgcttgtcttgtccattcaagggaacctgcagcttgactaccccatcttctacgtgatgttcgtgtgcatggtggcaaccgccgtctatcaggctgccttctccaagacagattcttcacctgctaatgagaacaacagtccctacctaagagaatcacatgaagctcttatgagaatgtctctagggaaatgcccggtttttgagtcaagcctcacagatgtacgactcctctttgattgccagtgtgggctacattctgtccacaaccattgctatcacagcaggtgcaatattttacctggacttcatcggggaggacgtgctgcacatctgcatgtttgcactggggtgcctcattgcattcttgggcgtcttcttaatcacgcgtaacaggaagaagcccattccatttgagccctatatttccatggatgccatgccaggtaaggttaaagccccgtgggtctagctgaacatccatatagaatgactgctacttcctgtttaaaaagagacaaccaactgctgtgctgtgcctttatcgtgtgactgttctctcactgtcttttttcttttctttttaattttgtgcaaaagggtaggcaatggctgaggcacctcggttggttttgagcacatcttgccagttctgtgtctatttggggatcttttaaataaaattctgattcatactcaatataattaggatctgcagccccaggcttcatgcctgcaaatggaaaaatccattcatctagttggaatgaaatgatcagaaaggggaaggagaatgagtggaatgaaattaaaatattataatctcactccctggatgccacaagggagtgcatcattctggaaagcctaatttcctagcgagctaaggattcataccgagaaacacaaatttaaatgtctgtaagccctgacagtaacataagcatgtgaatcagcccaatactgcccagcagggagtggtgggacctgcggaggactggagagtgcctgtctagcctaaaggaattcggattagaaaagttaagacattggaccaacctcagatttgctgacctaaactctgtaggttgctggtgaccattagctttcacacttaactcaacattttaattttatttatacaagatggaactctctctaaaacataatctcctgtccttcattaacacaatctcatgaacaaaatataaacacactgatggtctagaggactgcttactcgagaggttttcatgctgtaacgctgtgatgcaggtgtgttctcagggttgactggtgtgcccctacattaaatggccccagggtttatgtgtctactttttatattagttcctcctctctcgttattaagctgttgtctgtccttcttgctgtagccagcctgcctgagtatagcaactcaatgtcaatgtgctccttcaacccagcttgttcagattacaaataaaatcaaaatgaaggagctctgagttgggggcctaagatttctcctaggagttaagtgcatgagctttggtgcatgaactttttaaacgtctaatctggctgctcagattccttttttgctaacttccttgtttctcggctgtgttccggatagatgagggcgctggatagctgaattccagataggtgaggtgtcaactctgtgtgtgcaagtatgtgtatgtatatgtgtgtttgtgtgtttacaaactatgtgtatatatcaatatcagtatttgtgtgtgtatatatatatatatagatgtattttctggtggaaaatagaaggtaacctaaggtagtcttagatatcaacattctgtggtatgtttgtgggtgtggctctcagctttttctttgtaccttgtgaccagtgggaagtcagctgttgaatcagggagaccctgcccttgcagtggcttgtcaggacacttccgattgtaggtgttctgtactgtgaagagcgtgggcttggagttcagatgacctggattcaaatcccaactctaccaccttcctgctgtgtgacctcccaaggcctctcatcctcacttgtaactgggattccttctttcaggctagtggtcatatgtgtaaaggcctcttgcacggtgtctgggacatggtagatgcctggttatatttggtttcacttcccttttgctttaaaaacctttggaagtttcacacacttgtttgacctggtggcaggtagaacatgcagaataaaactgctgaacagtctcagtctaaacagaggtgcttttccagccacttggtttccctggtcagcattaggatcttgccttttgtctacctagattcatatcttcacaacagacaactgctgttcaagaggtattcaaattccagaaatttaccacatcacaatttggagagcctttgagtaattcaagcacctgaaagacttcttaaaaatgagatcgagaaacagcccctgacctccaggaactagcctggcactctcagccaggccttggccctttcctgtggaacagaaacaatttcacagaacatcagcagcagacaaggccactctgcagctgtgatggatcaggacacaagcaggtggaatgggaagaaaagggtttttttcctaaaattaaaaataaataaataaataaaagaacacaaacaggactactctgctagcctgactaaacatagacaaaaaaaaaaaaaaaaaaaca

SEQ ID NO: 28323 - DNA, 1281 bp, Homo Sapiens
attcaataaataaataaaataagaagggggagtgaaacagagaaagaaaaggcaaaagactggtttgtttgcttaatttccttctgttaagaaaggatataaaaggatgttacaagtttgctaaaagaagagaggggaagaatttaatggactgtgaatttcaaaaaaaaaaaaaaagactgtcaaatgaacttttacagaatgcattaaaaaaaaaaaaaaactcctgtgtcggtcagaacaacttgctacttatcatttttgtataaaaaggaaattagtctttttctttttttggtaaatttttgaaaaatattgctaaaagtgcatttaaggagattgggagacaattagcagaatggagaaagtaagtctttttttttccaaattattaattgtcctgtgtctatgtacctctagcaacatgttcttttttgtacttttctggttccaaaccagtttattctgtggttctataataagttttgatataatcttggcttcttaaaaactgtgtatcattaaaatatatgttctgcaagaattaaaactgagtccatgaaaataccataggaagacataaaactttaaaaggcaactcaaagatgatggaaacgcacttacaagtggtgaccaaaatttttaggtgaagtcgagcactctaattagagaactggaggaaccacatataacacttaacttcccctaccctgcccctccccaaaagaaaccatgacaaacctagcttttaaaaaatattttaagaaagagaatgaactgtggaatttattggcagccaaggaatgtgtccaagacacatgctgaggttttgaataaaaagtgaacttttgtaatttgaattgggtcccgcttagttcttgaattgttatgaaaatcctatatctgtttgtatatttgcaaaccctttgtattataattgttgatattttccctttttaaaaaataccattgaaatcagcatgacaaaaataacactgttggcacttataggtaacgtgattgattcagtatcttagagtttacagtttgtgttttaaaaaaactgaaggttttttttttaagtgcaacatttctgtatactgtaaaagttataataactgaactgtttggtcgagtctttgtgtgttatattccaaggaaaattgaaagtattcagaaattaaaatattatttgatatctgaaaaaaaaaaaaaaaaaaaaaaaaaaaaaaaaaaaaaaaaaaaaaaaaaaaaaaaaaaaaaaaaaaaaaaaaaaaaaag

SEQ ID NO: 28324 - DNA, 3281 bp, Homo Sapiens
ggttcgctgaggtgtccggacccgccgccgagcgggccgtggagccacagtacgtggcggcgcctcttccttgcccgaagcggaactgctgaaggagcggcagcgcaggccggacgaggtgaaccaggtcatttaaccgccttcagagctatgatggcgtctgctagtgattatttcaaagccatgttcacaggtggaatgaaagaacaagatttgatgtgcattaagcttcatggggtgaacaaggttggtctgaagaaaatcattgattttatttatactgcaaaactttctcttaatatggacaatcttcaggacacacttgaagctgctagctttttacaaatattacccgttttggatttctgtaaagtatttcttatatcaggagtctctttggataactgtgttgaggttggacgaattgctaacacctacaatcttatagaagtggataaatatgttaataatttcatcctgaagaactttcctgctttattgagtactggggagtttctaaaactcccttttgaacgacttgcatttgtgctttccagtaatagtcttaagcactgtaccgaacttgaactctttaaggcggcctgtcgctggctaaggttggaagaccctcggatggattatgctgcaaagttaatgaagaatattcgatttccactgatgacaccacaggatctcatcaattacgtgcagacagtagatttcatgagaacagacaatacctgcgtgaatttgcttttggaagctagcaattaccaaatgatgccatatatgcagccagtgatgcagtcagatagaactgccattcgatctgactccactcacttggttacattaggaggagttttgaggcagcagctggttgtcagtaaagaattacggatgtatgatgaaagggcacaagaatggagatctttagccccaatggatgctccccgttaccagcatggtattgctgtcattggaaactttctttatgtagttggtggtcagagtaattatgatacaaaaggaaaaactgctgttgatacagttttcagatttgatcctcggtataataaatggatgcaggttgcatcattaaatgaaaagcgcacattctttcacttgagtgccctcaaaggacatttgtatgcagttggtgggcgcagtgcagctggtgaactggccacagtagaatgttacaacccaagaatgaatgagtggagctatgttgcaaaaatgagtgaaccccactatggtcatgctggaacagtatatggaggcttaatgtatatttcaggaggaattacccatgacactttccaaaatgagctcatgtgttttgacccagatacagataaatggatgcaaaaggctccaatgactacagtcagaggtctgcattgcatgtgtacagttggagataagctctatgtcattggtggcaatcacttcagaggaacaagtgattatgatgatgttctaagctgtgaatactattcaccaacccttgaccagtggaccccaattgccgccatgttaagaggccaaagtgatgttggagttgccgtctttgaaaataaaatctatgttgttggtggatattcttggaataatcgttgtatggtagaaattgtccagaaatatgacccagaaaaagatgagtggcataaagtttttgatcttccagagtcacttggtggcattcgagcctgtacactcacagtttttccacctgaagaaaaccctgggtcaccttctagagaatcacctctttcagcaccttcagatcattcttaggtctaaggtgtaacacctttgcagtacgtcatgggtgatctaatacttccccttcagttgtatcttcttacagtgattggtacagttattagatataaaggtaactgatgttattcgtcttgtatggcttttagtatgtttatcaagtggctaacaaatgcattctgaaaatgtatttaacatagctgttttaacaaatgaaaaaaagacgtagaaaaatgtttagatgtctttttgtgatgttatataaaattgtagatgactgtggtaaatgcgtaattatgtccattatgcttcaaagttgagttttcatctttgactccaaaatgtcagagggaggccgctctaaactaaaaataacgaaaggttgccaagtattaatactagttacctccctcttttcgtagtttttgtcatgtctgtcaacttactcgattgtgtggttgcattcagaatatttgaagtttcttacgtagacagaaataataaaaatattaactaggaaaaaacagtatagcaccaagccagtatttggtatctctctctagagcgagcaagagagggagagaggaggaaaaaatacacataatacaaacatacatgcatgcacacatacatacatatgtatacacacacataatttgaaaactgattggcacttcaacgatgctgaaattgtttttaaattgaagtttctttcttccacaaagcagccgtttctattcaaatggaaattcagtaccagagaataaatgtctatgtagtcatactgaatttagatagataagggctacagcatactaaatcgacaaccaaatttgtcatgtgactaaaccgttacttcagatgaagcttacattactgttttctgcttgtgtattttctgtagagtacttttacacagattggtaaagttcaggtttcagagaactgcttttgtgcagaaaatttaggttcttttttccacctttttggtcagtaaaacttaatgaaaaaagcaaagaaaaaaatattctgaacaaagctatagggttttaagttcagcctcccaacttagtcatcctaacatgattattttgtgatttggggtgcttgccctggtgctgttccagtccatgtgcatcctgagctgtgtgatctgcctcgaggctatgatctgagcaagcaggagataacattttcttctgcatcaagtgaggaaaaatgtgcttttggccatgtctcaaagacaggaccaacttcagattcccaaagaagccagctacagagcctctggaacactatggtcttacaagcagtactaaaatcaaccctcagcctcttcaatgccaaaggttatccctattggttgagaaccacatggtaatttttaatgggacttttatcagcaaatggagttacaggaattctttgtaatgagtgattctgaagaggtactttcctggaataattgtctacctgaaaaaaaaaaaaaaaaaaca

SEQ ID NO: 28325 - DNA, 5319 bp, Homo Sapiens
ataataacacagtatattatcatagtggagacctacaccaagtccagatctctcccaaccaaattatgatagtaagctagtgaattcagataatcctttggcaacacagcaaatgtaagttgtgatccttcccagatgaagggaaatagtggctgacttttctgataaatatcaagaaaaaggcatttgtaagatcagtcactgagtattggtcttctttagattgttatagtctttgtacagctgatgtctcatcaggggactgctgctgctataggcagcaccactttattgagacttcagtcatttactgttagtttccatctatattggttcatttttacaccactgataaagacatacccgagactgggaatgaaaatatgtttaattggacttacagtttcatatggctgggcaggcctcagaatcatggtggtaggaggaaggcattttttacatggtggcagcaagagaacaatgaggaagaagcaaaagcggaaacctctgataaacccatcagatctcgtgagacttattcactatcacaagaatagcatggaaaagaacggcctccatgattcagttacctccccctgggtccctcccacagcatgtgggaattctgggacatacagttcaagttgagatttggttggggacacagccaaaccatatcaccatgagtcatccacttccaggctacacaggactagtcctgtaatagtgggactactgtacagagaatttgtcatatcagcactacagcttctaatatgtcactgatttaacctacagtctctttttatccatcaggtattctctgttgtttcagagtaacaacctttataggctggagtctatttagcatatactcttttagcatatctggttactactggctgaagggcaaacttatgtgtttcttgttttacagtactaggtatgggaagcattccccatcagatatcatatccattccagtaataaattcaggtaaaggatacttcacataacatctgttcatacattctaattcttatccaaacttttatcttaattccatcacccataacattcccatatctttccaaactgagttttataaaaatgtttggaaacacagcacattgggctcctgtattaaggaatctcagaaattttcttcctacctttctttcaaactgatgaaagacaaacaactactatctaagcatactgtatccagccaagctatccttcaaatatgaaggaacagtaaagtctttctggcaccttacacatgcatattgctttcagtagccagccaagattagacaaattgactccggccattccattcaatctttgtcctggttcatctgtcctatcattacctccagtgaagtgaggacatactcttcaatatgatcttgccctctggcttctcatattcttccaaagtggggtaaataattaggtttgtttaaggcccttcagtgctagggaactggcagaaactctgattggtcttctaccgttcaataatgctgcattaaaattttatgttcaccccatcaagtccttgatccctctcatttcttagtaaccacttaaaaacttcaaccctacttagacaagtccttttgccatcttcttgcctcccaacccccaatccctacctgacttgtgaattattttaattttcttagcatctgtaaaacccataaggagaagctgagacagcatatctgatatggcttctagaaccatttcttgattttgtaatagtaaggttattttaaggagggagggcatataaaaagagctcccttaattgcatttctcatcatctgcataaagggcttgttgtaaacattttgggtattataaagccaatccagcatggctggcttacaccatgtaacatattagctgcttcatctggtctattccacttagtatacaaaggagggacaagacaaaaaaactttatgatagcctttaagaagtctatgagactaaacacccatcacgatgagtttactgcatgtttacattatttatatccatttgtgactgtcattggtaaattgtggttcctaaattaacccaaacatgtttctctattctacagtattcaaacccaaagatacagctcctaagttagccactttcataatactttagttaaggaagccaatgataccaatccacaaaatgagatactttcttaacactatacccccaggtgtgtgtgtatgtgtgtgtatctccttttgctgaattgacccttttacattacatagtgactttgtttatctcttttaacagtcattgatttgtagtctattttatctgatgtaagtacaactacttctgctcttttttgctttacagttgcatggaatatctttttccacccttcactttcagtctgtgtgtctttataggtgacatgggtttgttgtagacagtatataattgggtcttgtttcttacccattgagcaactgggtgctttttaattagagaattgtgttcgttacattcagtgctgttattattcacttactactgccattttgttgcttgtttgctggttgttttgcaaatcctctcttgcttttttctttacttagtgtctttcattgtgattaagtgattttccctggtagtgtgttttaatttgttgctttttattttagtgaatattattggtctttacattgtggttatcatgaggtttacaaaaaaaatcttatagcaaattatttagatcacaaagaaaataatagaaatacacaaggaaaataaataaacaattcttcattttaactccataacccccaattttgacttttaattgcctcaatttacatatttttatttaacctttctcaatagtttgctgtagctattactgtttttgatagatttgacttttgggcttcatactagaattatgagtagattgtacaccacaattactgtattagagtattctgggtttgtccatgtatttgattttaactgtcgattttataccttcaaatgttttctttttgcacattagttgttttttttttctttcaaattgaagaactctctcttgtgtttcttgtaagatgagtctggtggtggtgaattctttcagcttttgtttgtctacgaaagactttattgttccttcctatttgaaggatagctttgctgggtacagtatgcttagatggtagttgtttttctttcatcagtttgaaaatgtcatctcactcccttctggcctatatggtttctgttgagaagtctgttgccagacttggagctcttttacatgttatttacttcttttctgttgctgcttttaggatcctttccttgtcctcgacttttgacagttagattattatatgccttggggtactcctatttcggtcaagtctgtttggtactctctggccttcatgtacctggatatttatgtctttctcatgttttggaaagttttctgttactatttctttgagtaaactttctactccttgctcttgcccagctccctcttgaacaccaataatccttagatttggtcttttgagttaattttctgtatctcgtaggtggtcttcatgccttttcatttttcttccctcctgtgactgtgtattttcaaatagcctgtctttgagttctctgattctttcctttcattgttccattttgctgttgatagcccctaatgagtttttcagttaagcaaatgtatttctccgttccaagattttcatttgattttattattattatttcagtctcattaaatttctgtgataaatttctgaattgcttttttgtgttgtgttggatatcaatgagctgccttaacactgctactttgaattcttggtcagaaagctcatacattactatctcattagggtcagacactagttccttgacttgtctatttggggaaagttatggttccctgtttgctgttgtttcttgtggatgcatgtctttgtcctcacattgaaggattagttagttattccagtcttctctgtttggcttcttttgttttttatttgatatatttgcttagagatagattctttactgcaaggctgctgccgtgtttttggctgtaggtggtaccttaagcccatgtttacctcagttccagtaaatgattggagtgctgctcatcccaaatgggggaggcctcaaagaggatatctcagtgtgttggaaggctagctaatggtttgtgcccaggtgacctgtggaatgcacctcctacagtgtgatactgatgaactaccactcttgattcggtgtctcatttggttaagcctatcatccagggctgtggatgatagttccacttcccctgtttgtctctacctatcctcagggatatgtctgtcttttggcactcatgatgcttcttatgggttaaggcaggggcaggatttttgccagggaccccaagatggtggggatctggttgtgcacttcaatctcaccttttctagtgtggaaactgtgaattggagggaaatttcccatgtactaggtgcagggcagtatgtggggagaggcatcacagaaatagaagtccaattctcttactatctacctcttacatctctgtgaccctgggaactgtctcattctcatgtttgagttctgggatactgctggtgataatctcagtgctgtgtatttgtttttgttttttttgtaggggagagtgacactagcttctttatattccagcatcttggaactggatacctagtgtctcttttccctttttttcctattttggcatgtactattatgctgtgacccatcttctgtaaattatctgctcccttcatctttcattgtattttctgtattggctttttcccatcagcatttaaatatgctcatgtgaaatcatgccccaaagagttaaagaaaccagtaactaacagaaattcttgagtttacaggatggcagataaagaaacaacttactggccgggcacgatgtctcacgcctgtaatcccagcactttgggaggctgaggcgggtggatcacgaggtcaggggttcaggaccagcctggccaggatggtgaaactccgtctctactggaattacaaaaattagctgggcgtggtggcgggcgcgtgtagtcccggctgctcaggaggctgaggtagaaaattgcttgaacccgggaggcggaggttgcggtgagctgagattgcgccactgcattccagcctgggtgacagagcaagactctgtctcagaaaaaaaaaaaaaaaaaaaaaaaaaca

SEQ ID NO: 28326 - DNA, 4210 bp, Homo Sapiens
aaagaaactcatttatttatttatttgggtataccttccagttacttccagatgctttatgtaactttcctcccagaagctgcaatacataagaaataataagctgaaaataatcaaaaaatgaaaacaattgtgaaattactgaaatgagtatgtgattgagtatgtaatatatgcattggagaaataccggttgattattgtgataacttttgagagctacagttattttgaactacctcgtaaagactacattgagaatgaaaaagccattgaacaatagatgtaccaatttgacctttaaaagttcaatctttattacatgcattgataaatgggaaagttagtaattaaaaatttagaaggaattttagcctttacctttctaaaatgaacaatttaaatcactcttacactttagaaattgaaatatagtatttaacagggattaaaatgttttacttggtctcttagtgttactgaatacaagtttagtattctgtaatcccttatggattggctgatttttgaagaactattttcttagatttaccaacaggacaagttgtcggccttttcccacatttcaacctaaaaatggtatctatcacagttatcaaagattaccccttgctaaaggctcttaagaaactgttagcctgttactttattacttaccatttctataacatgtacatttatagagcatcatatatttattttaagtctagaatcagtaaaaagttatgtgtttgtcaataatcaaaaaatgtttaatctaaaataaagtagatgccacgcttctaattctgcttttgctaaggcaataatcagtagaagtggttagtaatatttgtagcttgttaaccaactggagcaaaaggactttttaatatgaataacagtggtctcgtgccataagtatttctctcatacatattaaaatagcatgttattttatttaatattgaaggcctaaacacaattgaacataaggtatggcttggaatttagaactgctgagcaatatggttgagagggagaccttaatttagtcaataaaaattcataattaatgttaagctttgtgctcatattatatgccactctgggattagacaaaagacgaaaaacagttccatattttgaacgatatattctacctcctgcagtgtattagcattgtagcgtaggagactatttctgtatgttattagtacagaaactgcccaaaaaggtgatggttgaagttccccagccagttaaagggcacaccgtgggggcagcatatctccatgggtctatctctagcaaacagaatcccagaaacttgagcacctgatatagcagaaggaaataaagattatagtaagtatattcatgagagagaattttttttgcctccagatgtttggggtttggatatgtagggtaaatataaatgtctaatgaaagtaattactattatatttgatttgatatttaatttattatactgaaatactaaattaaatacaaaaaaactcctacatactaactatatgtttctcccactgattcccctcctgcctccttcactgattttgaatgtgtgctcaatttgctagtatgagatttacctctgccttatcagtgaagaaaatatgatgtctatatagaattataaggaaaatatatatgtgaagaaatgttaggtaatctaacatttgtatgctaatgtgtcttagatttaccaactatcctaatgtgtagtcaattgataaactaaatttttctttaggatagttcacatccagtagaacttctaccttggaaaacattcttagccttgtttattttgaatgtatgtgtgtgtgtgtgcatgtgtggaaaacaagaaaaatacaagctctagagtagtggcctcacattgatttatattagtgtgccagtctttcccctacctccctaatatttcaaacttcttgtggacaatgacattcattttcatacctttatatttccagtgccaccagaaacacaaaagcagcttagtgttgatttaatgaagtagcaaaatgttaaatacataacaaaacagattgtcctgtcacctaaaacaaattagtgatgtttgagtaattagggttttgcatgtgtatatagaaaggctattttgcaaacagtggttcagtctgtattgggcacaggtgaattctgccctgcgattgccatctttagcacttttcagagaatttgttgccatttatgacactgatcttcagacacactgtgtagtgccttggcttaaactgtcagactggcaacagctgaggctgcccatcataggacacgttccttgcagttatgcttcagtgaactttaaaacatttggcactcgtatcttagaaatgtccttccgaaactcactctacaacagctttgtgggctccctactatttactagagtcaatcctgattttgtttggcataatgagacctgatatgctatgactctccctatcctataaagccacagctttcagcggtccccgtatactaatgaaatggagtcgccagtatccaaaagttccaagtgattatttagaacatttccattaaccataaaggcaaagtggtatagagaaaataatacagtctttgaagtcacacaggcctgatttcaaatcccagctctgtcatttacaaactgggtggtcctggataaattacttaacctctgtggtcttcagtttcctcccaactttgtagggttattgtgagcattgaatgataccaagttataagtgcataggtattcaatcagtgttcattcccttctgtatcaaagacttataatggccttttcatggaattgtctctacctataattatgtgactgtgccttcagattatcaaaattatatgaattgtccatgtgcccttggttttgaatgttcaattctgtattgcaggaatgcctactcagttgcttgaatgggtgtttggagttaataaaatggctgtacaattgagtgggtgtaagtgttttataaagtttgctaaagtttaacaattcgtcattattcatggaaagaagttttctcaaaattcacaaattataagaaaacagttatattctacccaaagtgggattgagtgaaaataaaattcttccacaggaacattgaacaaatgtggtaataatgcacaaactattaatagagctcaattaacttttggaggtcttttacattgtccaacatatggtccgtaccattcataacaaattgctgtttgtggaagtcatttctttttaagatgaaccatgatcaaaccggagttggatgtctggtaaagagatgaatatgttcagaatattctaacacacattgcataaaatactgtactggggcctgtttggtggtgggggggtgtgggaatgtacaattagagtaagtacctgctttcctaaaatttacaatctaaaagatgtagaaatgctttgagtaccagctgttatctcttggggtttcttgacttttttttcataaaaaaatagaaaaatattgacaacataaaatgttttaatatcagattgtttgatttattcatgtggtgaaacatttgagttgtcaaattttgcttcctgaaaatctgaagtttcagaacaagggcacttaaatctcagtaatgctaaaaggagtgggagataatttgttctcatctcacagaaaagacacattttgttttgttttattctaccagcattttgcccaaatttgctccattggataaggtatcctaggctgcagctacacatttctgatggcagtgggtatattccttcatcttccctgggttgcgtctctgccacaatgccaagtttctctcatgtttgaaaagagaaaaataaatgacatcgaagcctggatttgatcctcagaaactcccggagaccactcccctacactcaaggagcttcctgacttcccagtcctgcataggagggcccccaccctccagggaggcacagttggtagtgccagagagcttcttaggaactacacatattcccatcttttaatagttacttctctttgtgtcttctatttctggcaaacacatttgttttacatttttaatagtgatttaaagttctctttaaataaatttaaaaggaattcaaaaaaaaaaaaaaaaaaaaaaaagaaaaaaaaaaaaaaaaaaa

SEQ ID NO: 28327 - DNA, 5003 bp, Homo Sapiens
ttctgaatggtgaggtacaagcggagatcaagcgaaaatggcgaagctggaaggtgaaccgttacttcgctgtggacttcaagcaccgacacccgtctctggccagcagtggggtgaatgggggcacccagctctccatcctgagcaagagcagctcccaaatccgcatgtctggcctccctgctgacaatctggccacctgagccatgctcccctcctcctcctctcctccatccacaggctgggaccgcaggcaggtgccagcccacgcatgtttgcgcctcttccctccccttgggcaggccctgggctggaagcttggctcctgaggggggagaaggaggcagggcacagactgggattgtcccctccttgttttggtactggtcccacccactgtggtcccctgggccctgaccccagacatgtaaatactcctcaaatttggaaaagttgtcccatcccttccccctttgccccagtgtccctgctcacttccagtcaggtctcagctccaccccactgtttcttggtcagcctcagtgatggcctgaccccagctgtgaggccttgcgagctaaggctgaagagaccttgcctgtgggagctggggtggtacctgccccaacagccccccatcatctgattttgggtgtgacccctcgagtgtgcatgccaccctggggctcttctcagtcctgggcccaagtccctgaagcctagcagagggccagctcgggtggccagaacaccccttggtgcaggcctcctggcactcgcctggcatcttggtgtccgggtgctcagctcctgggtcccagggcagtgggacagctcccaggctcttctcatcagagacttcagtttgggtggggagtctgcaggtcagggaaggttctggtgcttttcgtttgatccaaaaggagctgagagccagaaatgtggctgtgattgcgaaagagacggagtttgggagacccatggaagaaaaccttcgccatctccattgttttacccccagctcaagatggacagggttcttctggtcatctcccttccacctcttccaccctcatggatgccttccagaagctgtctccaaccatgcacaccacagagagcccttaagccctcccctccccatttcccctaagtcaaagccatgactaggatgtaccagccacctgcctctgatgtcggcgaatcctgaagcacctgcacccgaatctggggcccagggctgcccgacccccactcccatggatgatgaggagccccagacaccagctcctctggcctggactcaactattgaaatctctctgagacctctgcaaagatgtcccttttatgcccttgaccttgactcaccatgggctgctggggtgtcgggagaagccacacccaacatgcccattagcagaggctgctgctgatgtggcagctgctccctaccacccgccctggctccccagctgcaggttgcacaccctcagcctgagaatgtaaaatagggcagtgcccagctggggaggtagaggaaagtgctagagtacatggtccgtgtgtggcctagctcattccatgtcagcatttggtgttactcctgtccaaattctgtttgcagacttgtttcatgatgatgctctggaatgcttggggacttcgggtggaggaggatgttacttcattttataaagaggaaggggcctgggagacttgggaaaatgtttctggagaggctttcagagtggctggaaaaggctcttgttgctgtaatttagagaggagctctgtgtccttggccagtcaagtacgttcctggatctttggcaaagccagaggaagaaaggagctacctgccctttcccgggcatgcttggtgactcagattgatcttggagtgtgcagtggcccttctaccctgcacctgacctcgtgatcccctccacctgcactggtgtgcattactgaagcaagggtcctgtggacatcttgcattttgggcactgctagggggtctgggctgcttggaaggagccatggcctagggttcagggaactagactctatcccagttgggttcagactgctgtgactgtggacacgatgctccttgttctgggctccagttttcccatttgtgagatgaggcaacttccaatgcttctctaggccctgcacttaagtgatttttccagttcaaagtcaagacaggtaaaagggcattcatcattgtgcctcatatcaggttttgatgaatatatgtgtgtgtgtgtgtgtgtgtgtgtgtgtagagggatggacaggatgctgtttattttccctttcttggaaatggaccttctgtcccttccatttggacaccacagtggaagctggtggcctggaaggaaggattaggtcatggacatttgaacaggtgccttgggcatgatgtatagatgcagtcatatataccttgctggggtggggtgccacctccagtggccagctccagatccaaggagcagccccctggggatggaccccattcattcatcatgactcccaacagttttcattgtggaagaagaaactttggcattatagagacatcatcacaaaacagtaaaaacaaaatcaaccctgaaccccatgcactgtgctgcttcctgagcctggccctgcatcctcatagaggtgccgggttcctattggttagttggttgtttttccgtctgagtgaatttttgccagtcttgtgagcagatgtacctgatgtattctcaatgttccaagaggttctggccttcagggtcacaggcagtagggggacagcataaggtctatgtaaaacccttccctctctgaccctctgttttcaaatctgtaaaatgggcaataagactagatgatttgtatatagcccaatgcatctctggaactctgtctaaacaccagccatctactgggaatgggccccaggactgtggtatttgcctgggccaggaaaggataagaaatcctgtcatgtgaagacagcttgagaggcttgaggaaaatggggctggggagaagcaggcttgtcagactccacccctgttgatgatcattcctgggaaggggtttctcgttctatgcaatcctaaaggacgaaactcacccatgggaggccgaattctccttgggatgaagaaattgctctttccctgtcatgagtgtccagccagggagcagggaggcagtgtcagggagggactctcatcctggaggaaatgggattccaagtcaaggatgctgaggctgtcagggagccagagaggggggtccaagtgcgggatgtgggtggctctgtggttcagtggctctgtggtagttcctagcactgcagacttcatgactccccacttaagtccaagtcacattgtctatcccagtgtgtagctctgtcaccctgcttgacacatccagtggcctacagcgactcttctctaaccccaccccctccaagctgggttctttgtggaagaaggacagggagctagagccaagccctaggcttgagagacacctgcatctataatccccgccaaggatgcccactcacctctctcatctgatcctcgctctttgtggaagggaaagctcaaagggactctctctctctctctttttttttttttttgagtagtacccttgccctcttcatggccacttcaaagtgaagccagcaaagtgataatactttatcatttagtattatcataaagtattaatactttgtcataaagtcctccttgagcccagggaccatggaagtcagctagaagagccctgagcaaggagcaaggacttgggcttctccacgctttgctcctggcttgtttgaccttgactcattccccatatgtctttgaggaggctcacaaaatactaaagctgggaggaaacttggagatctataggtcaaacctccccattgggcagatgagaaaatacacgcgggcctagcatggtgcctgccaccatggtgggaaccagtatgttttataaatctgaatgagtaaatggctcaccaatttatgcatagccctgcacatgagcagaatgtgacactcaaagcatccatgcagtacgcatgtaaccttgcacaggagtggggctctggtgaccgaaggttgtccaggactcttgcaggagaagcaatggagtcagtgtggtgtggggagacctactttttaacctgggcttagccacctgctctgtgatccagggcttaccttctttgggcctcggcctcctaatctgggtaatggggaggacttcattggcattgttagtcccacaggccaaggataaggttgaaatgagacggcttgtgtgtgaaaagattttggaaattacacagatgtgggcttgttattgggatgaggactgctggaagggactccttgctgtttatctactgctttgagccctcctaagttaacctgtgcctcatttgtaaaaccaccagcatcaggagtaagggggaggccagagggctcagatggacacagaattctagctttacctgcatccgctgattcagttttctgttgggatcagagtgaggatacttccatatgggtgatagcagccatgcccctgggagtcaacttcaaggatctgggacattttggtgtgcccattccttcttttcctgaactcacagtcttggggtgtttctgcacttggctatgtgtgtcttgtctgatgtctgtcttctgtagctttgcctctatcagggctggagtggtgcagcccctggcatctcagacatggttcctgcctcacttgtgggagctggaccagcctgggtttcatctcccacagtaaagctaagtaagccccacagaccttactgctactgctgctgccattaatgctgtgctcactatcttgtccaggattttaaggatgtcagactgctgtagatgactcaataaatgttttgccattttaaaaaaaaaaaaaaaaaaa

SEQ ID NO: 28328 - DNA, 3298 bp, Homo Sapiens
agggtgacagatcgctataaaccggtcataagccatgactaccagcaggacacaatcagccccacccaagaagacaaagaaaaacatctgggtgccacatcccgtgatggaaacaggagttttgcccattgaaaggaggtttgccaaggccaatggggtgatggaagatgtatagaagatttctagaactgccagattagccaggaaaaagtacatgggggtgtggagggaatgattgatctgaacaatgactgcaattgtagcatttccaccgaggctggtcagatacatcatcaggaagaccacaaaaatcagcatctggacctcagggtcaggtctaatggaagaggaaaaccagaggggagtggtacacttccacttccacttcttttcaacagacctggtggtggcttcctttataattgtggccttgatgttgcaccaagaagccttgttggacacttcacctttgggcccacagtctggcaagatcccttcctccatattccaataagcagctgacacaggatgatgatactgatgcggttgagattgctatcgacaacacggcttttatggacgagttcttttctgagattgaggaaactcggcttaacattgacaagatctcagaacatgtagaggaggctaagaaactctacagtatcattctctctgcaccgattccagagccaaaaaccaaggatgacctagagcagctcacgactgagattaagaaaagggccaacaacgtccggaacaaactgaagagcatggagaagcatattgaagaagatgaggtcaggtcatcggcagaccttcggattcggaaatcccagcactctgtcctttctcggaagtttgtggaggtgatgaccaaatacaatgaagctcaagtggacttccgagaacgcagcaaagggcgaatccagcggcagctcgaaattactggcaaaaagacaaccgatgaggagctggaggaggtgttggagagtggcaacccggccatcttcacttctgggatcattgactcacagatttccaagcaagccctcagtgagattgagggacgacacaaggacattgtgaggctggagagcagcatcaaggagcttcacgacatgtttatggacatcgccatgctggtggagaatcagggtgagatgttagataacatagagttgaatgtcatgcacacagtggaccacgtggagaaggcacgagatgaaacgaaaaaagctgtgaaataccagagtcaggcccggaagaaattgataattatcattgtgctagtagttgtgttgctgggcattttagcattgattattggactttccgttgggctgaattaagagtggcctaagaggctgctgcactgaaataaactgatttcactccagactggtgtggccacccttgtcttcagatgagaatggagtctgaatggccttcctgagagcgagtgcgacccgttcctttgtttccttgcaaccacccttggacctgactcagctaacaatctagccctgggggaatgtgatctacctgatgcgaccctgagttctccccagagcctcctcctgccccaccagctctcaagtaccttttctcctggactgtgtggacccacccagctttcttcctccctgttgtgtgtcagattatgccttgcacttgggaaagctcttgtgagactctcccaaggtgctgtatttttctacctcatggagtattctcccagaaactgcaatgtatttttttaggggagtatctttaacaaagcagaatgattcttctaagtttggcaacaagaaggcttggatctgagtcttctacctggcaggatgccaatcctgtttgttgtccgtatgtcctgaaaacatgagggactggcagatgtcattttggtctaaagagctgacttgtttgaaattcagccttaaattaaactcttagttgttcagcttggggggcaactttgatttttctctgtgttgtagtctctcatatttactcaaggagggaccaggatgatacagtcatctgaggttatgctttgcaaaaggctgacggtatggaatatgtttccatgtctgagtcttagaaactggctgctcattgttagaaagtgatgctttgtgagactattgtcttggggccaaaaataatcagggattttaaattgggcaagggacaaggtgctagaatcctaagctctggaaatatttcatgacactggtgtattcactcatgtgttccagatgtattctaattgtgtatgaaatgtatgtacacataagtgtgtgtgtctcaggaagtaggaaataaaaatggaagctattatgacctcaaaaaaaaaaaagccaactttgagctaggataaaaattgggtaaaggacatttgcttacctgcaaaagaatcactgtggaaatgtgatcttcccatatcatcaagaaacttgttttctggatgaatactgggagaataaaatgagaactctggagtgagctaaattgatcccaattaagtttttctgcttagcagacagaaggtataattttttgacaccctttcccacctggtgcctatgctaggcttgtcctgagaacatccctcagtaacttgatattcacatgacctacaggatgtcccatctgcagggctgagtcagttggggaacaccagaggctacacagtagctcttcctgctactcggttaatgagcttggcaggttctttgtctcactgaattcttatcatggaaacagcagcagcagccgctaggaaatcttcaagtgtagtgtctgtgctaacccagtggtaaatcccttagatcccctgctggtctctggcagtctccttgattttgggtaccatgtatattttccgctttgactttaacgctttctaggatagggtaagcacccttaattcaggcactgtccattagcttcctttgcaaaggctacttatggccggtcacaatccagcactcagacagagccaaggcaatatcctcttgcccatggctatgatgtcagacagtggatgggctccagcaacaagagacaaaataactaaaggcctttgctctcctctgacattgaggcctggggcttacagtttggaatacaacatgtgaaggtttttgttgttgtttgtattttttagatgtaaacttgattattttattgctaatttaaaaataaaaatgactttgtattgattgtgaaaaaaaaaaaaaaaaaaaaaaaaaaaaaaaaaaaaaaaaaaaaaaccaaaaaaaaaaaaaaaaaa

SEQ ID NO: 28329 - DNA, 1824 bp, Homo Sapiens
tttggcgcggcggccaaactggtgggacagtgtctccaggtagtgaggcccaacctctttaaaacaaacaaacaaacaaacaaaaaaccaaaatgcaaacgtgagtagagaatgaaatacacagtttaaatgccctcactatctttgggttactaatatactaagcctttctggactaagtaaaagatgcaggttcctgcggctagggatagaagccagactggcgtcttcagaatctcccaccaaggctgtacctctggaggagttctaggtttggatttggtcatctcaagaagagtcttcagatggattttaaaattgaacacacttgggatggttttccagtgaagcatgagcccgtatttatcaggctgaatccaggtgacagaggagtgatgatggacattagtgctccatttttcagggatcctccagccccacttggagaaccaggaaaacctttcaatgaactgtgggattatgaagttgtggaagcatttttcttgaatgatataactgagcaatatttagaagttgaactttgtccccacggacagcatttagtgcttttactttctggaagaagaaatgtgtggaaacaagaacttcctttatcgttcagagtgtccagaggagagacaaaatgggaaggcaaagcttatctcccttggagttattttccaccaaatgtgacaaaattcaattcatttgcaattcatggatcaaaagataaacgaagttatgaagctctttaccctgtacctcagcatgaactgcagcaaggacaaaaacctgatttccattgcctagaatacttcaagtctttcaattttaacacactgcttggagaagagtggaaacaaccggaatcagacctgtggctaatagagaaatgtgatatataggagtaatagataaccataccgatcattttttcctctataccttttaagataaacaaaaaataaatatcaattttttaagatgtcatgcatacatttcaacaacaaatatcttcatagaagtcactgaaaatatagtatctgtggcaaattgtatatgattaacaagaaaatatatgattctttgtagatgatttcatctgtaaagtcacaatgtttctcagagtcacttagtccaggatgttgcattcccagcacacagtacagttattcttgaaaactacaagtgaaaaagggggaacaattgaggttgtccaaggccacctagaggactgtcttgcactaccttgtgattcaaccatttcattcctagatatataccccagaaaaatgactgctcatagcagctttattcataatagcacaaaattgtaaacagtgaaatttccatccataggaaaatggatagacaaactacaatatagtcagtggaatactgttcatttaaaaaaggactgctgatacatgcaacaacctgtatgaatctcaaaaacattaagttgagcaaaacaaaccaaacataacatactatctaattacttttatattaaagccacttccaggcaaaactaatatttgatgatagataccagaacagtggctgcttagagtgagggcagggaattcaaattgaatggaaaaggggcctgaggaaattttctggggtgattgaaatgttttgtattttgatctggatgatggttatgtagctgcatatatttgtcaacattcctcatgctgtatgtttagatttgtgattttactatatgtaaattaattccttaataaaatactattataaaataagctgtaaattaaatggaattaacttcaaaaaaaaaaaaaaaaaaaaaaaaaaaaa

SEQ ID NO: 28330 - DNA, 4321 bp, Homo Sapiens
ttttttttttttttttttttctaattgttgttgttcatcttctaaaactggctccccctgttatacaacctctgcctgcatttgctcatcctgcagccacattgccaaagagttcttcctttagtagatctggtccagggtcacaactaaacactaaattacaaaaggcacagtcatttgatgtggccagtgtcccaccagtggcagagtgggctgttcctcagtcatcaagactgaaatacaggcaattattcaatagtcatgacaaaactatgagtggacacttaacaggtccccaagcaagaactattcttatgcagtcaagtttaccacaggctcagctggcttcaatatggaatctttctgacattgatcaagatggaaaacttacagcagaggaatttatcctggcaatgcacctcattgatgtagctatgtctggccaaccactgccacctgtcctgcctccagaatacattccaccttcttttagaagagttcgatctggcagtggtatatctgtcataagctcaacatctgtagatcagaggctaccagaggaaccagttttagaagatgaacaacaacaattagaaaagaaattacctgtaacgtttgaagataagaagcgggagaactttgaacgtggcaacctggaactggagaaacgaaggcaagctctcctggaacagcagcgcaaggagcaggagcgcctggcccagctggagcgggcggagcaggagaggaaggagcgtgagcgccaggagcaagagcgcaaaagacaactggaactggagaagcaactggaaaagcagcgggagctagaacggcagagagaggaggagaggaggaaagaaattgagaggcgagaggctgcaaaacgggaacttgaaaggcaacgacaacttgagtgggaacggaatcgaaggcaagaactactaaatcaaagaaacaaagaacaagaggacatagttgtactgaaagcaaagaaaaagactttggaatttgaattagaagctctaaatgataaaaagcatcaactagaagggaaacttcaagatatcagatgtcgattgaccacccaaaggcaagaaattgagagcacaaacaaatctagagagttgagaattgccgaaatcacccatctacagcaacaattacaggaatctcagcaaatgcttggaagacttattccagaaaaacagatactcaatgaccaattaaaacaagttcagcagaacagtttgcacagagattcacttgttacacttaaaagagccttagaagcaaaagaactagctcggcagcacctacgagaccaactggatgaagtggagaaagaaactagatcaaaactacaggagattgatattttcaataatcagctgaaggaactaagagaaatacacaataagcaacaactccagaagcaaaagtccatggaggctgaacgactgaaacagaaagaacaagaacgaaagatcatagaattagaaaaacaaaaagaagaagcccaaagacgagctcaggaaagggacaagcagtggctggagcatgtgcagcaggaggacgagcatcagagaccaagaaaactccacgaagaggaaaaactgaaaagggaggagagtgtcaaaaagaaggatggcgaggaaaaaggcaaacaggaagcacaagacaagctgggtcggcttttccatcaacaccaagaaccagctaagccagctgtccaggcaccctggtccactgcagaaaaaggtccacttaccatttctgcacaggaaaatgtaaaagtggtgtattaccgggcactgtacccctttgaatccagaagccatgatgaaatcactatccagccaggagacatagtcatggtggatgaaagctaaactggagaacccggctggcttggaggagaattaaaaggaaagacagggtggttccctgcaaactatgcagagaaaatcccagaaaatgaggttcccgctccagtgaaaccagtgactgattcaacatctgcccctgcccccaaactggccttgcgtgagacccccgcccctttggcagtaacctcttcagagccctccacgacccctaataactgggccgacttcagctccacgtggcccaccagcacgaatgagaaaccagaaacggataactgggatgcatgggcagcccagccctctctcaccgttccaagtgccggccagttaaggcagaggtccgcctttactccagccacggccactggctcctccccgtctcctgtgctaggccagggtgaaaaggtggaggggctacaagctcaagccctatatccttggagagccaaaaaagacaaccacttaaattttaacaaaaatgatgtcatcaccgtcctggaacagcaagacatgtggtggtttggagaagttcaaggtcagaagggttggttccccaagtcttacgtgaaactcatttcagggcccataaggaagtctacaagcatggattctggttcttcagagagtcctgctagtctaaagcgagtagcctctccagcagccaagccggtcgtttcgggagaagaaattgcccaggttattgcttcatacaccgccaccggccccgagcagctcactctcgcccctggtcagctgattttgatccgaaaaaagaacccaggtggatggtgggaaggagagctgcaagcacgtgggaaaaagcgccagataggctggttcccagctaattatgtaaagcttctaagccctgggacgagcaaaatcactccaacagagccacctaagtcaacagcattagcggcagtgtgccaggtgattgggatgtacgactacaccgcgcagaatgacgatgagctggccttcaacaagggccagatcatcaacgtcctcaacaaggaggaccctgactggtggaaaggagaagtcaatggacaagtggggctcttcccatccaattatgtgaagctgaccacagacatggacccaagccagcaatgaatcatatgttgtccatccccccctcaggcttgaaagtccttttgtggctttcctagttactcaaattgactttcccccacctttgcacaggtgctttcaatagttttaaaattatttttaaatatatattttagctttttaataaacaaaataaataaatgacttctttgctattttggttttgcaaaaagacccactatcaaggaatgctgcatgtgctattaaaaattgttccaaatgtccataaatctgagacttgatgtattttttcattttgtccagtgttaccaactaaattgtgcagtttggggcttttcccccttaccatagaagtgcagaggagttcagtatctctgttttaaagacgtatagaatgagcccaattaaagcgaaggtgtttgtgcttgtttgtgtgtatcagctgtaccttgttgagcatgtaatacatcctgtacataagaaattagttctttccatggcaaagctattaccttgtacgatgctctaatcatattgcatttaattttattttgcacagtgaccttgtagccacatgagaaagcactctgtgtttttgttcggtctcagatttatctggttgagttggtgttttgtttggggtttttaattttgcgtgtttgcatagcataaaatcagtagacaacaccactgaggtcgttacgatcaacgatatccacagtctctttttagtctctgttacatgaagttttattccagttacttttcatggaatgacctattttgaacaagtaattttcttgacaagaaagaatgtatagaagtctccctgcaattaatttccaatgtttacattttttaactagactgtggaatttctacagattaatatgaaatggagctcatggtccgtttgtgtgttagatatgctgtagctgaagccctgtttgtcttttaaacactagttggaagctctcaataaaaatgcctgctgctcacagcacagaaaatggggcagggggagcctcaagcacaatctagctgtcctcctaaagactctgtaatgctcactcccctcgcgttctcccggcgctgtcgggaggctgtgctggtggtcgtgtagaggtccttctcctttcacatggtgcagagagcgaggacctctcctcctcgttcagttgcacttcagtattttcacggatatgaatgtaaaatatataaatatataaacctgcggctttaacaactgtaatacaaccttttgaattagttccgtgtatagataattaaattcttcatacaaaagttaaaaaaaaaaaagaaaaaaaaaaaaaaaaaaa

SEQ ID NO: 28331 - DNA, 3065 bp, Homo Sapiens
gcccgcgcagctcttatccccgtagactgcggccgagacggggagggggaagcctcgcctggggggcggcagtggcctgggcggctctccggctgctgttgtatggctgcacgttggcgctaccggacgggatgctgtatccccgagagagcccgtcgtggcagcgcaagcagctggacggcctctgaagcttccgcgccgacttctccgacaaccgacgccggggcttcgaggagcagagtcaggccccaccgtggacatgccggttccctccagcttcaacgacatcggccagggctggcggctgcggcattttgtcagctggttgtggtatgaacgggaggtgaccctgctggagcgatggatccaggacctgtgcacaagagtggtgctgaggattggcagtgcccacttctatgccatcgtggtatcccaagggttactttgtccagaacacagaccttgacttcttcagctacgcaggactgctgtggtctctgcttctatacacgacaccccccacctacatcgatgacgtcaccgtcaccaccggcgtgaagcgagacagtggtgagggcttctggactggatggaggacctgaagacatgaggtggaggcacaggtagaagagaagattctcaccatcgctgattcacacaaaagcatttctccaagtggttgcagatgacatgatttcccaaagtgttagagctgaagtgtgtttccttgtgtatatatactgtggttcctttatcccttcatctgtggatagacaggtgcaaccgtgtggttccccacgatatgatttcattgtggttttctgtctgaagagtatcccagtatgtacctgtggagcagcttctttatcccttcatctgtggataagcagtgcaggccaaggccccctgcccatggaggtgtgctgcagacagcagcagcagcagcagcagcagcagcagcagcagaggcctggcttcctgaggaattgctggccggtttgaggaaggaaggaagtcccacctaccatgatcaccctccagcctggaggaagctccatgccagcagcatggaccagcatgggagccagagccctgctaatgctgcagctcatcacccctgctcagcagcccagcagcccagcagccattgccacatcccatttccagggcctcctgcccccatgcccccacgtgcccatggaccgacacaccactcttcctgttggcccaaggtaggcatggagggaatttttcaagtccacttttagtaggtaagtcaaaaccaaacaaaataaccactcgacacctggtccaatgcccttccaaactcactcttttctctgacccttaaacacttgtcctgcatctcccagactccactgtaccttgatcagtaggtccctcttcactgcagtgtcttttttgcagagttcttttagctctttcatgcttttgctatgggcagaggaaagaaagaagggtaaatttgggaatcaggggagatttgtgagttccagtcccttttgtttgaaaacccagtgaatcccagcttactgggtgagagttttcagtggagtcctctgatcacaggggctccagaggaccagggtgggacctctcatgctcctcccctgggccccatctccacttcacatgagccactgcgtgtttacagttagctttcagctggacacagagttccactgctgggtacaaacacctgaaagcctccagttggctccagtctgttcctgatggttaaaaaaccttagtcctgagttggaaatccttgcctaggagtccagggcagcttagtgaccacagccaccggcccatccctgcctccagtgtccctggactccaagaacctttcagagtcattgagggcacatggggggagacctgtgagtccctaggtcaaccctgatgctgccatggagagagccctcctcacctggacactcctgcccacgtcttgtgtagctgacctattgggttgctgcacagagcagagacgatgacgtgcaccgaggagaagttgttgaggcttaggcactcctggagagggaagaatgagctgtgcggttcagagttggagcttggcccactacagcctcagccccctctgctgagatctcccctcctggatgaagcagaggcctggggagcctcaggagggcagacctggggccgagtggatgtcactcatctaggaggattttagttcaacccaaggaagaccccaggtcggaagtgagcagccaccactgggccgtgggagtcaagtctggagaaacagctacggccatcccagccctggccaaggggaaaatgccggaagactccagggtgggaggaagcgcgtcccaaggcccaggatctgcgaggcgacttggggaaaacgcaggcagaaaataaagcatgcgaagaagttaacttggtgccattgggcagagggtgagagcccagcaaaccggagagatcagctgcccacatcagtggcgaggagtgcggagagtgggtgaggctggggcaggaagcaggccagcctgccagagcccaggaacaggtgaaaggacctgctgaagctcacacccgtggaccacccagactgcctgccgctacaggatgccctccgcatctcccaggactcctttccggcatcagtgtggacattgaccccactggactgcagtcacagtggactcccaaggggcaggatccacctctgatgttcagtgaagactaccagaaaagtctgctagagcagtaccatctgggtctggatcaaaactcagaaaatacgtggttggagagctcatctggaattttgccgatttcatgactaaccagtagtgggtgcagtggaccccatcatggagaagttcaacacatccagcctacgaccagcacctgtgggaggtggatattcaaggcagcagagcctacagccggggcatggagaaggcagggctcctcgccaaggccgagatggatggttttacgttgaactaattatatactcaagtgctgtttaaaaaaaaaaaaaaaaaaaaaaaaaaaaa

SEQ ID NO: 28332 - DNA, 2296 bp, Homo Sapiens
ctcagcctgatgctctcaccagccttttcagtgaaattgaaaaattggagcacaaattgaaccaagcccctgagaagtggcagcagctgtgggaaagggtaaccgtggaccttaaagaagaaccaagaacagatcgctcccaaagacacctgtcgagatccccaggaattgtgtctaccaacctaccttcctatcagaagaggtctctgctacatctcccagacagcagcatgggggaggaacagaattccagcatctccccatccaatggagtggagcgaagagcagccacgctctatagccagtatacatccaagaatgatgaaaacaggtcctttgagggaacactttataaaagaggggctttgctgaaaggttggaagccccgttggtttgttttggatgtaacaaaacatcagctgcgctactatgactcaggtgaggacacaagctgtaaaggccacattgatctggctgaagtagaaatggtcatccctgctggccccagcatgggagccccaaagcacacaagtgacaaggctttctttgatctcaagaccagcaaacgtgtgtataacttctgcgcccaggatggacagagtgcccagcaatggatggacaagatccagagttgtatctctgatgcctgatgcccatggtcaacccacgcagaagaaacagaagaactcatgctgccagatagatagaaaaagaagcatggatccttgaggagctgacaacaagttatcccagggcctgaggttctcctgcccagtcccctcttgcaggggttgctatatctacttaacctgaataggtgtttcacacaggtctggtcaacagccccatgcactccctgtatcttgcactaaatttttctaacagggtcttagtggttaatgatcagaagatgtctcctgagccaactgtgaacctcacccaggcaaaatggctaccacctacttgggtccttcttcatgaaagctatagatccttttttgttctctgaggtcataatttcctcggagacctgtttaacaagcaaaaatcaaaaccctccaagattgtctcatattctacctggactaggtttcctatgagagacatctacttgtaatgcctgacctttgagatgctcagttctctggtgctgccaaaagatgtttccatggtccgtgctctgccagtggggttcacaacaagagacgtcattgttcagtagcaggcaaagagggagcacacagcattattctgatggaaaaagattatccagggaatggtacaacaatgaccagcccaatgcaggaaaacactacttccaaaacactgaattctctagaccagaggtgctctgaggatccagggccttgtgttcttatgtatcttctgcttcctgacagcttctttttcaaaataacatgcaaaaaaagctgaatgcactaactcacaaaacaaacacttgcactgaattcccaatgaagtgaagatgttggaaagacagaggccagctatttaggaccatacgcacctgtgacaagggctgtgttgaccacagtcacactgtggcatgactggatacccaaactacacttctacacatgaaaagtaagaactgtctttagattttctttactttgataacttgtgattgtttagcttaagacccaagaaatgctgtttgctcatggtaaacagaaacagcatcttcgctacaaccactgacaccagctggcgtcataggtagctagatcattgcatttgttttgaaatgttaatatgttaaatactaaactaatatttcaaaaatgtgtatatatgatttctatatccttgtttttcagatagcctgcttataatttaatataaattaactgatgcattcataagatttcaataatgaaatggttcccttttaaaaaataaaaatactttgtagattaaaaataaatcagaatttcaaatttaaaattgtccacacactaggaaatagaactgtgttaatatataagaaatttggggataattaagaatgaaggacttttctatcatttccattttataaattgccacctgtgaaaatggtttttgcacattatttgtatttttctttgtatatgaaataattttttgtactttgtaaaatatggagcccattgtaccttcaactatttgagactatacacagtgcttcttttgtaactggattactttaactttcgtgaaggcattacattgcctcacattcactaaccaccttgaattaaatttatttcttaagaaaaaaaaaaaaaaaaaa

SEQ ID NO: 28333 - DNA, 3365 bp, Homo Sapiens
agtcattgagtttcaatgttacataaactccattacccgcatgttggggcttgatctcctggttattatctgtgcttgaggaaacacccacagcagtctctacccagaacagtttcctaaagaggcataccctcttcctccactggaaaatagtgcgttcccttcctaccctgcacacccatcgcccccacattgatggttttcaaacagcaaacttttcagctaaagcttcaaaccatgattggaatcagcctgtgttggatttgtgattcagggtcatggtgaccctgatccagtttgggtggaaatccttcctaagtatcataagaagcatcttggcagagatgctttggtggcagccatgagctttgctggaggccttgcttcccatagccttggccgtggggcaaggaactctgccaggcgagggggatgctgccctggatcaacagaagcctggtgggtttgctcgtgttagagtgtcctgccttcttactgacaactcttctcggtgatagcctctcttccctggattgtgacatatggaatgacagtgcaggtaccaccgaggctagcacagtcaagcctccagctaagctggatccctgaagcctgctatcatgcagacaggctatgcggctgcctcggaccatgctaggccacttgctggggtgtcaacctaccaccaaaggggtcttttagcaaacctcatggggaacaggaacattcctgttcatccctggccacaggctgcagacccagcactggcccttgcgtgagtcagagcctggggctggccctagccccttctactgacttcctcatttaagccaattatataagctcacattgatcagggagggagggaaagagctaaagagggtcacacaagtggctattttccctgcagtgtttctgtgtggtgaaaataacccagtccactaaggggcgggagtgaatggatggctggattttccccaagctccttatagcctaatgttgtcaggatgtgagtatgaggaatttagcctcttatagtgaaatgagtccaactctgggctttgcttagaggagagctcccgtcaggcttcctataatatgaaaagaagtcaccattggggaactagagaccccagaccttttcatatggatatttgagaatgtaatgcatctcaggcctcgtgctggaactctagggcactctgggcaggctcagaacacttgatattcctgacagctacacacctgacatgcaggtacatacctgatcggtgtcatctcctaacaaggattttcagttcctcgggagagcaataatctttgtaggaaagacatccctgcaataggtgatatgtggtccttagaagttttattcctttactacttggaagaaaagttctttggtgattcttctctgcttttgaagatgatcaaaagcatcttcattgattttctgaaacgaaagccttgtctgaaaccaattaatacttgggaaacagctgggcttggaggagtagaatgccagagataaatccatggctcctgctctggctctcttctgcagaaatgagggcaacagtgaggccacttccctggcaaatgtgcagctcaggatagggaagcataagaccctctgtttaaaagagagtcaagtaggtaaccaaagccaagctctgtgcaaggtgctttggagttgtaaattgaggagtgcatccttgctgtcttgaaccattctgtttgcaatggtgagaccttacataacctagccttgcagggccgccacacaaccctggagtcctagagttggaggaacctttgtatccatctgacttctcattttgcagaatatgatgagaaagtagaggatcgctctgttcaccactcttgctattccattagtggggagatgcctgctagcatgtgtgaggggaacactctgatacactgggaagtatcggaaattcccagaaacacaaacataaaataactctcctagacccaggtactggggactgtctcagtccgtgtggcatgataaataaaaggttaggatcaagtctttgtatttttcaagatgtggtagctgattattcctgttttaagtactctgaaattgatctgtgatcaataatactaatatgttatcttttaccgtattctgcctctcactattgattttaattagttaggagtatttgagctgttatttcttgagcttaatatttttttagagttaactctttaaggagataatcatggctgtagacaaggccagggctggctgacgtgccttagaaggtttgaatgcaataaagcggtgtttggcgttctcctgcattgtagtgcgggtacaaaatgctatttgttcgtcatactgttgtcagcagatgagccgcccactacagacggctactgcccagggacctgcccaggccccacccaaggactcccaagggttgagatttctgcagacctatagccagcacacttagtcctgccctatatagagttcctcttcgggaagcttttgataaggaattctcagaccgataggatgtctgtctgggctttgctgcgggacagtctaactgtgggggctaggggaaagcaggagagtatcgatcaaagagtaagccacacacggataatcagttactagggatggaggtgtgagggttcattatattattcattttactgttgtatatgtttgaaaatgtctataataaaaagctttaaaaaaaaaaagaaacaaaaatagttcaggccagcaatgggccctccatgttcagtggattttatccttgtttcaattggggtaggagttccaggaggtgtggattggaggttgtctaaagaattgaactggcctttgtccctgcttcctgggagggagactttcagtccttgacatttccagggtaataggagtgtctttgttatttgtgaggccatgggatcacacctgagcttatgctaaaaggtgggatgactcagagctggggctggtcaccagacagactgaccatgtgattagaggtttgaggctttgagtcagcctgacctatggggcgggggactggaggctgagtttaatcatctggccagtgctttaatcagtacatcatgaaaccctaataaaaactctggacactaaagctcagcatagcttcctgggtggtgaagctgtggctatgccggcagggcagtgtgccctaattccacgaagagggggcatgggagcactgtgctcaagacccttccagacctttccctgtgtcttccttggcttgtggagctgatttgtatcctttataataaaactaatcataagtataaaaaaaaaaaaaaaaaaaaaaaaaaaa

SEQ ID NO: 28334 - DNA, 4649 bp, Homo Sapiens
tgggcctctcatgggggtgctcattgtggtttaagtcagctttgattcttgacctccaaggctgcctctgagtagctaactggagaatcgggtggggaggtgaaaaacaccgcagtcaaatgacccaatctttaatcctgtgcttaagacaccactgttgctgttttttatatttgaagcacccaaagactgggcgtccgctcagccttgatgagcgagcagctattttgtcaggccatctatgatgttgggataatggacaaaggcctgattgggccatatatggccttctttagggcctcctggaggtggaggaagttgtgggtaatttctaataaagacgggaaatgacaagccgtgtgtgtaggtaaagtcctaacttaaaaggaaggacaggcctagggaagggtggaccctaaagggcccatgtgccaggggaacagtggacatgtgtgtccagcccaaccaccatgtctggtgctgggattctgaaggtggcccccagctcccaaaataaagctttccttttcagtagcgtccgacacttgggtagcttctttctataagcaatgcttgaagatggacgtctgggtcctcatttcctccaaactggctgctacctgaaggcagtcacacatttcttttctgttgggctgagctgggcagaagcctcggactataggcctttccagggcagaggcaatgcgggccacgagtagatacctccatccagcctccaccctggcacacccagaacggcgtggactcaggcgggttgctggatttctctgagccttggcgtgctctacactgcagggctatacatgttcccagcttgagggcgtgctggggattgacaaatatatgaaacatataagcgcaatgattttctaaaattgtgcattcccagcgtgcccattggttctctctcgctggcccaactttgtgtgctgtccataaatccctttctgtggacggtgacagtaggattgggagtgagtgggaagattgtggaaagattgcaaagaggtcattgcaggactcagacagaccttgcagtgggtttcagagtaatactcaggttctcccatggaactttcaaagctggctctaagaaagatgaagaggacaaacccactcctggacatagtgccaacctagaactgtcagctccacacaggatcacagggaagggagcttggtaagacagcccagtagggggccctgcttttcagaagaggaaactggagccatgcaaggggctggggatcaacttagaaaagagcacaggactcacagtcctgggcctgcacgtaaagctagccccctgccccacggaaatggcaagcagtgcttccctccaggggttctacatctgtgctccatctcaaaatgcataaaagcctgagtcattcagatgggagagacagtgtttctacttcctcttagttggggttcctccagaaggagaccctgagagaggacttgaggttatgtagtttatctgagtgaagatcccggaagtagggagagaaggaagctgacggggaaggcgtgcattaccaagtaagttaccgtcatgtgcacaactggagctgaatcccactggggaaccccgagagacagagctgacaccccagagttcacccagcaaggcggggagacagctggggtatttattcaccaagtctatcacttatgagaggctgtttctggaaacaatttctgactggccctgcacacacctgagcatacttcctaagccggggatgtccctgagctgagacaggcgttcgtgacaagcagacttcgagtggaaggcaggcatcagaaccaccctgtgagctggttcagacaaagattgcaggcccttccacccccctggccccgccaagttcctgactccctaggtctggagtggggcccgggaatttgcatttcaaaaaatctcgaggtgatgctggtgcagctgctctgaagtcttgactttgagaaccactcactagtgagagtttccagcccttacctgtctcttattgatggctttcccccctctaatttataattatgctttcacaccacttcatgtcacagatcccagggtccgtgctgtgaatttaaaagtggagaattaataagcatttataactccatgcaaccattgctggcagcttaaatgccatctgccagccataatttatttataatggggtttatacatatttataagtttgcaagcaacaaatgcacagttttaaaactggcacattttatagcagccagaaaaattgcaactttataccaggacttgtgaatgtgaattgcatatgtatatacatatacgcatatacttacattgattaaaaacggatctgcatctctgtacacacgcagattggctctgtgttgtgcaccttgggactcctccctgggctttggttttacagctaagtaggaagtcaaacaaacgtgaagaatttgggaattggcaggctgtggcatcagccatggaggatggtcctggatgctgtaggatgtgagatccagcacaaagagaacaagaacaggacatgaggaccacagggattgggggaacccactgtgggaaatgacagagaagccagtgggggaagacaaagaaagaagaaggtggaggcagaataaaggtgagaagaagggaaggggagaataaaacaagtccagatttagatcttccttcatgcagccatgcatagctgtctgaggccagcagggaaggaggagaaagggaaggtgtggtggaggaggctgtgctcgtgatgtcatgctttcgtgtattcccaggtgcagctgcatatacttggcacagtttcttgggatttctagccagtttcttggcctcatttgtgcattagttaatatgtggctggccctgtactgggatggtgggatagagaagtgaatgtatgaggcctctgcctgagtttataacctagaaagaaataaagacacacacacacaaaggtgttggagtgtgacaagccttaaggtacccgtgtgtccaagtaaagtagaaccagcaagggtggagtgcccaggtcagtctggggactctggaggcttcgcactgcaggcgtcagatactgagtgttagtggcatggagaagagtgtggaaggcgcaggatgggggtggacagcctggagttgtcactctcagtagagatgctagaaggggcgggaggtgatcccagcctcccttctttcctcctcctggctgtcacagatgctctgaattgatgaatccttcaggccaaaaacacacaggctccttccctaggtctggaaaaatggttctcgctgaaaaagcaccaggaataaaatctcatacaattttaggtgtctattttgttgtctcaccttgaaatactgcagacagaaaaacatgcacatggggagctgtggtcctgagctttgaggtaatgaattcccactcatgtgatcatttttaccataaccaaagtttctaaccatcaaaatcaagtgacaattaaaacaggcattaatggataaatccgtctttaaatattaatggggttaattttgttaacagctatgtgttggttgcaagtggaatgttctctgttcatttgacttttgaatataacttgttccagaatattgtaaaattaagtatgtgaatgtttctttgtattcagaattaaacatttggtgttaaaatcccaggattaggagacaactccatgtaaatttaatgtgtaataataagataataactttttaaaaagcatttggatggcaaattatacatactgacaaatgaatattatctgaaagttgttttgtttccattaacttttgtgaaacaaaaagaattactgtaacagtctatgtcttggcgtattgccaattcaccactttctactttgtgctggaacagaactggcttttttgacatccctgaggagtggaaatgcaaaacgaatttcaagttctctaatctttgttctatgacaaatgaaaaaacctaagttatctggtgttttggagatttgagaatacagcaggtgaagagaattagcttaaattccctcctcccttttgataaatccacagggatcccttcactctgtcaggaaatggtgtggtttccaagcattagcccttcatgatctgtctggtgcatttctgtgctcctgggatcgccaagtgcaggcacggcatcgcatccccaggtgtcatcctgtgacccaggaggggaagatgacacacccaatttaggtaatgctgcacttcttgttataattggttattggaaaatgtgcctttattatcagaacagtggtgtgcgcatttctgattatggagctaacttttggatatctgacttagatactaaaaacatttgggtgttgcagttttgcacttgtagatacaacttaaaagcatgaaactggtgatttaattagatgttttctataaaatgcaccttgttacatttctgtgaaagggtcttaccagcgtggaataactggctcaagggttgagagaaacaaccattttctaaacagttaattgtttaaaggactatacatgtaagtctgcaggcaataaaggctgttgtgaaaagtagaaaaaaaaaaaaaaaaaa

SEQ ID NO: 28335 - DNA, 7394 bp, Homo Sapiens
tgggggttttacaaatggcctagtgatttttcagatagcagagaataaatcagcagtgatttggcctgcccttcagcctagggcattccctggttatcaccagcctcatcatcaggtgcttgtattacacgtttttctgtccacaccggcaggtgagatggtaatctaagagttgatttccaacacgtgcggagggactttcgaaagtccccctagtcccggtattctcttgccctgtataattttaggggtccaggcattcaggcttggatcgtcctccttatgtctttcagggccttggaaaattctggaatttagacaggggcagtaagtcagtggctgtagcccttgaatcccatttgggaccttaactcattctaccttgcattataattatttggtttttaactgtctaggtttctgtactttcaggggtaaagctgattcattctcctctgtgtcccagagtccacctccaaggtggtaggttgcttgataggtgcttagtaaatatcatatttgattaactttttgtagcctcctctttagtctagaaattctagatcccaaatagaaggtaagatatggtatattctggacttttagttttctatatctccttttcaaatacagacctagggtgacagacaaaaaaatattgtgatcaaagtatatagcatttcctttcatggtggaaaaatgtgcctgataaatgttttctctgcattatttgcctccaaatatattttaatgacagttatttggatatttcacactttatacttgacttgggctcagattaagtcttgtgttagttataaccttgaataacaattaggttcatgagaacagggatggtgtatatttgtttttaatctgtttcccagcacttaacccagtgctgagtttatagtgggtctccaagaaatacttgttgaatgagtggcttttggtcatggtggccttttagtgcagaaaaacttttggatctgaattgttagacttacttaatttttttgtaataacacagagaatgttgaatagaaaaagtaagtttagaagatatatatatagagagagagcgagagggagagttagatttatttatttatttatttttgtgagatggagtctcgctctgtcgcccaggctggagtgcaatggtgcgatcttggctcattgcaagctccgcttcccaggttcacatcattctcctgcttcagtctcccgagtagctgggactacaggtgcccgccaccatgcccggctaatttttttttctttttatttttagtagagacggagtttcactgtgttggccaggatggtctcaatctcctgacctcgtgatccgcccgcctcggcctcccaaagtgctgggattacaggcgtgagccaccgcgcccggccgacttatttatttttttgtaataacacagagactgttgaatagaaaaagtaagtttagaaggtatatatccatatctctatatattttaccctccttgaggttcgaaatagtaggagtgaaattagagatttaccaaaatcggatgatgatttgcacctttgaaataactcatgcctttgattgtcactttagctacaagtaggttcctggtcataactgtaatatccctacaagcctgctttatggaacttgagctgcatcgtattgtctaagataggcctcggttcttggccgggtgcagtttatgttctttgaaactgtctccttttggggagcaggctgagagatagtgaactcattgaagagaattgtagcggaactctctagcaacttcctaatagaagatgtcccctccttgacttctttggtgtttcagctgccccattgaaggaagggacagactgtgcccttgggaccagagcctccttcctaactgtctgcaaatgaatgaggcaccagcatgccatgctcagccaaccacctgtggtacaaaacagctttcctggactctgatcccttagtataaacctgtgtatacaggattcacaaggatgtaattctgtggtgtcatctatcaggcacatgctctttttttttttttttttttttttttttttgagacagaatctcactgtctcacccaggctagagtgcagtggccctatcttggcccactgcaacctctgtctcccaggctcaagcaattctcctgcatcagcttcccgagtagctgggattacaggcacccgccaccatgcgcagttaattttttgtatttttagtagagatggggtttcatcatgttggccaggctggtcttgaactcctgaccttaggtgttccgcctgcctcggcctcccaaagtgctgggattacaggcgtgagccactgcacccggccagggacatgcatggttttctacagagtggcttcagcttccacggttcatccctagacaattttgcctttttttttcaagacacggtcttgctctgttgcccaggctggatgacagtggcactgtcatggctcactgcagccttgacttcccagggtcaagcaatcctcccacctcggcctctggagtgccagcaggacgtgtgccaccacaccctgctaattttttattttatttttttagagatgggatctccctgtgttgcccgggctggtctcaaactcctggtcttaagtggtattcctgccttggcatcccaaagtgttggggttacaggcatgagccaccacttgtggcctacttggctcttttttacaggtttttggttgacacttctctgcagaatagcacctggcacctctcaccaccactgaaaaggatggaattttatacacctctttttcctaggttctctctagcagttaccaagggaccatcggaggtacttattgtggctgtttacaaaagccttgcctccagtctgagtcacctcaccctactctctgcttcttccttttagctactcttttttttcagtaaccctccctctttcctctgaaggcttgtgcttgcacacacaggcagacatactcatgcacgcgcacaccacacatgcttcctgtcctctggctctcccgtatcctatgtaaaacctcctactgtcatttaagtgaaacccttctagcacataagagttttcatctcagaagctcaattttacctttcacttttcagatagagaacacccaaggtttttaataatctggcgaatgtgttaaaaaaggacatattttttaaaatctagattgcaaaagtaatactgtagcattgttgagttcagacattatagaaagtgaaagttccctatcatttgtttcccataaccaccttgaatagtttagtggatatattttattctaagcacatgctgtttatcttcttgaaaacaggatcatggcatagatatactcttttgtaatttctcttattagaaaagaagattaatcatatatcaaacacgattccatgtcactccatatagatctttccctcattctgtttttacagctataagggagtctgctgtgaaaatgctccttcgattagtttataactgagtgtaaaatttggcatttcactcttgattatagtctttttctgtatattcacccccaattctttgagaatgaggagtaccctaattttgtaagcaaaattttggggggctttggggtgaaaactaatttaaatgcttattttctcagttgcctacctccatttaaaaatcagttttgagggctataaaaaaaccttatgatattaaggcctttttttctgtataaaaataacatacaatttattttttccatttattcaaaagactgaattacactagccaagaaatgatcagtctcgtgtaaaagaataacacacgttctccttgaatcaagactactctgagattcagaaatgccagtagcggagggtggggtgtgaccccttaagtaagtgtgactagttaaaggtgtatggatattctttgtggaaagcgggctgccagatacaatttcaggctgtttcatattacttcacacggtgctttcaaactgtttattttctctcttggcactagtgagtacagctcataactggccagataatatctaagtctaggaccaggacagtgaatgggttttaccatgatttgatcaaaagtaaacaagaaaacaaaagcagaggaaaaaaaaaaaaaaaagagaaggcatcacatttttctcattgtggggctaaaatgctgcatgttgaattttcactttctgattagaacccacagttgaacagatctgatttatttttttggggtcaggaagaaactgtcaaattttagtttgactgttcttttctttaggtctcccccctttcttcccctacctttttttttttttaagcattactatattaatcagatagcagccactgtttgacatgtccttctgtggtggctgcagattaagtctgaaccgtgccagaaatctcgttgcattttttgatgtagcagaaatgaacctggttcattccatcttaacagctttagccaaatggctcagaagggatctacccgatttcataaagaagagttaatgtgcagtctggtttaatacaggtgcccttaaaatacatttttgttttgttttgttttctcacttccaagtttaacatgtccatggacattggctttagtttccccaagatgagtccatgaatgaccttgttccagtatcccttgctgatttgagttcccaagtaataagcctgggaatgttttcagtgcagcagccgggagaagaagggggattcagcagttgctgttcaatgcatttactctctacctgctggcttcaaacagtattaactttatgtgctccttgtgcattgtgtttaattaaaagcagttctcttcacagaggcacttgtaggatttttttttttttttttttttgccctgaaacgaataaaacaaataggcgtctggtatttgttttgtataacacaatccccataaaatgaagagtaataaaacataattatctgtaaaggcttgttttataagcctgagaatgggcttgtttctaccaggtttttatgttcattcataggagaaagaatctctttgtacattaatatgtaacaacaataagaacaaatgcttcccaattacatgcatgaatcaaacttatcttttattaaaaaatttttttttctgttgtagtaaaagtttgtcattaaattctttctgtgtaaacacattagattgaaggaaaatgttttccttcaatattctgttcaactggcataactttatgatttttttctccccagcataattaaagaaacaactttatggttggttattgacttttttaggtcagagagcactctgtggattctaaaaccgccttccagaaaagtacacatcaaacttctacgtacgtttttatagggtttgtagagctctgatccttggttaaagatccctgacaatgtctaatagctgttttgaaaactgtacctccaatctgaagctaaggttttagttttagttttagtatgtgaatatctgatgaaacgattcaatggttttgtagcattggattcaatttcagggttgggctcctttctaggaatagaggaatattcttatctcaggaaaaaaaattcagagtgtgggaagtacgaaaattattaattcaaaggtgtatttgctgtcagattggatggcagtacccacatccctaggggctcctgttcccaagactgttttcattgtttctatccagcgctgggcacgagccttgaagtggcgaattcatcctctgaagttgtgtgtccattgctgcaagaataaaagaagcagtaacagaatcatgcagcgcagtatttcatggtgacagttttatgtggttgtgtgatgttgcagagtcttgtaggtgatatctacccttttcttttgaatcaaaacacggggttttactggaggagggaagtttcagaaacaacctagtctaacacaaaattaagctcctaaatagttatcccattctgtctactacaaaactaattgcttacaggaagtagaagtacacatatctaatatttatatcctgtttgagtagtggtttctaattttagatttctaacccctttttacattatctttttgcattgaaattatactgaaacattcatattattatgaatgcaagctgaattaaatagaccaagattctcggtttctcccttcatgttgtcatctactagagaatgaacagcttaaaataagtgcatcagttcctcatccaaagggaagctgaatattccaattcaagatcactttgcgtgcttactggaaataccatttttgaacgtacttggcaacttaaagtgcccaattaaaagctctgttgaaagaggaagtctgtggatgtgcaattagtccttaggattcagagcatttcctttatgtgtggaaggccataatatgaaatcactggtcacaatagctttatgccaggtgcttagactagaaggcattttcaggatggattatttctgtactcttgctcctaaaatggtttacctaaagaggctcccaagtccataaaaatactggtgatgtcaagaaattttggaggtggcctttcacaaattttaggcagtcaataaatataactagccatgtacgtgataggcaatacacaagacttgcttatattcctagactttctattttatctgattgacagtgttcctcttcccacctttttattcatttatttatttttaaaagatgaggattgggtaccagaaaattagccagtattgtgtgcttttccttactaaaaaaatgaggcctcgctgagtagggccagatgagctgtatattctgagattatttatagtgtttatgatagagagaccaaaaacagtaagcacttaatagctttccttatttacaagtcagattcatctaagggagatttttcttttatttttctggtgcttgaaatgttcctttaaaatagattatcagaggatacacagtgacacaaaatttgttgcttgtgaaaatgcagagtggattaagcttttctttttcaaggctctgcaacaaaacaggtacatttttatttcagtaaaaacactgcttttttttttgcctccgtcacacacacgagtaacataggatagatatgtgtatgtgaacatgtggctcttgttcccagttgtgtaatggatgcattcccttaaagtttgcagtaaagtgaatgtttattaagcaaattgtttttccccagtgacttctactgtaaaaatggcattgtctttcagtaggctctgaatatagtatgttcccatattctttggtaagatgaccaatcaaccagaaaaaaaaaaaaaaaaaaa

SEQ ID NO: 28336 - DNA, 6847 bp, Homo Sapiens
gaccagggcagaagaagccatggaactttaccacatagcattgttcttggaatttaacatgcctgcacaaggcaagtgaactagatatccttaaatatctgattaaatggggagagcatcagttgatgaaaagaatagcagatagagagccaaacttactgagtggcactgcccatagtgtgaacaaaagaggtgtaaaaagacgggacctggacatggaagagctcagagagatcctttcttctctcttaccttttgtgcgaattgaacacatcttacctataaacactgaagtcttaagtgatgcaatgaaaagaggcttgattagtactcctccatcagatatgcttcctacaacagaaggtgggaagtcaaatgcctggttacggcaaaaaaatgctggcatctatgttcgtcctcgactcttctctccctatgtggaagaagcaaagtcagtgctagatgagatgatggtggaacaaacggatcttgtgcgcttgcgaatggttagaatgtccaatgtgccagacacgctctacatggtcaataatgccgtgccacagtgttgtcacatgatcagccaccagcagatcagcagcaaccagtcaagccctccttcagttgtagccaacgaaattccagttcctcgtctcctcattatgaaagacatggtcagacgactgcaggaactgcggcacacggagcaggtgcagagggcctatgccctgaactgcggggaaggcgccactgtcagctatgaaattcagattcgagtgctaagagagtttggtcttgcagatgctgctgcagagctgttgcagaatcctcacaaattctttcctgatgaacgttttggggatgaaagtccactcttgacaatgagacagcctgggagatgtcgcgtaaacagtacacctcctgcagaaaccatgtttacagatctggactcttttgtggccttccatccacccttgccccctccaccacctccctaccaccccccagctaccccaatccataaccaactcaaagcaggctggaagcaaagacctcccagtcagcacccttcacgttcattttcttatccctgtaatcattcgctgttccactccagaacagctcctaaagctggccctcccccagtctacttgccgagtgtgaaagctgcaccgcctgattgtatcagcactgcaggactgggcagacagacggtggctgctgctgccgccaccaccacctcaacagcaacagcagcagcagcagcagcatctgagaagcaagtgcgaacacaacctgtgctgaatgatctgatgccagacatcgcggtgggtgtgtccacactgtcactcaaggacaggaggcttccagagcttgctgtagacacagaattaagccagtcagtttctgaagcaggaccagggcctccccagcatctgtcgtgtattccacagagacatacacacacttctcggaaaaaacacacactagagcaaaaaacagacaccagagaaaatccacaggaatatccggatttctatgacttctcaaatgctgcttgcagaccttctactcctgctctcagcagacgcaccccttccccttcgcaaggtggatattttggtcccgatttgtacagccacaataaggcatcaccaagtggcttaaagtcagcctacctacctggtcagacgtctcctaaaaaaacaggaagaagctaggagagaatatccactttcccctgacgggcatctacacagacaaaagaatgagccgatacacctggatgtcgttgagcaacctccccagcggtcagactttcctttggcagccccagaaaatgctagtaccggtccagcccatgtcaggggacgaactgcagtagaaactgacttgacttttgggctgactcctaacagaccttcactttctgcatgtagctctgaagctcccgaagagagatccggtagaagactggcagacagtgagtccctgggccatggagctcagagaaatacagatttggaaagggaagattcaataagcagaggaaggaggtcaccaagcaagccggacttcctctacaaaaagtctgccctctgagagcaacctccaagtcgtctgtgcctgagatgtgaaacatcccattttatgatgtaacccaacaacttacagaccagttcatcaatgccagctgataactcggtttcacatgattttgttctagtttttgtgtatatatgtgtttattagacatggcatgctaagaaggttttgttttttttttttaatgttgcatctgtctaatttgtctttgaacaattatgtcgggaggcatttttaagaacaagcaggctggcactttttatttctctttacaaatgatggaatttttttgcacttgtacatttattttctctgtattgattttatatcagtatgttaaactttattgccacatttaaaggactgtattttcatacttttttgcattttacctttcatctaccaatccatgtgcattggattgcacactaagatgtattttcttacgaaatagttctgtgtttattttttaattatagaaattccaaagaacagcacatcagaatgctcctctcttttcagtaattgttttagttcagagatcttcccgctcagcctccataaatctaatgtcattttttttttaataagtcctaggagctgggcttcattcctccagcgggagtccagtcagggtcctgaagtttgctggttcaggaaagaacaggaaagagaaaagccttctgtgcccaggctaaagctgttagatttccacagtgtggatgcagtcagaatccctgcacattctggtcataaggattagagtcaccagatgaggctctaaacagatcgcatcccttggaattagaaagcagtggagaccgggcgcagtgactcacacctgtgatcggcacttcggaaggtcgaggcgggcagatcactgaagctcaggagttcaagaccagcctgggcaacatggcgaaactccatttctataaaaaatacaaaaaaaaaaaatctagccaggcgtggtggtgcgtgcctgtagtcccagctacttggggggctgaggtggcaggatcgcttgagcctgggaggttgagactgcagtgagccaagattgcaccactgtgctcccacctgggcaacagtgagaccctgtctcaaaaaaaaaaaaaaggcagtggaaatagagaagtaacttaaaggtcacactgacagaatttctggttctgagcgtcaactctccagctgtgatggcggaactgactgcttgctgcctttaattgtcttgctctctatgggaaaaaaacaaaagggcttcagtctcatggatgttatttggtgtttgtaaagatacgttttcttttaaacgattttcaaaatatgtctaaattttggtgttgtgtaatgcataatgctttctcaccaacagaaaaaaggaaaaaaattgttttcagttaaacactacatgtcctacttgaactccactgggacgctggtttggcatttactaaaccactgagcacatggggtctttcaggatcctctcccttggaagggcaatgtgtgagctaaggactgttttttttcttactctccaatgtaaatatatgagtatttgggtttttaaatcacttcaacattatttgagcatttactttgtatttttacaaacacataaacacacagccgtagcacttagaagaaaagaggctttctaagcattccttcctctgcaggatatttgggatcctcttttctatgtatgtatatatataaaaaactatgaatcactcacactcactcgaaaactatgcagggctagggagcgtttatgagctaccgggtaaatgaattacatgcactttgaagtaaataggttttctattgggtgtcaacaacgctgatttctcccaaaactatagtttctcttacagtcttttcctcctttaccctgtggatatacactcaggaataatctgacattttagaaaagccgaacagtagatagtctccaagatgggaaacatgtcgtgtgtctgcacgccccggcaaactgccgccactcgttctgctgcctgactggttagctgctgtgcgggtgcgctcggtgacgctggtggtggtgcacgctcccgagctcccagagttaacactaatctgcaggtcggctgtgcatcgcattcgaggctccttttttaaagagaaaagcataggcctctgttctcatttgtaagaagtttgactcataatagaagacggtgtcttttgaagcccagtctctgtctgtcttcagaaacaaaagtgaatgccgtcatgttccttgatgtgtgtttctgccacatatgtatgttgacatgttcatgtactgcgccggtactgcaagtaagactcaacagacctaatttggatggggagaaaaactctcatccctgacccttccccccccgcaaatgttagaccagagctgttgatcccacacattcatttttctgaaaatccatgaactattctctcatatccctgaaatataaaagtaagtggccactattcctaagattatttagtttataaagtttgcttttaatcatacaatagcttacctggctaaaactttgcgtataaagggaaaacttgctttaatctgtgggattgcggaccgatgcgacttgcagaaagtaaacaggcgtgggttttgtgtgcgttaggttaggtgttagtggacttttaatgtatcttgtgaagtatggttactagggtaggttcaagagctacatgcctctggcttttgaacccatctattaaatcttttttaatgctgtactaagataaatgtgaagtctgagtaaggttgctctcagaaaaaaaaaaaagcatatatatatataaaataaaatttaggccatgggaactggcattttacttggtataggaatttaatgagaaccaaatcacaaaaataccagatctccttttgagatcgtggacaatcaggcctttggacaatcaccgcttccagtgcccgctgtgcgttgaggttagagacctaccgtttacacgctagagccgagaggacgttcaagtttcttaaagatgctgttggtcttttttcttatgttattgttttagttttgtgattttgatgaataattgaagttcagagtcacccgtggctcctaaggaaaaaacagcatcatgaaaggcaaaaagtatttgaaatgtaattgtttcaattttccacgcccgttctcacatgccccctttagctttatttctgggaacatgtcactagacctcagctagcctgacaccgcaataacccgttaggctttgaggcttttcactgaattcttgacatttaaatcttcttatagaattctttatgaagccttaactaattcttgtttttgcttcctcagaaactttttattgcatctgccatccttcattgaatttttgttttggtttgttgttgccattctagcaatgagcttagtccttgtacatctgcattaaggtgccgatgcagaaggcaaattggaaacacgcgccagcggcagtggggctcaaagccgacctccatgcatcattctctagagttgaaaggattgacatttctcagtaactacccggcaaaatatatattttcataatgttgaatttgccttttaggaaaacaatgtttcatgaaacacttgtaagatacttattttgaaattaattataaggcattcatatttttaggactgaattcaaagggaaatgcttctttgactttttttcattgttcggttgactttcagctttctggagtgacaaagcagcagtgatgggtgctattcctggttctgtggtggtttactttgtctactaagtgatttactttcaaacctcattacagataatcttactaaaagacttaacatgcacactgctaaaaggtgttttactgttttccattaacgctgttgtatgaacaatatttggtgacatgttgtctttttgtcctgtagattgtcatatctgttatgtagttatccttttggcaagtcctttgatttttttttcctctagaaaatcctcagactgtcaatcttccatattttgaatattataatgctgtggccatttctatagaaagattacttgcaagtgtgtgtcttgaaaataacctcttgtatttgtgtgtttatgtgagttctgtctaagagatcagataagctctggaagcttcatcatctgtacctacatgtaactgtatctgggttacatgggcaggcggtaccaagtcctgctcttcgatggggtggctgagagataaaggttcctgaactctccttgctgtgtatgcaccacatctgtacttcagagaggtggaaaatcatctacaacactgcgtttcttgtggttgtgctgttactggtataaagtcaagtgccttcaatgctaaaggctcagaaatttttcttaaactgatttcatgtcctatgcaagtgttttctacaacctgcataaccagtactttgtaaaacttgtttacgcttcaattgtacatagtgatttttaaagaaatatatagtatttttatttaggtgcctccaaacttgaattcgtctgtgtgaagcattgtaaaacgatacatttctcttttgagtaccattacagttgtacagaggttttcactgcttctatttttctactgttactgataagcatgtaacactgactttatcctacatatagttggcatttcaaataaatggcttgtatagaaaaaaaaaaaaaaaaaaaaaaaaaaaaa

SEQ ID NO: 28337 - DNA, 1860 bp, Homo Sapiens
gttccagactttgaatgaagttccagactttgaatgaagctggttgttgcccagagtagaagattcaggcacctacagcaactcacagcaactcctaactcttaggagggctccctcctattggccgtgaagctgcaaaccagcctctctcttttccctggatcttccttgcccctagttctgagccccagcccagaggcaggcctcatggctaataaaccagctagaggacagctggggcctgtggctccttctccatgttggccttcccttgtgtctcttgtccctgtaggagtgccttatagtactgtctcgtgcttctagtctagtctgaaccacttgaagcctgcaggacccttcaactaaatctggatccctttgcttcttccctgctggctactcttcatatagatgctcttggagcctgtgcattccatgatgcatgtcagaactctcaccttgttcagcctggtgtgccttaacctcaggagtaaagggaatcatgtcggaaacacgtcgttaaagtagaatggtacaaacattggcttcttagtgccattagcacttttaccaggaaatgcaaaagatgcaaccacataatgttttcactttgttttatgctgttcttcaatcgctctttttgtttatttgtttgtttgctttcattaaccaaactcaggggaatgtcatgatgtcaccaaggccaatgggtagagaaataaaaaccagccatccataattgaatctgtaaagtcagtgaacttagccttttcaggttcaaaattacacaaacacaaggattttcttatctttcacctttcaaaggttttctttttattttgccacctgttttccaaataagaagtgggaagcctcttagataaattgtgataaaaatgtctctttgtttggcgtgagctatcaaattagctttgtgtgtccactgagccatcaaattaggctttggctgctggaggcctaggttctagctttggtcacctatcagaatcttactgttacgctgggcatggtggcatgtgcctacagtcccagctatttgggaggctgaagtgggtagattgcttgagcccaggagcctgtgcaatatggtgagacccatctcaaaaaacaaacaaaaaaagaagtagaatcttactgtgaatagctactagcctaccctagaagatatatattttaaatctgtttcttaggaatagtagctaaaagaaggaatggccaaaggagggaaagtggttggccgcagcggctcacacctgtaatcccagctctttgggaggctggggcgggaggatcactggagcccaggagttcaagacaagtctgggcaagatagcgagaccctcatctctttgaaaaatatatatatatacttttttttttaaaggagagaaaatgcttaggttgcaaatggagagtattgaacgtggtgatgtaaaaaacttctgcaaaacttgttctgtagctcctgggtcaggtctatgccattttttcttatatctgctcacacagtacagaaatgactaaaattttgggtctgggctgttatatcactttgtgttaagttatttgtagtagctaatgtgctaacttatatatgtgttctttctgttttttggattttaccttttgttttggcataacttatctatatttttgtttacattattttaaaaatatcagtaactgtaataatataaaattgaagttgtattgttgacaatacctctagtttttaaggtcatctgtcacataatttaagtgcaccagttcctaatgtataaagttctctctctctctctctcaataaacaatgcagaaaataaaaaaaaaaaaaaaaaa

SEQ ID NO: 28338 - DNA, 7326 bp, Homo Sapiens
tactgcacgagtcactgcatctttcctccttcctccactaagccactcaaaccatccatgacttatctgcagggttcaagatggctgagtgttttgcccttctatgccaggtaaccttgtgaacaggtggacaccctcatgccctggggtcttgctgaaggggagtgagggaggtgctggggcaacccctctgcaggtgctgcttgggctcagattgcgtgctggtgtccaggcccctcctggtggtgattaatctgggacacgggccgacagaggcccagccagggctgctttggtccctcactgtgaagacctttggcttggagactgaactgatctctatagcctgcttcggcttggggtttgatctgtcaaggctaaagaggaacctgatggtagagcggaaacttgtagccctgtctgacttatggcactgatccgttccagtggccttgtcatgataatactcgtatatttaagaagatttccccacctgttagctgtaacactcagatcagtcaaaagagggatcttcatgaaaaatctgtgcttttagttttttgagccaatggagcttactcttgtaagtagactaggggctgggtaggggtttctaatgagaatgagtaaaaaaggcaataatgaggttgtggctggattagtaacagaatgtatgtttttatgtggagggggtcatatcacaggtagaaggatcactccatcctcctgcaattaggtggctctcaggccacttggagcagattttcagatttcggtatctagaatcaagtcttaccctcctcattttctttttcatttcaaaccattcccccctgccacccagacgaagtcttgcactgttgcccaggctggagtgcagtggcgcgatctcggctcactgcaacttccgcctcctgggttcaagcaattgtcctgcctcagcctcctgagtagctgggattacaggcgtatgccaccacgcctggctaatttttgtatttttagtagagacggggtttcaccatgttgggcaggctggtcttgaactcctgaccttatgatccacctgccttggcctcccaaagtgctgggattatagatgtgcgccaccatgcccggcctcaaaccattttttttatttttaaataggcctccctctccctttctatgtaccagagtcctggtccccaggacttccaagcggcagtacatggtgccagctatatttcttctctgagttcaggacaatcacacgtggctccacttgataatgggcttaaggcccaagaataggaattctgttgcccatgacagtttctctgaatcagtgagtcttagtgagtttcatcattacggtagtgccatttggcagttagaagcttgggattaagagctagggaattttcctcataccatggagaaagagaataggcaccatgttgtacactagtagaatatgttgatactgttgatgtgggaagctggctatagagaccctatgaatcataaaggttgtgttgatactgaattttgctttgctgactagaattttacacatgatgacaataaagaatacatgcatcagcagatcaatgaatatttttggctcttccttcagactagtactaaaaggtctctgactacggattggacatctgctaatccctgtgcctctctagcagtttcttgaacaagactctttagaagtttcagatagtgagcttttttttttttttttttttttgagacagagtctcgctgtgttgcccaggctggactacagtggcgtgatgatgatctcagctcactgcaacttccacctccccggttcaagtgattctcttgcctcagccccccaagtagctggtactacaggcaagcatcaccacacccagctaatttttgtatttttaatagagatggggtttcaccatgttggccaggctggtttcgaactcctgacctcaggtgatgccatccaccttggcctcccaaagtgttgggattacaggcatgagccaccgtgcctggccagatagtgagcttttggaagtaggcgttttatttcttgtctcatgtaagagttatgtgcttgtgtgcctcagacgaaatccctctgcctctggggtgccctagtaaaatgattacccaagacccttgcctcatttccaagcttgttcttactcctctcttgggccaggacattttccacagggagtaatgggtaacatggtctgtgggatcctgtcatataggcttggctcaggcctatctgaggtgctgacaagggcgggaggattggagggaggagggaagtgactatgtgcatgcagaagccatagtaattgcaaagggaatattagtccaggagctgctggcccaggaaattgctttctgtagaagctttccttttcatggttttcaatgcaaattgaaaacataaatgggcacagaaaagtgtaggggggacaggtggggtgccagttgggatgtgataacatccaaaatcttcagcagggtcttaatttgcagaagagaatttcaagtaacaagagacaaccttataggatattaaaataatgttagagcatgttttgctgtgaccttcccacccccatgttttccatgtacttgtgtttaggctcgtctctgggcctgcttagcttgccctgctgcctcttcctccgctccttcccacagcaaagccataatccagcttttagaacaatggccatggtagtcatggcatagtattttggttttcacagcaggctgggaaacagtagccccatccaaagtcagtgtgctttagaaaatgtacacattggtcctggggactggagcctccatatgtgggctaaagaacatgcctcttgaaggcaggagcttgcctgctttgagaaggtgttaaagccaaggctcatttatgtgttctctcttaagatcagcgggtaggcttgatgaagtagaatgtgaggccaccaggcctttttcctctctcgatttcccacacctctagagaggtgtgactttctggttccaggctggagacacttatgtctgtgttgcctctggatgctttggggatactggccaataggataagcatggggtgaccaccactttgattatgttggcatagcaagtgatcaggtgagaagcttcagactggtttctttctagctgctgagctagacaagaagacacaaaaacaggccaaaaggcagtgtggagggtgagcttttccagtgtaaatatacccaagtagtagagaatactatggaactgtgggggcttcttcgcttcctttgtgtggggtttcagtgcgcaggtgacatgcattggctgaagaaaaagctgagatgtgtgaggtaaagtgaaatgtaccctttctgcctgtccccaccatgagtgttccttcctcgcttcttcattgattggggaattttgaaagagaaattagcttgattcttgccctgggtccaagctgtggtgcctggtcagaacttgagtttcaggagcagtctcccactaggatgctgtccagatgtaatcagccactgcttagcacatgctcctcatcccagacttacggcatcatggcccttccgggctggagagggtccagtccagagcacgagactcactgtctctttctcccaaggactcgactcatgcagggtgtttccttctcctgctattttccgccttgttgcagctgcagctttagctgtcctagagaaacctgggtctttcctcctgtgcctgaatgagaagagaacaagtgagtgattagggtggggtcctatggtaaatgacctaagagaagggtcagctgggcatgatggtgagatttgtaacatttggcaaagaggaagacacacatgtgttaatgcctttgaagtgttctttccctgccagttggactcttactagtatccagggtgagctgtggttgagaatttacaaaaattaatagaaaaaaaaaccacaaattattcaaaggattcttccagttgttagaagtctttggtccggaaaatccttctttgcaggctgataaggatgagttcaagaataaaaagaggaaaagttagagtttttaaattgcattaggttgtcaatgagtatcagaattaaaacatgaaaaccttttgacacagaaattccacttctaggaattcattgtaaggcaataaccagacaattctgcaagatatatgtacaaagacttatattaagaacacataaataggccaggcatggtggcacacacctgtcatcccagcactttgggaggctgaggtaggaggttcacttgaacccaagagctcgagaccagcttgggcaacagagtgagaccccatttccacaaaaaaatctaaaaacaaaattagccaggcatggtgacatgctcctgtagtcccagctactcaagaggctgaggtggggggactgcttgagcccaggagattgaggctgcagtcagctgagatcgtgccactgcactctagccttggtgacagagcaagagtctgtctcaaaaaagtaacaaaaccaaaagaaaccataaatatccatgagtagggttctgataaaatattttatactatgttccctcaataaaatgctatgtagccattaaaaggatgacacagatgtacatttatggacccaaaagatgtcatagcagattgtggaatgaaaaaaggtcagaaaatagtatgacagtttatttaaatatctcttcagggttttttcttatatggtggatttctgttgatatttacttactttttacttttaatgtatttaaattttttataatggtcctattttataattagaaaaaagaaattacatttaaatgtctattttaatatcaggcagctatggagagaatactccctttttttcttacataatttttaaaattaaggatatatagacctacatttactttctatttttaaatagccttattgaagtagaatttatatatcataaaatttacccatttaaaatgtacaatttaagtgtacaattccatgatttttagaaaatttataaagttgtgcaactatcaccacaattccatttgagaacatttctaacactttcagaagatcttcccttacatttgcttttgtatcattaaacatggtttcatgcttgggacctttttttggggaaagaaataagtaaacatactagaattttttaaaaggataatataagctttggattttttttttttttttttttttttaagacggagtctcgatctgtcgccggtctggagtgcagtggtgcaatctcggctcactgcaacttccgcctccggggttcaagtgattctcctgcctcagcctcccaagtagctgggattgcagatgcatgccaccacacctggctaatttttgcatttttagtagagatggggtttgaccatgttggccaggatggtctcgatctcttgacctcgtgatccacctgccttggcctcctaaagtgctgggattacagtcgtgagccactgcgcctggccccgagtgcctgtcttatggatgtattgaatgctgctgtgtgcaagatcacatgggaagtatgaaacacaagagactgtttgtttttaccgtgtaggagcttatagtgcaattgcggaaacaatgcatgtactgaaacgataatttatttggttatatatgcagtgtaagtgctagcaactactggggttattgacaggaaatcagaggaaagctgtagccttgttattaagtcagaagagcttcatggatgacatggaagttgaagtgggacttacatgatgcctgtattgaaattgcataagggaacttcaagcaaggggactggtctgagcaaaggcatacaaagagatggggaagctaaaggtaggtttgggagttcagagtggacaagtctggctcgctggaggggaaatttggagtctagttttggagggtgttgaagagcagagtttgactttaacttgaggaaaatagggaactttggaccgttttgggccagattgaagcagttaaatggtttatgttgtgctacagcatataggattctttggaggagagagacaggctgttcttttccaggaatacactttgttagcaggaagggaccagactcgtagggacagtgggaagacaactttcattcaggaaaactatgtagaaaaaaatcagtagtcagacatgactgcacgtcagggagagagggaagagacgagtacctctgtgagcctgatgatggaggaggcactgggtttgagaagactgaattttgttttatgggacagtcaggtggcaatggccagagacagcccaggaatggttgcctggaactcacacgtggggttgagatgtagaaggcctcagcatagggacaacagttgaaataatgtgagggattagcaccaaaggacaattcagaaataaagacagtggagcaaggagaaacaaagagccaacatgtccaatcagaggcaggaggaaaactaggagcctggagaagagtagatcagccagccagagtagatggtggacaaatgagtaattcgggggcaacttacataaatgaatttatctctgccttgcttattatgccttttccctattctgattgatagataccaccaataaggtaaaaatgtatacccctaatgttgatgcatggagatttataagcattttcttttccttgcttgattttagcattttgttttcaaactataataaatttgccttttttttctagttctttcctctggctcttgttgtgttttctattgttctaccctgtcgttattattatttttttcttcttgagggttgcctactttgggcttggtaatttttcccccctcagctcacaaaaccaggcagtgggatttggagggtcagcaactgagctagagatggtaagtgacaaagtgagggaatatcgtggatcccagttgttcctccatgtgtactggtatccagggcgaagcaagagagactgatttagaatcaagaaaaaagctactgaccacggatgttgccatttggagtggtttagcatcagagccataggagctgctcaggttcagggcttgcttgggcagctatggctgtctgaaaacttttttttttttttaaagagatataactaaaaactttcaagtcctcggattttgggggtagtaattccacagggcttgtcatttgtgtttgaagctggtggtgaggagggcggagtgaggagaagcgagggggtggagatgggaagcaaagaaaaaaaaaaaaaaaaaaa

SEQ ID NO: 28339 - DNA, 4620 bp, Homo Sapiens
gcagaggaatcaaaccaacaccttctttggctcccctcccgcagccacagaggcaacccacgttgtcagcaccatccctgagtcattacaatagcaccctgcagctatgctggaaaactgagcgtgggaccctgccagactgaagagcaggtgagcaaaatgctgctttctgccttggtggcaggcagagaactgtctcgtactagaattcaaggagaaaagaagaagaaataaaagaagctgctccatttttcatcatctacccatctatttggaaagcactggaattcagatgcaagagaacaatgtttcttcagtggcaaatgtagccctgcatcctccagtgttacctggtgtagatttttttttctgtacctttctaaacctctcttccctctgtgatggttttgtgtttaaacagtcatcttcttttaaataatatccacctctcctttttgccatttcacttattgattcataaagtgaattttatttaaagctatgccacacatgcatgttcaaatggtttccactgattcgatttttcattcatttaatgcaaacccattctggatattgtgcttatttgagaaaacacatttcaaaaccagaaaagccaaaaacactccaaaaacaagcaaaacaatttggagctttagataaaaggaaaaactcccagttggtaaagtttatctttacttaggatttgtggctcacacctaaacaaagggggtcagggagtgggtacaaatttgagaaaatagaagggtaagggaagggccagtggtggggtttggagagaggagatagctccattaatacacatgtttaaaagatggaaagttcacgcctgtaatcccagcactttgggaggccgaggcgggcggatcacgaggtcaggagatcaagaccatcccggctaaaacggtgaaaccccgtctctactaaaaatacaaaaaattagccgggcgtagtgacgggcgcctgtagtcccagctacttgggaggctgaggcaggagaatggcgtgaacccgggaggcggagcttgcagtgagccgagatcccgccactgcactccagcctgggcgacagagcgagactccgtctcaaaaaaaaaaaaaaaaaaaagatggaaagttcgatgtgactgcagtatgagattaaagccacaactattgtttattttggggactctaggccaccaagtattagcacacatacttatgttttctctactaatctggtccaggtcctcatggaccacaggacaaagctttcattttcattcattcttctattgaaattataccaaattcagctgaggaatatggaagtaactttagacttaaacaagacaaaagttttttcactgaagaattgacaagtatttgctccttaaaacaatgcagattagtgaacgtggattcctgctgagggagtgcatcccataatatggcaataattttcagtttctccaacgaaaagatagtgaaggaattaaatcttttgtcctcccatggttaaaaaaaaaaaaaagctgtgttcatttttactgtactatgcctcttttttcaccatagtagacaattatgtttcatttgatgaattcatagaactggatctcatacagcgatgtcctctctaatgttctacctttcagtttctaaagtgagtcttcctccctctcctacaaaacttttcaattttttgatgtaactcatctacaaatactgtttcttaccccagttgacttgcctttgtcagatttcttcttgttccacactatagcaatcaatttctcttcttccttacaagaaagggaacgagaaattgtagcaacctctcaaggattatatgcagctagttagttttctgcctgtgaaattaggtctggctcctaaataattttaaagaaccatcagcacttctaactctctggacaggtgcctctttgtccaagctagttaaatgctttccaaggaaatcagttcaacttttgtgagcggggaaaagcagggctttattgttgtgttacctgggagtctggagtttgaaaagtgctaattaaccttcctctttttccacattacaaacctttttaagcagcgcagcactccctttagatttggctatcctgggtgattttcagacaagaaccattttctctggggaccattcttctgctgggtgccaaggaatataaggcaaatgcccagaagaccttcaggtgactgggcagtcttatcatgggatatttcttctggccctgccccttcccattctgtaatgtgaattagccacaccagaggctgtgaccatggctagtagacagtggcaacatagtcatccccaagatgctaatcttctgctgggactgtcatacgttatcatggtcaatgtaaacctggtttgtgtggggtgattataaatagagtttccctcctctctgtgacagaatcacaggagaaggacccatctcgtggccttcttgttcttagcgcttcacttttacttcatccctcgattcccagctttttctatcatcattttaccaactcctcagatgcaagactttggttatgtcatactcaccaacattagtccctctcttccaggtgaaaaggtgggtagcggttgggagggagtctccactgaagagcaggaaggtggtagcagggccggcagctctgccacagagctaggggtgcctgtaaggtgccgcctagagcagcctgggagctttgccttcttttgtctctcactagcccttctactctttgtcattgcctgttcttgagtggatctttgagatgaggggacaggattctcctaagggtagagtttcaggaaatgagtgaaaggcaattgacaaatgcaaagaagtagtcactttttaaattgccggcaaagctataattaatccctaggcacaattgtagtttttattttaatgtttgtatgcacaaggccctttaggaaatgagaagttgccatgccagattaatttttttttttttttttggtgggattgccttttgggggttgcagccagaaattgtgggtaatgtgtgtatttttttatttattaaattttaaacaggattgtgcaagcttatgagacaattagataaactcatggaggaggcaggtcctcctgttattagatgattttgtgctctttgggctgacaataatacactcttgggaagtgatggtagagactgatgggaatagtctttctgcctggttgcaagtcccaaatttttaaggcttaatggaagtaagtggatgtttcctcatgttaactactgaatcagatgttaggagcttgtccctttggggttgacttatgcccagcagtacagggacacagcttcattagagtgttagtgtaaactaactccaaagttaggagttaatgtgaaaggatcatccttgaaacaagtctgctgtttgccatgcttgtagtacagaaacttcacatggagttttgggtgggatttgtgttttcacaagtaaaaaatccctcacgattataaaactcagagcatcatctaattttttttttaatgactacaagttccagcacaaaactggcatttctttgccatttcttgccagtaagaagttgacacggaggtatttgaaagcaatgttatgtgagtcattcttaagtgttccaagtaagtttagaaacagaaaaggaacttgggattcaaattgatttttcaaatcatttttaaagagacatcatcctgactaaatcttagcctgaaccttcctcccctgtgtgtattccccggtagtcaccgcagcgagatgctggtgagactgccgtggtggcatttagcatcgttaaaactggaaaactctcaagctctttgccactttcctactattttttgattcttgccattttaccaagcttaggttgtgaaacttgacagaaatgtattacaggaaaagcttataattgtatttgactttctaacacattgcaaagtttcaaagtgactttcactttcaacaacatattagaagtaaccacttttgctttcacagcctgaagagttagagcctgatctgatgccccctttcactctgaagtcatgggaaattttccagccatgaaagccctctttccactgcatactgatgggctgactcagcttccttcagccgactgagatcttttcatactattggctatttcataccaattaacctcttaaataagattgtgaattgccaaaattgatagacacttattaccacctgtggactccatattccttaccacaaatgttattttcatcagtcctgagtcattttaacttacagaaattaggattgttgctgctaatatgaataccaattataacttttagaaacaagaataaagcctaaaagagaatgaaatataagaaatgttcgttcccacccctaataacatttggaagtgaatattcccattttcttccacccacagggattgggattgatttttaatttcctaggaaacaatactagactacccaaaaagatgttgccagaatccaaaaggaactatgctcgtaaaagaaatgcagttttctcctacctaaaaaaaaaaaaaaaaa

SEQ ID NO: 28340 - DNA, 4722 bp, Homo Sapiens
ccagaggctggcgtgtgggcagcaaccgcagcttggatctgcataaagagccctggacatggggcctccccagacccaggcggctcagcaggaagagggtagctggccccagccacctgcccagccctacccctccaccgctgccttcaacctatctgcccatctcacatcctcctcagattgtaaattctaactccaactcccctagcactccagaaggccgggggactcaagacttacctgttgacagttttagtcaaaacgatagtatctatgaggaccagcaagacaaatatacctctaggacttctctggaaaccttaccccctggttccgttctactaaagtgtccaaagcctatggaagaaaaccattcaatgtctcacaaaaagtccaaaaagaagtctaaaaaacataaggaaaaggaccaaataaaaaagcacgacattgaggctattgaggaaaaggaggaagatcttaagagagaagaggaaattgccaagctaaataactccagtccaaattccagtggaggagttaaagaggattgcactgcctccatggaaccttcagcaattgaactcccagattattcgataaaatatatcgctatcgtctcctatgagcaacgccagaattataaggatgacttcaatgcagagtatgatgagtacagagctttgcatgccaggatggagactgtagctagaagatttatcaaactagatgcacaaagaaagcgcctttctacaggctcaaaagagtatcagaatgttcatgaagaagtcttacaagaatatcagaagataaagcagtctagtcccaattaccatgaagaaaaatacagatgtgaatatcttcataacaagctggctcacatcaaaaggctaataggtgaatttgaccaacagcaagcagagtcatggtcctagaactctgcttggaccagaagatgtgaataaacttaagcttatttatttaaaattccaaatgagttgctctagattctaaaaaggtgaaactttggctgttgaaagtttcagtattagtaaacttgagttactttttcttttccattttactttgcttccctgcatttcgaagctgctctttctggtcctccccaccaccccacccccaagacttgtgtttgttaatagaaataatttttttaggtattggggatccattgtctatatttcaaatcagttttttttcctcaaaaacttgtgtttgttattagaaatgattttttagatattggggatccagtgtccacacttaaaagttgtatgtgtttaaaaaacaacaacagtaatgtgcaaggtgaaatgcttttggataaacgtaagcctattttctgacgtttcttaatgcaaactctttgccttaaatggtagaatatttagaaatttgcacaaaattaaaaaaataaacattgtcttggagggttaaaaaatagaaaggtgtatgtgtatagattcacatacacatatgtatatacaggctgacttgatctagaacattaaatccgccctgcaagttaaccccccattgcaatggttgccttaaggtgtttgctagttgtgtacatagtgtggttaatcattagctacactgcttcccacttgattagagcaatgggaagcatactgtggcctaccagcatctggaagtgtgtgctcgatctgtatgtgtgcagaggtggtgtggatgtgagcgcgcatgaaggaaaaaaagctgctactcctagtaggccaaacgctcaggttaaacaactgacgagtgttactgtagggtgtttttttgtttttttgttttttttcttctatcaaattgctacttttgttgtggaagacaaaagcatttccatttcaacgagtttgtcagctttattaatgttgggcaaaaattgatatgtcatgaaaatggaacagatctatagttttgggacaaaattataaaatgagatgtgtaggtaacctatttatatactgctataaagtattttttgaagagagatatgcaaagaagctattacctacataagaggtatatttaaagattttttttttcatcctggtgccaggaatataaaaaagagtggatatatttaaccataacatactgtgattcatcaaacagcacaaactttcatttcatggagtttatctgttgacattgatttaaactgtcacttgttttatcatgtgggaacataagttatgtggtcaaaaatataaggattttgaattaatgttgattcaagttgtattgtcttattgtattgtcttttcaaagtgctgccagttgaaaagggaagcattatgtttacaaatctgttttgaaatgtttgccaaaattttggtagtgtctttaataaagatgtttgtctccagcatccagaaaaataaatgaataactttgttgtgtatcactgtaaaccagaaaaatgttggtcatctagaaaacttgagagagcatgtagattaacttttctctttggagttctaaaacattaactggaaaggttagataatatactaaatgtatacagaagtatacagactatacaaagactgaaacaagtcccttttgcactacaactctataacattaccgcagaaattttggttctatgtagcatggacctcctaaggaattctgtttcttttagcattgagatccctggtgctctttttttacctcagaattggtacaatcattattaaacgttaatttatttcaaactttttaattgaaaaaaggaaagggaaacttaattggggataaattcaggcatcatattattatgatagagtctcctgagtggttcgtctataggtaatgaactcattggtgttatttcttggacatcttggccttttaatcaaagactgtgtgctgctatttgctatgagcaaggtttctcaaaagcaaaaggtgcttggaccatttggatcacctgagttagaatctctaggtatagggcccaagtatctgcattttcacaggtttcttgtaggtgactttctgcaagctaaagtatgagaaccattggcttggatgtagttctaaacttttaggtctgtaaatcttgaaatcttgaactgaaggtcaactattggcttttttttttttttaatgtccatcatgtcagcaggtgcaaatcacttttcccctttgcatgatctgaggcacctcctcagttgtttcactgccaactcttatttcagaacctgtttacaaacaagccttccagttggtgaatggttagccattggagctcctaccctgtacatcagcacatcttctggtttacaagttgggtaacaatgaaagctggagatgctaaatggaaatccagcattgcatacccttagacctgatcacataccagtaaaagccttaatttagatgttagttgtatgtgttggacagatccttgcaaaagtgtgtctgtctattagttgtaaatttgaaaattataaatctctgaatctgctactatccaagtttcatcccttttgaagatgaggcatgagcctattaaaatatttataatcatttttcgtcccctactgcaagacttttagattcttacaaatgattactacaggaatagtggccacttaatgtcagttactccggtggaagaatttatctagttttttttcttttcttttttggaaggatggtgtgaaaaatagcaagattagagaatgagttgtatagttttttctatcacatttcatctaaaatgatttgaaggacttttgaagatttttaccaacatccttaaatcaactccaggttggatgaacaactgatttaaaacaaactaagagaacattaactagatgtgggctttttaaaatatataggtattgcatttcctaccttgttatttattccactttgaatactttagagggcttaactttcaactctttaaggtagtaatggatagttttatacttgttctcacaaaattgttatggtcagtttatatcattgctccatgcattgattataaaaattcagtattaattttttctgatcttataagctttataggagttttcttttctcttataaagtgtttcaccttatgtaaaacaaatgcctgcttgcatattggaagatgttgaaattagttttagacaaaagtggtccatcaattcagacactctgcttggatgccttacccttttcattagtgcattctttgcttctgaaacttggcagaaactcgttagccagtccactgcctttctgacaatgtgtggagtcacgtatgcttggtatatgcctttactacttttaaagttctacagtttattacttgcccaagtgttactaaatccttttcttatgtgtactggatggagaaaaaattatagccagcactttgagaggaaagttttcagaaacaatattaactggcactactaactgaaggccacaggagatgctatcaatgttatttgtaatctgaagattgaacaaggctgtgaggctcatttcaaactattttgaggtgttaaaatatatatatgctgtttctcagctgttccactcaaaccgtgttaggactctcaaaggtaaaatgtcacaggggcttttcagttgttacagagctcagcagctgtggttgcccctgttctacaccaatttcagttcaataaaaatgttaactttgcaaaaaaaaaaaaaaaaaaa

SEQ ID NO: 28341 - DNA, 8019 bp, Homo Sapiens
gggagaggccgaggcgtagcctaagcgtgggattccgcgcgtgcgctcggctccgcctggtgcggccgcggccgggagggactggattatgtcggccccgtttgaggagcggagtggggtggtaccgtgcgggaccccgtggggccagtggtaccagaccttggaggaggtgttcattgaagttcaggtgccgccaggcacgcgcgcccaggatatccagtgcggcctccagagccggcatgtggcgctgtcggtgggcggccgcgagatcctcaagggcaaactctttgattctacaatagctgatgagggaacatggactttggaggacagaaaaatggttcgtattgttcttacaaagacaaagagagatgcagcaaattgttggacttctctactagaatctgaatatgcagcggatccttgggtgcaagaccaaatgcagagaaagcttacattagagagattccaaaaagaaaatcctggttttgacttcagtggagcagaaatctcaggaaactacactaaaggtggaccagatttctcaaaccttgagaaataactgctttttttcctgcattctgtggatcctagcagatattgccaacttaatcagataaacagattatgtaatggaagaaaaatgcggatgcctacagttaacagattgcaaaatgtatcttaaaatggttctaaaaattgcattcaaacataatttacataggaaatgtactgtgggaactattctatggatatatggtaaagttgttttggacttgtttttgctcagcatgaagttttatatgctgcattttactaattccatacttaaccatatttttaatacaaaagaacattagagtatagatcatgtgaaatgaagggtgcctttggggaaaattaactttttcttttgataagtatgatattcaataaaattttctaaataggaattgtgtacccctttgtctaagtataacaattcacacaaaattatagtgctgaaaacaattttaataaaggaaaaagtccataaatgtattttaagtaaattaagagttaatgtaaatttcttaattagaatattattacttgagggattactttatgtcaagaagtttaaaaatagttaaaaccctaacaatagaagtggattaacacaaaagagaagtgtgatcatggtaattaggtgagtcctttgtggcagaaagcaaagtaaggtcactaattgtatatcagtggcatcattttgattgtaagtgatttaggcatataggtaggaattgtctatagacattttattcaatatcctatttatgtcctttttattttttgccctttttaactcttgaaaaaattttaaatctcatgcatagaaaagttacagataatttttttctttctgaaccatttgtgatttagttgaagacatgattcctcattactgattactatctgcttcaaattatcttacatgactacaatgcaaccattagaatcaggaaatttacgttgacacattactaccctctaatcctcagatcttcacttcattcacattgaactgattgtcccaataatgtccatatagcaagaggatccagtcagaatcatgcctttcatttagatgtcagctgtctttagtttacttcattctggaacaaattctcatttgtttccttttacaacttagtacttttgacaattatgggctagttttgtagaacaccccttattttgagttctgtctgatacttcatgattagattgaggttattcatctttggcaggaatgtgatagaagtgcatcctgtcattgtttaataatttcagtttgtctcatttctgatggtgtttcttagatgactgattaaggtagtgtctgccagacttctccactgtagttatttttataattatttcttgagaagatagttgcaaaatactaccttgtttctgatcagactttaaatttatcgtatctctataaactcattattttctattttattcagcaggttaaaaaacctattatcattacattggtgctcaaaattattgtacatttggctggtagaagtccattctgggtggcctctgtgtccttctgacacattcccatcattattcaatgaatttgttactctctggcataagatataccaggcttctcatgctgtcctcgacctaacccaagaatcagccatttttccgtagagcctgggttctctttagtgagtaatatttaaaagccaagatctgtgctagtgtgcaattgccgttggtgtgtatatataatgcatgtctttacatctatatttctgcatctatgtatattgaaaaccatgaattcacatataaattctgatcccatgggcttcattttcattttttccttctccacatttataaccgttttcagtaccagtgagaaacctgattcctatttgattatttgtggggttttttttttttaaggtggagtttcactcttgttgcccagactggagtgcagtcgcgcgatctcggcttactgcaacctccgcctcctgggttcaagcgattctcctgcctcagcctcccaagtagctgggattacaggcatgcgctgccacacctggctaatttttaatttttggtagagacggggtttctccatgttggtcaggctggtctcgaactccggacatcaggtgatccgcccgcctgggcctcccaaattgctgggattacaggtgtgagccactgcgcctggcctgattctctattgtaggtcatctccccacatgaatgtcttcctcaccctgcttaggcttcgcatcctatgctgagcaggaatgtcctcctcatcctgcctggaccctaatacctcactccaggccatggcagtccattcaccctgtgattcctatcttgctcattttaggaatgaattgtcgggggaagaggctatttttcttttaattttattctctttgacatttaacaaaattttttgagtaaagtaaaattaacttttttggtgtatggtttggtgaattttaagtatagatatgtgtaaacacctccacagtcagagtattgaagagttcaatcaccgtaaaaactctcgtgctctctttgtactctacacaccctactcccagcccctaaaccttggaaaccactgatctaatccccatctccatatttttgtcttcaagcatgttataaatgggatcatatataattaagaaaaacgctttattgtaacaacatacatttcacccatttaaggtgtgtaattcagtagcttttagtatatacacagataaatgcaaccattccaataatcaattttagaatgttttcatcacctcagatagaaaccttgtatagtttagcttttatccttctcctgtcatcccccgccatccatactacctcttttcatctcatagatttccttattctggacatttcatgtacatggaatcataatacgtggtctttggttactggcttccttcactttacatgtcttaagaggttcatctatattcgagcatgtatcagcacattcattagtatgtctgaaaatacttcattgtatggctgtagcactttgtttatacatttgtaagttggacattttgggtatttccaccctttggctgtcctgactaaagctgctataaacgtgtacaagtctttatgtgcatatgtgttttcatttcttacctaggagtagaatttttaggttatatgataactatgttaatcatttgaggagctgtcattgtttcccaaagcagctacatctttttactttcccaccagcagtgtatgcaggttccattttctctgcatccttgccaatacttgtttacctgacattttgattttagtcactctagtggatatgaaatgggatctctatctagttttggtttgctattctctgatactatgttgagcattctttcttgtgcttattggctatttgtgtatcttccttaaagcagtgtttattcaaattatttacccatttttttagttgtcttattgggtagtaagagtctttatatattctgggtacaagtctcttaccaggtatatgatttgtaatttctcctattctctctttactttgttgatagtgtcttttgaagcacagacttaattttgatgaagtcttatccatcatgccattggtggatcatgtttttggtgtcatgtctaggaaccttaaccccaggtcatgaggaatttttcttttttctttttttgactcacattctcactctgtcacccaggctggggtgcagtggcacaatctccactcactgcaacctctgcctgctgggttcaagtgattcttgtgcttcagtctcccaagtagctgggactacaggtgtgcaccaccactcccagcccattttttttttattttttatttttagtagagttgggatttcaccatataggctaggctggtcttgaactgacctcaacggatctgcccgcctcagcctctgaagtgctgggattacaggcatgagccaccgtgcccggcctatggatttttttcttctaaaaattttataaatttagttctacatttagatccgtgatccattttaggttaatttttgtataagctgtgaaatttaggtaggtttatttttttgcatatggatgttcagttgttttaaaatcgtctgttgaaaaactctccattccccattgagttgtcttttcacctttgtcagaaatcaattgctatttatgtgagtctggttttggactttattccattgatctatgtgtttatcctttcataaataccagattgccttgattatcacagctttatagtaagtcttaaaactgggcagcatgattccttcaaaatttttttgaaatctttttcaaaattgttttggctaatttagtttctttgccttccatatgaattttagaattagctactctgtatctacaaaaaatcctactggggttttgaatgcaattttgtgtcttccaatccatgaacatgaggtatctatttaggacctctttcatttcagttatcagcattttatgtcatttttcagcatatattccacagtgttcattttggaggaactattgttaagttgtattatttttgaaacatgggtttccaattgcacatcgctagtatgtacaaatgtgtttgatttttgtttgttgaccttgtatcctgtgaccttgctaaacttcattagttttgggagttattttgttgttaactcattaagttttctacataaactacgaatagaaacagttttattttattctttttagtctatgatttttcttgcctgattttgttgttaactcattaagttttctacataaactacgaataggaacagttttattttattctttttagtctatgatttttcttgcctgattgcagtggccagaacaataacatggagaaagtggccatctcagtcttgttctggatcttaggattttgaaagcattgtttttgaccattatgtatgcaagctgtaggcttttcttaaattccctttgtcatgttgagcaagttcccatctattaatttgttgttagcagagtttcatgagtggatgctgaattttctatgctctttctgtatcagtttggtcattctttttgtttagactgttaaaatcatggattttactgattccagaattttgaaacagcttatatttcctcccaaccccaaacttggtcatggtacattattcagcttatgtatctagatttttattttttgaggatttttatgtctgtgttcattttggatattgtgcaattgtttttgtttgttttttccttgtgttatctttatcttggtatggtatcatgttaattctggtcttgtaaaatggattgcaaagtgattattctttctggaagagatttgtagaatttgttatatctttaaatgttttatgaatttgctagtaaggttttaaacaatggttcaatttttaaaaatagagaatttattgaggtttatttaagtttgggtactgtatgcctttcaaggaattggttcatctaatcctatgtgcatagagttgttcatggtattttctttgtgtcgttctaatgaggatctatactgttatcttttctttgattcctaagattggaatcaaagattggaattccttctctttttttgtcaattttgccagaggtttatcaattttactgctcttttcaaaaattagttttttgattgttttctattaatttgtttacaattgcatttattttctgcctcttttttttttttcttctttctgcttgctttaggtttagtttgggcttcttttttttgtagacaggtctcacttcatcacccagactggagtagtgttatgatcatagctcactgcagcctcaaactcgtggggtcatgatcctcctacctcagccttctgagtggctgggactatagtggtgtgccaccacacccagttagattttcctactttcttaaagtgggagcttagagtgttaatttgagaactttttcttgtttagtaaaaagcagtcgattgttataaattgcagcaccagcatggctgcattccaagcacggtgatattttcatttattttaaaatattttttaagacttccctgtagtatcatgagttatttagaaatgtgttgtttaatttccaagtgcttggagattttcttgctgttactgatttctagattatggtcaaaaaacatattttatatgatttcatctcttttaaatttgttaaggtttaagacccatgatgtggtttatcttggtgagtgttccatgtgtacttgaaaagaatgcttattctgctgttttaggtagaagggttttatgtcaattaaatctagctggttattagtattattccattttcctacatctttgctaattttctattaattctatggactactgagagaggaatgtttaagtttccaactgtaaatgaagatttgtccagtcctccttttaatgctaccactttttgcttcatgtttttttttttttttttgagtcttaccctgtcactcaggctggagcatagcaactctgtcatgcttcactgcagcctcaaactcctgggctcagacagtcttcccacctcaggctcctcagtacctaggactacagatgtatatcactatgcctagctaatttttgattttttgtagagatagggtctccctatgttgagtaggctggtcttgaactcttggcctcaagcaatcctcccaccttggcttcccaaagcattggaattacaggaatgaatgagtctctgtacctggtctcttcatgtatttttaagatctgataataagtgcttacacttttagcactgtcttggtgaattttatcattatataatgtccctaattatccttggcaattttggttgttcctaactctactttgatgaatataaaaatggctttttaatttattttttgagacaagagcctcactctgttgcccaggttggagagcagtggtgtgatcttgtctcactgcctcacaggttcaagcaattctcctgcctcagtctctggagtaactggtactacaggcatgcgccaccacacccagctgatttttgtatttttagtagagatggggtttcaccatgttggccatgctggtctcgaactcctggcctcaagtgatccgtccaccttggcctcccaaagtgctgggattacaggtgtgagccactgcgctcggccttaaaaattggcttatcttttaattcatcttgactcatgtttactgttttttggtttctgaaaaatagatttaataaataataacattttatcaaagttattagtatagagaaataaattgagtgttgttattattctatgatcatgatgacagcacagaagttaatgtggccagcatatagttttgattaaaaattatacaagcgaaaaaaaaaaaaaaaaa

SEQ ID NO: 28342 - DNA, 1632 bp, Homo Sapiens
ggacaattcctagaatctatagtagtatcaggatatattttgctttaaaatatattttggttattttgaatacagacattggctccaaattttcatctttgcacaatagtatgacttttcactagaacttctcaacatttgggaactttgcaaatatgagcatcatatgtgttaaggctgtatcatttaatgctatgagatacattgttttctccctatgccaaacaggtgaacaaacgtagttgttttttactgatactaaatgttggctacctgtgattttatagtatgcacatgtcagaaaaaggcaagacaaatggcctcttgtactgaatacttcggcaaacttattgggtcttcattttctgacagacaggatttgactcaatatttgtagagcttgcgtagaatggattacatggtagtgatgcactggtagaaatggtttttagttattgactcagaattcatctcaggatgaatcttttatgtctttttattgtaagcatatctgaatttactttataaagatggttttagaaagctttgtctaaaaatttggcctaggaatggtaacttcattttcagttgccaaggggtagaaaaataatatgtgtgttgttatgtttatgttaacatattattaggtactatctatgaatgtatttaaatatttttcatattctgtgacaagcatttataatttgcaacaagtggagtccatttagcccagtgggaaagtcttggaactcaggttacccttgaaggatatgctggcagccatctctttgatctgtgcttaaactgtaatttatagaccagctaaatccctaacttggatctggaatgcattagttatgaccttgtaccattcccagaatttcaggggcatcgtgggtttggtctagtgattgaaaacacaagaacagagagatccagctgaaaaagagtgatcctcaatatcctaactaactggtcctcaactcaagcagagtttcttcactctggcactgtgatcatgaaacttagtagaggggattgtgtgtattttatacaaatttaatacaatgtcttacattgataaaattcttaaagagcaaaactgcattttatttctgcatccacattccaatcatattagaactaagatatttatctatgaagatataaatggtgcagagagactttcatctgtggattgcgttgtttcttagggttcctagcactgatgcctgcacaagcatgtgatatgtgaaataaaatggattcttctatagctaaatgagttccctctggggagagttctggtactgcaatcacaatgccagatggtgtttatgggctatttgtgtaagtaagtggtaagatgctatgaagtaagtgtgtttgttttcatcttatggaaactcttgatgcatgtgcttttgtatggaataaattttggtgcaatatgatgtcattcaactttgcattgaattgaattttggttgtatttatatgtattatacctgtcacgcttctagttgcttcaaccattttataaccatttttgtacatattttacttgaaaatattttaaatggaaatttaaataaacatttgatagtttacataaaaaaaaaaaaaaaaaaa

SEQ ID NO: 28343 - DNA, 4394 bp, Homo Sapiens
gtcacagatgacctggactgactgaatgcttttgtggtaaggaactgatctggccattttcatataacaaaaatcaaagtcaacaattttgtatcaggctgcctaaatgaaccctattgtttccagttcttaaaaatttaagggctatctaagaaaagtttaagcaaaaccctcattccaaacatgcgaccttataataagaacttcctttaaagatgagcagcaaggttgggtatctgatttcactaagtaatattctattgtggtcagaaatgggtaatttgcatcatttggtcactatcaatatttgtgttggagtctgcaagatatttcaacaaagtaagccaaaccactatcttaggggattgttgctggactttggaatataaggctgaacagtgatgtgaagtcatgtttgggggctggaagaagtgataaatgcaaaggttggtgctaaattaggaaccccttgaaggagcaagctgattaaaaaaaaaagctggcagacaagtatatcttttaatttatttgcagtgttgctatattatagagatgatttcctatgggaaaacccatcaaaaagccaaacctttattgttatttttccttaaaaatactgagctataagaagattcagagagtggcattaatttgggcatcagaacattttcttttgtatccctagtgttattgatttgaaagagttaccttttcagacagatggctgaacaaaagtaaatgattaacgggaaatttgatggttgagaaaaaggaacgatatgcctaaagcattttgagaatatacccctcatccatcagccacctctgggtaaagaaacacaaataccaaagcctgagctccttaaccttttgttccagagggcagacatttttaagaaaggtgaatgttagagaaggttacctgatgagcaagcttctttcccataattcagagaactgtgaatgtacttagaaatacactacaggtcttcaccagatgaactagattttataattttaaaatataatactgaaagctagtttgaagtttcagaagccatgaattatggggaaggagtagttttttattttattttatttttctgatctcaagttgtttgtcctgttgtatgttcaatacttggggagataagagcgaggtacagctgtggttttcagaccatattcagtggtgcccctgagggtctcttgtgaacagaagggaaaaagagtgtgatgaaggtgaactctgcctatctgaacctctgtcaacctccagtcagaatatctggcttctagtattgttccttttaactggaagtctctgtggccattaaaaacttgggaacgttggattaaatgaccactttaggactttaaacagtctcaaatatgggaaattttatagccaaccatggctgtgagtccctggcttttgccgtactgagtatgctcacagagatagggagataggtggccagaagacagggtcatttaattttaattgagcataaatcattttgaaagaaaaatgcaaggaattgttgtatgacagccatgcattatagatccttacatgcgacattttcctaaagtggttgagaatgacctgatctttgttcaccgtctcagtgacaaggcgtggagtgactgggctcttcatatgcagtgggatttttgcatctctaggtttgcagaggcaggagttaccgtttttgttcattgacctatcagaaaaaagcaaatcctttggacaatgttgacacggacaggggtacggtctgagactcaagctaacagagctaccccttgctgcctttgcaaaggtgttgtaggtggagaagggtaatggaaacctggtacagcctttagaagttggaagctatggtggtgtatctgtcatgaactgcacacaagggaatgcttaaacaccagctgagtcatatcaggtgccttgtacacacacataaagagtctggtgaattctgacagtgttctgtttgccactagagcaaatttaatagctggggtttcacagcaactgttttagaaaactatatgtgccaaaaatttacattgggcagcagtttatagtgttcttggccaatctgcataaaagccacttgaggaggtttgattaagaaaattgtgtttatctcctgtattacctctgtgtttgatttattctttagtctcaaatttattttctgagtgggctgattttctatatgaactgaaatgatgttttaatagaataataggtatttttagaggaaaagtatttttttgtgtaatttgcttacacaactaggacatacttcctatgatactgaatcatcaaattgagtcatttaaagctgaaagaggtgttaggaatgtagtttcacattatttaaatacatgaacagttttctatatattttgtgaaaatcttgatgagacactagaatttctttatggaattgaactttacaagaattttaataaaagaggtggatttcttcagctttctttgtgcttcagtttcatagctgaaaatgctgcttccgtttattaatatggactttgtaaggaaacacaacaacacgttttcttaccttctgtaaattttgtgatagacacatgttatttgtatatatgattgattgtttgcctgttgcaccctaaagttattttcaaaccatgtttattgcaaagagagcctttgggcaagtggaaaatgccctgatgctagaatgaggtagttccataagctagttaggagcttgctacctcttcttggtacctgaaatattctgaaaggatatcggagaggtcctatgcacccctgtctttcaaaacccacctccagcacttcaaagtagtgtctctggagagtttaaaataaaagaatgaatgctattcagtggattccctcattgaggctcccatctttcctgccaggtgcagctttttctggttggaatcatctcttctttacggattgccgcattgtctctttgtgaatgaggcaggctgaactgtagagcatgaaactcattagaagtttataaagtaaagacctgtaaagcatgtgggtggaatgtttccatgctcttgaggtgaatattaaatttaaattctggcctttgggaactctttgcttgtgagctgaagaaggaaagaaggagttgggggtgtatatctaactgtgtttttctatatggaaatatatgagcatcaagtgataacttcaataaggcctcaggattgtatttaaaatacctgttttgtgggacagcatgcctttgttttctttgcctgttggctttggtggctccaaacattttcattttaggctagctttcctgtcacccaggttgtgtgcattttttttttcatttgaactattgtttatcattattaatgatgttatctccaaatcccaaagccaaggaaatagccagtatgcaggacttgcagtagatataagcattggtgttaacataggttaagttttgttagtgttcccagaaatatactgaattgagggataatgtagctttaaagaaattatgtttctttttaacatttggagaagccacctgtcctgggtccctattcttgagaaattcatcttttcatgcaaataacattgatgggggacaagactggatgattgacttctatcagtcagtagacaaggaagtataataattgccaaaggtgagggtaattttgccttacaagtatgtaggtcattctgtggtgggatttcccatcacatctagtaaaaaacaaccttttcatttccctcctttctaatccaagatcatatttttaaaaagtaggtttctgatgtgccatgaaatatttctgtgaatctgtgtttttgaccaaggaaacagctgagatattaaaccatgtggttgttccacggttcatctggctaccgttctgggtcccctctggccacctcaaaaagaaaatgaaattgggagattaaatcaagcttggcctcctcttttaatgaggaactttcacgttgacttcctatctcaggatattcttcagtttcatactgctgaggagaaaggaacaagctgcagacactgtaactggtctccagatgtgtgtatatgcgtgtaaaacttcacaccgtgtgtgttgtgttcaatgttgtgtcaatctacaaactgactcaaacaacagtttaacgatagagaagacagtgataatggcaaaaaaaacacccaaccacctttttccgtcaaagtgcttgctatggctttcatagctgggacaagtaacattaagtattcaggagcaaagtgttcttgaaagaaaatggtgtgttgatctcataagaaaatgtacaaccaataaaagacattttaaaaaaaaaaaaaaaaaaa

SEQ ID NO: 28344 - DNA, 3570 bp, Homo Sapiens
ccttcatttttaaaatagtttttttattgccttcagtgaaacatgctcttggttttcctcctatctcatttgctgttctgtcatatttctgtttgctgttcttcctctcacttttcttcaaatattggtgtacttttttttcttttctagactccatttttgtttaaccacactctccctagatgattttatcaaattccatggatttaaatatatttgtaagcacattcaaaattagtttgatttcaaccttgtgttttgtatctgaatgataagcatcagcattataactaaacagactgtgtggttaagattatggacagtttttccctctagttatctaattttcataattacccccagaacgtgagaacattatttttatgatcagaaagtattttaagaaactagttgagtggactctaatatggaaccatcaacatgtatcaaattccacttaattataagcaaattcattatgaaattatatttaaaaaggcatttcatgattacatttgttatttaagaaaatgttatttaaagaaatttacataagtttcattatacatgtattttagcttactcattctggaaatggaaaacttagatactaggcaagaaggctttagattttttttatgagatattttaatagaccggtacttaggtcttaatatttgtgtttttcaaaaatttatgttaaaatcctaacccccatgactatagtattaggagatagggccttttggaaggtgactggagaggggcagcaccttcaggaatagaattagtgcccttataaaatagacccaagggaactttttcatcccttacaccctgtgagaacatgatgagaaggcaccatgtatgagccagagaatagatcctcaccacacactgaatctgctggtgccttgatcttggactttctagcctccagaactgtgagaaacaaatttctgctgtttataagctgtccagttaatggaattttgttattgtagcccaaatatactaagacaacaaccaatatagttaaaattactatgcatgttctactttatattaagttctagtgtacgttgtataatgcttacatcaaataaaaggtaaggttaatttacataaaacatgtttaggtaggataattgtaaaaattatttattagagaaattggtaaaattgtggctttgcatagaggcaggagaaagaaaagagcaaggcactagtgagaaaaattgctatggagaatattgagaatagatacaaggagacctacaggtttacaacattaatattggccaatacttgattggacagtttaaatttttcaacctgaaaggcctttgtgccccaaagtttggtaaggagattttgtaaaaacaaacaacaatagcaataaaaaatcagggaagattaagagatttcataaggagcaagaatttataggtaatacttaaaaggtataggtatgattactattttggtgaataataggcacatggtagactgaaattcggcaacagctactgtgcaaataagcatatctgtgattatggcttatatctggttggggacccctgttgtaagccattctttttagtacaggttaagctccatttctcaatcacagttctgttattttcatctgtgggaaataatgaattctgtttcagattttgattgtcttttgtgttctttgtcatccaacagaattgcacatttcactttgtaaaatttttataactagtgtttgacacttgaaactggcttttgagtcttctataatagtttgtgcagaagtctgaggtttaatgttatgatggccttattcatactgtagaaatatatactgcagcaatatgcacccaaatggtcaaatggtcagtaagctttttaaatgaactagctagatttttagttttgattttaattcttggtttgaattgctaaaagctatcttgaccttaggaaaatgaaagcttacatgaggtttagccacttaaaacaaagtatttctttgtgtctccagttcatgtgaaacctgacttttatttacaatatttatgttaggagcacttttattaggatcttttgaagcctttcaagagttttctttcagttattattaatagtactaataaagaaggtgagcaggatttaaagctgaaaggagcatcagagataattgaactttgtttatgccattcattgttaccctatgcaatgtcttttgtttgtttttaattaattgccaatatttaagaagagggtcatagaacagtcattattccagattctcttgaaaaactggaagatctggcaactacaggtttatgttcttgcatgttaacaatatacaggggctggaattaacctgctctgagtccctttagatgtgcatactctctccgatttgccacagttcccaccaattcttatttctcctctctttacttggcccacatcattgggcctatctcattaatttctattaaatattttattactgaggccattagtttatgacccctgaggccaagacagctgttaagaacttgcattactggtggcaaaattatacctttacgattacttactaggttttagaaatctcacttttctaacaagaggtattatggtaatcataagttcaaaataattaaagttcatttgagataattaaatcaaaacctctagtctgggttggagggtgataaagttatctggcgaaatatatgaacttctgttaccttcctcttctgctaaatgaatggtaaaatgaatcctgatttgtttaggcagtttacttatgaagttgggagaatttttttttttctttaaaggactgagtctggctctgttgcctaggctcaagtactgtggatcttggctcactgcagcctccacctcttggattcaagcagttctcctgcctcagcctcccgagtagctgggagccaccatgtccagctgatttttgtatttttagtaaatgagttttcaccatgttggccaggctggtcttgaactcctgacctcaagtgagctgcctacctggcctcccaaagctctgggattataggtgtgagccactgtgccaggcctgaggttgggagaaattttgtccatttctttagaaccaaaattggcaaccagagagtatttggatgttacacaaaatatttagtttccctttctagcctaaattgggttgtttatagcacccgtctctccatttgagaaaaatggttaggatgctggtgcagggatgaggccttattaaaacagagaaggtacccaaatggtggttcaaacacaggctggctaataagctgtgaggtgacttaccaaaaaacaacaacaacaaaaacccttgaacttctgctttcaacttctactttatgctagattatttggtccaatcttcctggtctaacacctggctacatataacaacaaacatctgcttgaatgtgttggaaaggtgatgattaattgccaggctgatatattaaataaaatggaaatctcaaaagttaaaaaaaaaaaaaaaaaaaaaaaaaaaaa

SEQ ID NO: 28345 - DNA, 9868 bp, Homo Sapiens
ggagttgggagtgtcttcagccctaaggcagcatcagagatcataatcttctgctctcgtggcaagaaatttgtgcggatagagttgatacacctcacttgaagttggcctggagaaaagaggcgtcggactcctggacggggttgggaaacggtcaccagtttcggctcaaagcagcctgtttccaggagaccgccatggtcgaggcagcgtcctggtcccacggtgcggggccggacgatcatttatgggatataaataaaaggactatgaggtggtaaataaaagactaccaactagaagccatagggagtcatttgaaggagaaataggcacggctcatctgtggttgagggaaagggatcttgaaagatgattaggagaacttgggttctggggaaagtgcgggaagacattctggcagagaagcaaacgtgaggaaaggtaagaaggcaagaatctcccattacaaagggtttggtgaaaccctttgcctgtccttttcgctcccttcgggagcagtcggcaataagctggaagggtaatggggtgaaaatgcccgtggtcagttccctggctctgcgactcactagatgtctgacaataaacaagttacttagcttctgggagtctgttttcccgattgtgaaatggggatactatatttgttctagagatataaaatattagggtttgcttgcgaccgttaatatcaagatgtgttcagatgtacgaagggaatggatatctgttgggtacacttgatgtgagtgatttttttttttttgagacggggatcttgccgtgttgcccaagctggtctggaactcctgggctcaagcaatcctcccaccacagcctccccaagtgctgggattacaggcatgagccaccacaccaagacgatgtgagtgattcacttgatgtgaatgttgtatttcattgaatggcctgctcttcagactcatatctcgtcatgacctttacaacttctactacttcctgtgtccctcaggaacctagcttttttttttttttttttttttttttttgagacgtagtctagctctgtgacccaggatgaacctcactgcaatctccacctcctgggttaaagcgattcttttgcctcagcctcccaagtagcatgagccaccacgcccggttaatttttgaatttttagtagagatggggtttcactgtgttggccaagctggtctcaaactcctgacctcaagtgatccgccctctctcagcctcccaaagtacagggattacaggcgtaagccaccgtgcccggccttgctaactactttttgtctttcagtctttctggttatacgttgaaagttactttgaggaaacatttgatcttgcagactgggcagccttctggttgcatcctcttagaacaggggtccccaacccttgtactggtctgcagcctgttaggaaccgggcggcacagcagtaggtgatcggtgggccagtgagcagtaccgcctgagctcctgtcagatcagctgtgatattagcttctcacagctcaaaccctattgtgaactgggaatgtgaaggatctaggttgctcactccttaagagaatctaatgggaaatgtaatgagcttgaatcatactgaaaccagctgtccaactcctgtggaaagattgtcttccctgaaaccggtccctggtgccaaaaaggttgggagactccctataggactccacttctgagcactgataattaagggttatctcactctgtatggactatagttctgaggccaaggaaccgtatttaccttgctcactgcagtatccctaggatctagcatactgcctggcacatagttggcattttttgtttcacattccttgcctaatcttgagttccttgagggcagaaactgcccagctcctgatatggcatatggtgccctgccatatttttgtctggtccttccagtatatacaatgcaaagagcatgaaaggtggcttgaactctaggtgctggagggtgtaattcttgtgaattagtaaaaatcatgagaagagctttagacttttactgactagaattgtcacaggtttcaagccagttatgtttagatttcagggggtgggggctccagatgacatggtatacccaaaatgttgtgtgagaaaattgggtatacccaaaattttgttgtattttgttattctgagaaaatgtagattccactgtattctccaaaggtgtttatatccaccatcccctcccaaaagttaagagccactgtcctagtagtactttttagaacattgactttatataagaattggcaattttcgtttctatatcattctaatcctatatactttgtagcttttagaaatgctcagaattctgctgctgtggacttgtttctatttcttatgtcattttaatggagttttgtggcaaacagcctataaatatggggcttaacctgccatttttgaaacaggaatcttccaaaccatagtggtgttttgtttttttttttttaaataacaaatttacatctcacattgtgaaggatggaaagattgtctggtgaggggccactctgattcatagatggcatcttctgttttcacatggtgggaaaaaaaccagactgatctcttaaagcatgtatctgatgccactttcctaccctcacgataaaatccgaactccaaagaagagcagtaagagcttttgtgatctggcctctgcttgccacctccccaactcacataggtctctatacttatttcctagcccccttgcatgctattcacctctaacttccatgtagttatgtgtccccctacctcctggaatttgcatttttattcatctgacaagtgtttgtcttgtatatgccagtgccgtgtattacaccagttgctgtgatacagctgacaacaaagaagacagcccagtgtaatacatttattttctagttgggagagatgggtaataaataaacatgtactatgtttggtggtaataagtttgctgaagaaaattatggaaaggtaagagagattgagtatagactgtggagaattagtctttttcattcacagtatacaattgttttctagagatcagagtccttcctacttttgtgtattcacaataccctattgttaattccatattaagactatatacggtgttttgaaattgtctgcctctggagacttccaagattcattgagagcagaaggttaattttgttcatctttgcattcccagggtcttatatatacataataggctgtatttgttctctaaaaaatacagaaccaataggatatgtacagattatgagaaattggctctgcaaaatggaggtgaagtcccacagtctgccttctgcaggctgaaggcccaggaaagccagtgtagttccaaacccgagggcttgagaatcaggggaggcaataacgttaagtcctagtctgaaggcctgaggaccaggagcaccaacatctgggggcacgaaatggatgtcccagcagttcacccttcttccccttttttgttctattcaggccctcaatggattagatgacgctcacccacatgggtgaaggcagtcttctttactcaagtctactgattcaagtgctagtctcttccagaaacaccatcacagatgtacctagaaatgttgtttgaccagctatcaaggcatcccgtagcctagtcaagttgacagaattagccatctcatcagtatccacaatgtatttttatattaatggatttagcctgagaagcttccatgtacagtatctttttttttttttttggcgacagattttcgctcttgttgcccaggctggagtgcaatggttcgatctcggctcaccacaacctctgccttccgggttcaggcgattctcctgcctcagcctcccgagtagttggaattatgggcatgcaccaccatgcctggctaattttgtatttttagtaaagagggggtttctccatgtcagtcaggctggtcttgaactcccgacctcaggtgatctgcccacctcaccctcccaaagtgctgggattacaggcgtgagccactgcacccagcctcatgtacagtatcttatggtatcttgtcaactcagaggcaagcagaagaaataagacgtgagccaccgcgcccagcctcatgtacagtatcttatggtatcttatcaactcagaggcaagcagaagaaatatttagctccattttataacttgatttccattccactattttcattgtactgcaatgtgagattaacaattccaccccaagtatttgaggtgtgggaagctggatgtaaaaacaccattaaaaacaactcttttcaatggctttctaaggttggctgggctgaaatggcaggttgtggatgctccgtggcacatcacactgcccctttcttcatattagaaattaaatcagccgatggcaatattgaattccaggtaattttccttctttctttttttttgaaacagagttttgctcttgttgcccaggctggagtacaatggcgcaacctcggctcaccacaacctccgcttcccaggttcaagcgattttctctgcctcagcctcctgagtcgctgggattacaggaatgtgccaccatgcccggctagttttgtatttttattagagactgggtttctccatgttggtcaggctggtctcgaactcctgatctcaggtgatccacctgcctcggccacccaaagtgctgggattacaggcatgagctaccatgcccagagaattccaggtaattctcatggtgaatgaattccattcatactgttgttcttcagtctgccaaatggatattacataacacatttgtgtgccatgatgggccttacatatattgactcatgtaattctcacaactttatgaggtggtattagtcacattttcatttcatgaaattgaggcacaaaaaaattagacatgttgaagatcatacatcatccctcacctgggctacaatagcctcttaactaatctctgcttctcctcttgtccacacaacagccagagaacctttaaatatgttaagtatgtcaagcctctgctcaaactgagtttttcctgtcacacttcagtgtggcctataggccctaagtgatgtagcctttgcttatattgtcttccactctcatccttgttcacagagctctagcaattctcatgtttggaggtcctcaaggcaaaactcagctttatttcccattcccttagtatggaaagctatttccctatctgtgtgtcttgcttttacatcattgctctgctctcctcaaaaaccttcccctcttatccccatcaccgtcctcattttgattcttcatatacatttatcctttcctgattttatactgtttacctttttatggtttgttttcccctctaaaacataagttccatctggacaagggctttgctcagtcctattttcctaggccctagaatcaaaccagtattgggtgaatggatactgaatgaagctttacctaagtgctttgtcttttacttagtttcagtggttaaatctcagaaagcttaacagcaattctaagcatgtctttatcataaaaggttaaaaactgtattattgggatattttttctctttttatgtttacctacaagcccgtagaaagtataaatactcaaaagatagcagaccaggtaggcttaagttacttttacaaaacagtagaaataccttcaaatatttagcactgatgaacttactactgaggacatgtggactctactaagaaactaatgatgaaattcataattgggtgtggtagcacatgcacccagctactcgagaggctgcagcttgagtccaggagttcaaggctgcagggagccataatcatgccactgcactccagcctgggagacagtgagaacttggctcttaaaaaaaaaaaggaaaaaaaaattgataacgacaatttgtaatggtcagtcctatccaccagtctaaatgaaagtttaaaaattttcatatactgcacagaagtagatggagtcttaatgctaggtaagggtaaacaagctgaaatagcagtcagtgacttcagagaccatgaaaccaaagttaatcttctaagtccttttaattgttcttataaactagcataagatataaacttaagtagtacacatgagttttataatttactaatctctgacagatagctaagcatagcacatcagagcataacgcagtgtgagggaaataaagtgtacaatgacatcttctattctggacctaataattcaatagagaaagaactacttgtagtcactgtggttacagaaggtttcatggacagcgaacataaagctctactagctaacaaataggtcttaatgataaaaacgtgggccttcagagaactaaaggtaccaatgtgtggcagtccaaaattacgaggaaaatgagttcccttcatgggtcacatcagcaattttttttttccccttttgagacagagtcttgctctgctgcccaggttggagtgcagtggcatgatctaggctcactgcaacctccgcctcccgggttcaagcaattctcatgcctcagcctcccgagtagctgggattacaggtgcctgtcatcacggctggctactttttgtatttttagtagagacagggtttcaccatgttggccaggctggtctcaaactcctgacctcaagtgatctgcttgcttcagcctcccgaagtgctgtgatcgtaggtgtgagccactgtgcccagctacctcatcaattcttaatctataaaccatggataggcttcgggagaacccaagaaccaatgaaatctgttggtaagttttatgtgtgcggttttctacagagagggtcaacagcatgtatattttcaaagaagtctgtggtgcaaaagagagtttattgttagaagtccttgggcaatcaacttggaaaagggtggattgagaatgggggctgtctagatcaggataatgttgaatttgaccctcacttgaggcttttgtacagaggatgagaagacggtaaattcaagggttaatcagaaattaacaccaacatgacttggtgatgagtgagatgtgaaacgtgagaaaaacatcaatgatgaaatcaagcttctgacttgcaacagtgagtataccaagagctacaggcttggaagatgaataaagttgggagcattctgttttttcatgagtgcccatgggacagacagggagaaatggacagttgaaagtacaagtctagacaggcacagtggctcatgtctgtagccctagcactttgggaggctgagatgggagaattactggggttcgggagtttgagacgaacctgggtgacatagtgagagctcatctctgcaagaagtaaaattagctcggcatggtgctgcaagattatagtccctgttagtcgagaggctgaggtgggagaactgcttgagcccgggagggaaagcagcagtgagctgagatcacgccactgcactccagcctgggcgacagtgagaccctgtctcaaaaaaaaaaaaaaaaaatgcaagtctggagaaatatagctgggagtcagtaatgccagttttagctgagggagttaagatcatttaatcagtgttaaggaagaaactcaatagtagtgaccaccaatacttaaggaaaaaggataaagtaagaggaatgataaaggctggctgaaatatcttggcgtctagcctaagaaaggaggggttagatgctcatgtttattaatatggatctagagaagcatttattcactaatacattttatttgtgttctctaatttaaaattaccttttcatcttgcttgattttccttcagctaaattagaaatttgtagtttttcccctaaaaaattcaatggcattctttcttataaattacattctctgattttcttgtcagcctgcttcaaggaaatccatgtgttcaaaatgcttgctcgcagtttgctccataccaaatggttgcttaacccaaatatctgagcagcaaattgagctgatccttctggagaaagtacggttgaacagccaagacctattggttcagcaaggaaaagacagaaaattgagctcaattagtaatgaaaatacaaccttacaaaaaattttatactcagagcagtcctgccacagaaaataaaaagctactgcattattctaatctaaagtagaatctgtacaactgtctttaataccggagtggtaaggtgattacaagaggaaaagcagtcagtattacctgccatgaagagatattttatatatatcatctatcacccttcttatagaactcacttacaaagaaacttatctttttgaaacttctgttcacatacactatccctttcaatccctggcgaagaacaactgaagcaaaataagggtcaaggtaagagtacaaaagtacctgttcttagacaaacttgagctatgttgttttgacagttttctagctaatctttctatctgcatttgaactattttaatatttttgagcagtaaaagtcaaatccgtagaataattttaggaaatgtcaagttacaaataaatattaataagatccaagacagcagaataaaaaagtaacatcctaggggccacatgtctgctcaggcagagtgtcttgaggtggtactattatgtctagtgtttgctagaatcaggggtactattatgtctagtgtttgctatagttccaaaagctcgattttcccgatattcttggaattcatcaggctctttgactcccattatccacaagaacagagtcaaatacaaatcacaaggccaatttactaatttgtattaatacgttattttatggagctccaccccttaatatgtggtattggtcaagttacttcacgttaatttattctcctcttctgtgagaagggaattttaactagtagctacctgatgtgacacttcaatgagttaataacatagataaagtgcttagagcattgcctggtacacagtatgtgctccaagaatgtcaaccactattgttagcacgctaggtagagtgctccactctaatatttgaaataacctgtgcctcctgcccaggactccctttctggtaaaagaatagcttaaattgcagaaaaaaaaaaaaaagttatctagtgagcatgacatcagagatgagaaatatgggcggtcttcaggattttacacaggttactgtaaaactactcctcaaaagattatccccaattctagtgatcattatgtacaagtcctccagattatttgtcactcctgaaacaacactactataaaaactgccaattttttgcttatcatgctccccttttgtaagctccatgggtatctatacaattcctctggcataaatttggttacagctttatttgtagccgctgatttttagcttgagacatttgtataatcacatcttgttaaagatagcttaggcacaaaatttaattctcagagcctataaaaacagtaaaggaaataggcatgaacacacaaggccagataacagcagtaacattttggcaactgaaaggcaaacacagtggtagctaagttagcagaccaagaaaacttaatcaaaattagctggcatggtggtgcatgcctgtgatttcagctacttgggaggctgaggcgggagaatcgcttgaacctgggaggcggaggttgcgccattgcattctagcctgggcaacaggagcgaaactccatttaaaaaaaaaaaaaaaaaa

SEQ ID NO: 28346 - DNA, 4431 bp, Homo Sapiens
agagacagggtctcactatgttgctggaatataggcatgagccaccacacctggccaagaaaatccttttaaatcctttattacccaacattagccatgccaagcagccaatatttctggcttctgaacattaccaaaggtaacctcccaggtgttcagagaaaggaaaatttaaggtggttcatgaaggggaagagaatcaacaaatgataaaggtcacaaagatatcaagccagaaaggactcattccctaagccaggattgaacccgggctgccactgtaaaatggcagaagctaaaacaaagcactgccatgtggttacaggtcacgcttccaaggacgtaaaaccagatggaggcctgcagcaaagtttgccactggccagtttgctgggcttgcttcaacagcaggcctatggagtcctagacccacatcccatcccaaggtacccctctttctgacagaactatacggagagacatgcagagcacaccagcttggctacagcttaagaccaacctcacaaatccttttttattaattaaaactttacagataatataaacagtgatccttatcattccctttctggtttgtttagggagacagaggtcaaaatcctgactggttaaaacaaaaaacaaaaaaactcctacccttttgctgacatgtcaggcttctgagttccctccctgctgagctcaatcccaagccaaccagtttaaggtttaggaaattaacttctcccagtttggaggatacatcccaggagagcatcccacagcatggggacacaatcacccatctgtaaagagaggacagaggaggagaaaggaataagaaggcatttatttaaaggagccccgggactcaggatgcatttgaaagatgtatgcctactcatctagaaagaggggagcaaggcgtccctggttcccttctcttcctagcaaatacccgaggtacatgagggagagaaagcaaggcgtccctctttcttttgtccttgtatccctgagtcccggcaaccatgacaggatgcctcccatgggtgtcaaagtggctttcacccatgttatgtgggggggggggtgggtagggagtgggattatctgctcttacccatatatgccttatcttctctgttgtcaatagcctttgcattccctagacctcatttatgccatggatactagcatgacctttatccatgaaatgaggcttggcttaatccgcagaaattagtcatgcttacctgtgctgtaccttttcacttctgttgtcgtctgcctctggatccctcagatccagttttctttcctagggcttcgatccaaagcttggaattgagtttgggtcaaaataactgcctcaggatgttgcatggactccttaccaagctgaatgctaaggtcaagctgtggaattgagtccttctccaacaagggagagaaaaggggtgtcttctgagttgggatcctggctgagtaaaacatcttctaaaaggaaaaaagcctgtagcgtagagaagccccctctacttgcagggccatgttattgggttggtgcaaaaacagtcacagtcctcgccgttctaagtaatagcgagaactgcaactacttttgcaccaacctattcctggcctggtggagaaaaggaaaggaaaaacagcgtaaatgcagggctttgttaactgctgacaggatggagaaaagaaaaagatgcccggagaacaaaccttttattcttatgcaaatgagtttctccaacagggagagaaacttttttttttttgagatggagtttcactgttgttgcccaggctgcagtgcagtggcacggtcttggctcactccagcctccgcctcccaggttcgggtgattctcctgcctcagcctcccgagtggctgagattacaggtgcatgccaccatgcccggctaatttttgtatttttagtggagacggggtttcaccatgttggccaggctagtctcaaactcctgacctcaggtgatctgcccgcctcggcctcccaaagtgctgggattacaggcatgagccattgcgcctggccaagaaacttttaattgctgtttctaccctggggtttggactgagctggacccctcagcaggaggaggggaagactccatggtatgtggtgtggaacactggacagacagctgcatggggcccttgggccatgggccccagccccagctgggaggggcagggagccaccacttgcctgtccgtcccatgcatgcatctgcagccattgaggtgggggtggaatacccccaatattgtaaaagataagtgccattacagtcctgcaaacagaaggaaaatgccatagaaaaggctgagttggaccaaggctgacattcccagtccctgagagcaatggggtgagggggtgcagtttcctctatcctcagaagaaggctgaggacaagaaagctcaaaaaggaaagggaaacagatttttttggtgtgcattttactcatccctcctcatgtccctgtgtgggccaccaaaatgatgcaggattttttgctccttagctccactaaatctgggttcttgtctcacaactaggaaaaattaggcacacagacacctgtgaaaggtgaggagagcagaatttattaaaagaaagctctcatctcagcaaaaaagagagggtcctgccaacaggctcccacctcacagattgaataccaggccaacacacatgagctgaagaggccaggctcctctcccagcataaggggtgaattcctggtggctccacccccattcttcagtgcgcatgcgggccgttagtctgagccactccacattgatttcccttactgcatttgtgttaagggacagaatttttcaccatgggcatgtttagggaagtaccctgtgcaccatgacctgtgcggcatatggctgtctcctatctctatcagtagtatcagtaaagagatagaaaacctacaaagaaaccgaaaaataattctggagctgaaaagtataataacaaataaaaaatgcactggagggattcaaagcaaatttgaacagagaaaagaatctgtgaacttggagatagaacaatggaaattaccaaatctgaggaacaaaaccatctggggatgcagtccagtaggtctcagccttattttactcagcctctattcaagatggagttgctgtgattcaaatgcctctaacacaagtgagatgaactcagagaggagatccacactgacacataattaaactcttattttttatttttttgagacactctcatcctgccacccaggctggagtgcagtggtatgatcttggctcactgcaacctccatctcccgggctcaagagatgctctcacctcaggcacccaagtggttgggactacagacatgcattagcatacccggctaaattttttttgagggtggttagagatgcggttttaccatgtttcccaggctgatctcaagctcctgggctcaagcaatccaccccacctcagcctcccaaagtgctgggattacaggtgtgagccaccacacccagccataattaaactttcaaaagccaccctggcaaaacccgtctctacaaaacatacaaaaattagccaggtgtggtggcaagcacctgtagtaccagctacttagggagctgaggccaaaggattgcttgagcccaagaaatcagcttgagctaatatcacgccactgcactccagcctgagtgacagagcaagatagtctctataaaaaaacaaataaaataggccaggtgcagtggctcacacctgtaataccaggactttggtaggccggggcaggtggatcacttgagggtaggagttcaagaccagcctggccaacatggtgaagacctgtttctactagaaatacaaaaattggctgggcgtggtgatgtgcacctgtagtcccagctgcttggagggctgaggcaggagaatcacttgaactagggaggcggaggttgcagtgagccaagatcgtgccactgcactccagcctgggcaacagagcgagattccatctcaaaaataaataaataaatgaaataaaataaaactttcgaaagccaaaaacagagaatcttgaaagtgtgaagagagaagtgattcatcatatttaagggctctttaataagattatcagcagatttctcatgagaaacttttaaggctagcaggcagtggggtgatatatttaaagtgcttaaagaaaataactgtcagggccaggtgcggtggatcacgcctgtaatcccagcactttgggaggccgaggcaggcagatcacaaggtcaggagatgaagaccatcctggctaacacggtgaaaccccgtctctactaaaaataaaaaaaaaaaaaaaaaaa

SEQ ID NO: 28347 - DNA, 2445 bp, Homo Sapiens
ggatccggccccggcttgaactagctcagctccgagctcgcggaaccacgcccccgggagactctggcccggccagcgcgggccaggtcttcagtcctatatcgccctgccttgggaaaaggtgcaggggcctctcgccgcctcgtcgggcccttcctctctacctgcctctccaacccctctcggccccgagccacccggcagcgggggtgggtgtgcagaggtgcggcgtccagaacccggctcctgcagaggctctgggtggcagcagccctgttaccgcttagatggcgcgcaggacagagccccccgacgggggctggggatgggtggtggtgctctcagcgttcttccagtcggcgcttgtgtttggggtgctccgctcctttggggtcttcttcgtggagtttgtggcggcgtttgaggagcaggcagcgcgcgtctcctggatcgcctccataggaatcgcggtgcagcagtttgggagtgagtgcggcgcctggatctggcggactgcgaccctcggaagggagagggaatgcggcgactgggaagtggaagggcgaggggcgggagatgctgggggggagacccctgagatcttctcgcagcgccccttccacttcctcaggcccggtaggcagtgccctgagcacgaagttcgggcccaggcccgtggtgatgactggaggcatcttggctgcgctggggatgctgctcgcctcttttgctacttccttgacccacctatacctgagtattgggctgctgtcaggtgagagcctgcacaagggcaggagagtcaaatgcttagatcgttggatgttcacctccttcctgctccctccaaagggttcggggagaagctgagggaaagtttagctagcacctgtacccagaagggaattcttaataggaatgactaaagcgacaaacatggtgaggaattaggaaattcaaggatgatgattacaggcgtgagccaccgcacccggcagagttttataatgaaaaattaactaatattctagtatgaagtgaggaggatactgaacaggatgtggctaaagccaacctgggacagccatggggtggcttggtttcttcactccagtgttgtccctaccatttcgcagcattgatttaggaggctctgggacaaaagagaagccaaagagcagttttcccagttcactcactctggcaaaatcaggaaaaaaagtctgcttttgacatcaaattccactaatttggggcagcgttgggtgaggaaagtattgtgaagacaggcttcttggagtaggggcagccacaattcagtagacactctaggctcggaggctgccactgtagttgccaagctcaggttgggtggttctgtgctgtatggatggaataggacctgggctggtcatcttcatgtcgtttcctctctgtatcaatggaagttcaacccgcccctacctcttcagatagttgtaggccacttttctcttgtaactttggaaaacaaaagaggagaaataagtatcataccatatgcgtgtctccaaagtggatgtggttgcctcaaggcaggtggcaggcaggggtgacctgctggccctcagatcaatggtcgtggcaggtctgagagctgtcccactggccagacttctctccagcagcaaagccagcctggggcttgcatgttgatcctgagcaagcttaacggggtgaagctgggctttctcccccctgtgactggagtgcatgttgacaccagcactttttctgcacatgtatcttcaatccaacaaggccgtttttttaatgctgagtaacaggccaccaagcggctactgcgttatatcttctcagcaaccggccgcagtctcttctgcaccattttctacaccagacctgcttggcaccacagggagctcttttcctgccctgcacaatgacattccaaccaccaccagccagacattacagccaaccttgctgattgtcacaagcaggaccttggggccactggcactgtcagatagtaagccatttcttgggtagaggaggaaactcctctccacaaatccacttgggcctgtgcaaatggcacttgaaagagtccccatgcacttggagtccatgagccaatgggatatgcaaagacgcttaaacatttcagggctggtttctctgttcatatccaattctggtgcttaggaacagggacccatgctgatgcccaagggcaaaaagccccacttcctttaaggaagtgaacaggcctgaccctgatgcccaataacgggcaaccctaggctttttgtttttcttgcttttattcctttttgttgttggccttgtgctgcgtttgtttacaaaagatgtattttgtttaaccaaatattaaaaatggaaaactccatataaaaaaaaaaaaaaaaaaaaaaaaaaaaa

SEQ ID NO: 28348 - DNA, 4700 bp, Homo Sapiens
ggtgtctttaacactctgcctgaattgtctgcaaaaatgtcttttataactggttattcagccagagaccaatcgaagaccccgagttaaatgcgtttgtaacgtgtatttaaggcttaaggcttagccatttgctcactttatgatctaaggcagtttactttcatatgtcatgtcagttttatatggagtggacaaaatgggaatagacactacctattttgtggagctgctgtgagaattaaatgagacagcctacgtaaagcttatagtacagggctaggcataaaacaggcgccctatgtggctctttgcagggcactgagatagatttctttcaggctgagcttcattttcagataaccctgtgaagaaggtattacccccatttaactgatgagaaagccaaggtcaagttagttgcccgagacagcaaacatttttttaaagcactttattcatttagtcttcttaaaaatcctgcgaggtagttggtattattatccctattataatagggagaagtgaggcacagagaggtgaagtcctttcctcaaggtcatcctgtgagtaactgaaggagctgggaatggagcactccagtagcctggttcaggaaggtctctgtgctcttaactaaccactatgaaccattggggtggtccagcctcagtcgttctgactcagagctcgcagcctttctgccaatcatgcttgtccattattcttctgaactggtgacaatctgtcattgccatcattgttctcacttcacttatcttcccagaaaatgctgtgaagcatgaggggcatactgaattaaaatggatttaaataaatttgggcttgagaattctgtgatacacctcaaagataatgggagtagtgcaaattcagagttggttattattggaatgttaggtctatgttaactgaaataacagttgtggaaattaaaccgatacagtgagtattgatccattttctttgtgtttgccttaaaaagggaggtatgtttctaccaggggggtatggttctactatacatgagtagaacccttaaatgttaaaaatatggagttgactgtgcagaattagaatcttgatttattcctcagaaaatccccgcactactggagacccaggcctggaggatgatagcttgaggccaggaaaaccagcctgggcagcacagtgagaccctgtctctaccagaaaaataaaaaaataaaggttagccgcatgtggtggcgcacacctgtggtcccagctactcaggaggctgaggggagaggatggcttcaggccaggaggtcgaggctgcagtgagctgtgatcgtaccactgcactctagcctgggcgacagagtgacaccctgtctccaggaaaaaaaaatcttaaaagtaagaaaaaacaaaaaaaacctgaaaagaccttaaggagcttgtaagctaggacctgtcatagtataaacttaagtgcctagtgcaaggctgaacagctagtgaggtggtagacctggagtggactaagctccatcagctggttgtggtctgggtttgtttccatgggaatattagcaaatgcaacctcctttctaactaaagctggtcccctctgctttcctgtccttttatccagtacaatatatacaaagtggatcagtagcaatacccaaaactattttgccttagcaatttgcttacccttgcttttattctgaaattctcttctttcttccttcacttctccagtaggtgacattctgctcatgcccccagccatctctgagccattgcgtttgggtggtcctttttgactttcccaccataaccccctcctcccagtcaaaatcaagtcaaagtcaaaatgcaagtcaaaatcaatgtctgtgtgtattatttttttccctacattacatggcaattattatttcaagttgggcttatacccagctagattctgcatccgaatttgagttttttggattcaaggttacttctcaaatgcctagttttctagttgttggcccaacaccattgggcacattgtggttgcttaatgtctattgaataaaataatggatttaattattttaaagtgctgtttcatccctactgactaatgcaataattacaattgttgtatttggttaacttagggtatatatatatataagcctcctgagaaactcaaccatgttcacattgagcctctggtattttgtggaaattccatgcagaactatctggtggtagtgatctgtcattggtaactcaaaacccatttttattccattcattgttgcgagaactgacaagtaaaaaatcttgaccacaataagacagggcctgtttctatgcctctgtaggagaatctctgcagaaatcacagtattaacaattttcaatagctgcagggttctgctggagtcttaacacttgagggtggatacagctgtgctgatgaactccaatattggcatcattcttgtattgccggctgaacacaaatacagtctaacagcaaaattttcagaaattgaacaagtgataatagaggcagaccagaaagtcttggcgtatgtgattatttgtttgggcttgtttttactaaggtaaattaggccgagttttttaaaaagaccccgtcatctcaataaacttgataacttattcttagaaatatttaaaaattactatttaaatctagaacattgtgatggtgcttttaaggcattttctagggctcttagtgactttgaagtagaagaaatattttgtattgatgctccagtgccccgtggaacaaaatatattttttatatgccttccctggatagacatgaaggattgttacatcttgacatatgtcccatgtcatggaaagaaagtcaggccaggatcatgggagtttgctaaattaagtaacaattgtttcataactacccatttccctttctcatgtaacctttatcaacattatgttcacatgtggcatattgcacacgtattatcaaattgtgcttatgttcttcctgctactctcaaagggtagttgaatatttatttaaaaacaaactttctgtgtttacttgcacttagagggtaaaggtaaagaaacagattttgacttcacccttagcatttaacacttgtgattgaagagattagaacaaatattgggagcttctaaaatgtatggttttggctcctctgtgtcctgaaataacgatttttcagatctggttgtttttattctttgatatttcctgtggtccatttataaatgcttaaaacttaattatcagttaagtttttaattgactttcatttgttcatctggtaatgacatctttgtcttttcattttcattatttattcctcttgtttctttttcttactgctttgctttggctctggcctccagtactgacttttcagatacgcactgtttattttgtatttgcatccatactaactgagaatgcacagagaagcttggcccatctgtctttctaggtgtgggaataggtttgtttgtttgtttgtttgtttttgaaacagactcttgatctgttgtccaggctggagtattccaagtgatccttctgccttggcctcctgagtggctgggattgtaggtgtgcgccaccacacctggctaatttttaaatttttggtagaggtgaggtcttcttaacgttgcccaggatggccttcagctcctggccttaagcagtcctcctgtctcgaccttccagagtgctgggattataggcatgagccacctgcacctggcatgggaatagctttatcttttatttttattactttttttttagagatggggtcttgctctgttgcccaggctggagtgcaggggtgcaatcatggcttactggagccttgaactcctgggctcaagcagtgctcccatctcagcctcccaagtagctgcgaccacaggtgtacaccaccatgccctttgagaataatttattaaccctcatacccatggcctggcagaacactgagcacatagtaggctttctgtaaacagttatcaattggttgaagtaactattcattaattgaaaaaataattgtaccgtgtataaaaatttaacaatttttcacaatttaacaattatcttttttggatacctatatccaaaaaagactttgagttgctttttcaaaactactaaaggagaggctgccatgatggtagtggaagaatcatggactttggagtgagaccgtacctcttcccctgccactaagggaccctgctaagtatcccaagccaccagccctggattaatgtaaatgaggttcattctgctgtatacctaataggctgttaaaaagtagaaatggaccaggcatggtggttcatgcctgtaatcccatcactttgggagtccgaggtgggccgaccacctgaggtcaggagttcgagaccagcccaaccaagatggagaaaccccatctctactaaatatacaaaattagttgagcatgctagcacatgcctgtaatcccagctactcgggaggctggggcaggagaatcgcttgaacctgggaggcggaggttatgccaagcagagatcgtgctaagcagagattgcaccattgcactccagcctggtcaacaagagcagaactccatctcaaaaaaaaaaaaaaaaaaaa

SEQ ID NO: 28349 - DNA, 4606 bp, Homo Sapiens
atcatttacaaatttgcaaagggccacatgtcactatattgctctgaaatctggttcacttttaaatgaatttatttttcacatggtttgcaggaaatcacaaatatttgtgtgcctcctgtaacagccaatggagccgatttcatggaaagttctggtaagtggacataaaatgtttgaaagcaatggtgagttaagtggtaaatattaaaaaataagaagtgttcaaactatcttcttaataatttgcatctgtgtgcacatgtcaggagctgttaccactgaaatggagaaaagctgttttaatatttttatattagtcatattttcagttaaagtctcatgtgcacatccttgatcctgttccccttctttcttccccagaactaacagtatcctgatttcagttcaattactaattcctgcattcagtcatactaggacatgatcacttatgttgtcatacaggtcatacaggtgaatttgtttatttctttggttttaccaagtggctattgcattaatattatctgagtgccacaactactcagtgaactaaaagaacaataatacataatgcctaatattaaagttttgcttaattccatagattgttttcaagtgtccatcctgcaaaatccgcatgagatttccccaaatatgtaactgtcttcctttatcagatgctccactcctcacctgcttttcccattagaattacatagcaagagctatgtaaagaattatctagaaaaaagtaactttccatgaaagcataatgtcaaggtaacaggctgaatagtcatgatttgttaaattctctttaggtaccaagacatgctaatttgcatgattacattacgtatgtttcctctttggtttccatactgagctcataggactgcttaactataatgttttttcgtgaaaacaaacaagcattgcattagaagcttcccataactgtgtactaaatatcctgtcttttctatttctggctgttgtcactgaaaatcttatttctttgtacacttttaaaattagtatatttttagagctttttcacccgtttatatgccctcctttgtgactctcacataacacattgtgggatgttatcacctctagtcatataattgtattttctcccacttacttgtttgcatggtgactgcttatagacacccaagacccattttataaaaatgcaacaaacaacagcataagatattacagaatgttctcccttgtttttagaagtttgtacaaatacgtatgccagaggcacagcggtggaaggcacttcaggaatggaaatgaccactaagcttggagcagccactgaatctggaggtgctgcaggctttgcaacagggacagtgtcaggagctgcttcaggattcggagcagccactggagttggcatctgttcctcagggcagtctggaaccatgagaacaaggcattccactggaggaaccaataaggactacgctgatggggcgataagcatgaattttctggactcctacttttctcagaaagcatttgcctgtgcggaggaaggcgatggccaggaagcaaacgactgcttgttgatctatgataatgaaggcgcagatgccactggttctcctgtgggctccgtgggttgttgcagttttattgctgatgacctggatgacagcttcttggactcacttggacccaaatttaaaaaacttgcagagataagccttggtgttgatggtgaaggcaaagaagttcagccaccctctaaagacagcggttatgggattgaatcctgtggccatcccatagaagtccagcagacaggatttgttaagtgccagactttgtcaggaagtcaaggagcttctgctttgtccgcctctgggtctgtccagccagctgtttccatccctgaccctctgcagcatggtaactatttagtaacggagacttactcggcttctggttccctcgtgcaaccttccactgcaggctttgatccacttctcacacaaaatgtgatagtgacagaaagggtgatctgtcccatttccagtgttcctggcaacctagctggcccaacgcagctacgagggtcacatactatgctctgtacagaggatccttgctcccgtctaatatgaccagaatgagctggaataccacactgaccaaatctggatctttggactaaagtattcaaaatagcatagcaaagctcactgtattgggctaataatttggcacttattagcttctctcataaactgatcacgattataaattaaatgtttgggttcataccccaaaagcaatatgttgtcactcctaattctcaagtactattcaaattgtagtaaatcttaaagtttttcaaaaccctaaaatcatattcgccaggaaattttcctaaacattcttaagcttctatttttcccctgccaaaggaaggtgtttatcattttaaaatgcaatgtgatttagtggattaagcaggagcgctggttcttgtctccattgccttttcttatatcattgataatgatgtaagaatcacaaggggccgggcgcggtggctcacgcctgtaatcccagcactttgggaggccgaggcaggtggatcatgaggtcaggagatcgagaccatcctggctaacaaggtgaaaccccgtctctactaaaaatacaaaaaattagccgggcgcagtggcgggcgcctgtagtcccagctactcgggaggctgaggcaggagaatggcatgaacccgggaagcggagcttgcagtgagccgagattgcgccactgcagtccgcagtccggcctgggcgacagagcgagactccgtctcaaaaaaaaaaaaaaaaaaaagaatcacaaggtatttgctaaagcattttgagctgcttggaaaaagggaagtagttgcagtagagtttcttccatcttcttggtgctgggaagccatatatgtgtcttttactcaagctaaggggtataagcttatgtgttgaatttgctacatctatatttcacatattctcacaataagagaattttgaaatagaaatatcatagaacatttaagaaagtttagtataaataatattttgtgtgttttaatccctttgaagggatctatccaaagaaaatattttacactgagctccttcctacacgtctcagtaacagatcctgtgttagtctttgaaaatagctcattttttaaatgtcagtgagtagatgtagcatacatatgatgtataatgacgtgtattatgttaacaatgtctgcagattttgtaggaatacaaaacatggccttttttataagcaaaacgggccaatgactagaataacacatagggcaatctgtgaatatgtattataagcagcattccagaaaagtagttggtgaaataattttcaagtcaaaaagggatatggaaagggaattatgagtaacctctattttttaagccttgcttttaaattaaacagctacagccatttaagccttgaggataataaagcttgagagtaataatgttaggttagcaaaggtttagatgtatcacttcatgcatgctaccatgatagtaatgcagctcttcgagtcatttctggtcattcaagatattcacccttttgcccatagaaagcaccctacctcacctgcttactgacattgtcttagctgatcacaagatcattatcagcctccattattccttactgtatataaaatacagagttttatattttcctttcttcgtttttcaccatattcaaaacctaaatttgtttttgcagatggaatgcaaagtaatcaagtgtttgtgctttcacctagaagggtgtggtcctgaaggaaagaggtcccctaaatatcccccaccctggtgctcctccctctccctggtaccctgactaccaggaagtcaggtgctagagcagctggagaagtgcaggcagcctgtgcttccacagatgggggtgctgctgcaacaaggctttcaatgtgcccatcttaggtgggagaagctagatcctgtgcagcagcctggtaagtcctgaggaggttccattgctcttcctgctgctgtcctttgcttctcaacggtggctcgctctacagtctagagcacatgcagctaacttgtgcctctgcttatgcatgagggttaaattaacaaccataaccttcatttaaagttcaaaggtgtattcaggatcctcaaagcattttaaccttgccgcttaaaacccaatttaccgtgaaatgggaattttgctgcattgttaaactgtagtggaaaccatgctatagtaataaaggttatataagagagaaattgaaattaaatgtgtttttaaatttcaaaaaaaaatcaatctttaggatgacttaaaaattgatttgccatgtaaaatgtatctgcattttttacacaaaacttgttttaagcataaaattttaaaactgtactacttgatgtattatacattttgaaccatatgtattaaaccataaacagtataatgttgttataataaaacaggcaataaatttataaacaaaaaaaaaaaaaaaaa

SEQ ID NO: 28350 - DNA, 3775 bp, Homo Sapiens
tgctaatggaggttggcaggatgctactaccccttcatcagtgacctcccctacagaaggccctggcagtgttcactctgatacctccaactgatctcccagcaatcgcatcccggctgaccctgtgccccagttggggcaggggcaggagggagggtttctctcccaacgctgaagcggtcagactggaggtcgaagcaatcagcaaacacaataagagtctccttctcttctcttctttgggatgctatttcagccaatctggacacttctttatactctcttcccttttttttctgggtagaagccacccttccctgcctccagctgtcagcctggttttcgtcatcttccctgcccctgtgcctctgtcctagactcccggggtccccgccctctctcatatcactgaaggatattttcaacaattagaggaatttaaagaggaaaaaaattacaaagaaaataataaaagtgtttgtacgttttcatgctggtggtttgaggagccaaatttacctcactcgaatccctcactccctatgttaacaggcaatccttctctgtttctcttattactctcactacctcttagcaggaatactccacattgccctattcattccaggcctccctgcttcctcttgctcttcctccctggggacagtactgattggaacactttcctcctcttccttcctagccccagctattcactggggactgtcatagctgggattctaaaggtgccacatttttcagtttcatctccactaggttggttcccgggcaggaagtcaggcagcagggaaggacacgggaacagcaggtggagaattcctacagtctttcttaccctgctagcaatagctctcagtttcagaggcacagtctttggagaccattcagcactgagaaagcaatatttagaacctattgcaaaactgggcctgagttaggcatggtgatgaatgcatcagcaaggaatagaaagttcttatcgtgaaacccttcaacctcaactatgccttcatagacacacacgttcatgcacatgtaggcacatgtaccatctcacatcttcactttcccgagatgccatatacaattacctacattaataactgtagcactataccttttgagcccgagagagggaattagtgactctaagtgaaggtcactgacacagagaagcagtatgtgtctggggcttccaggacctgcaggcccactagcgtgcacttaccagaatggcatacacaggacctgatcatgaggaagaccaggtttccagtgtaaactactcttgttcccaccacctctggagcactcagggagccccatacagtacttacaatgtctttaatggacttgattctgtttaattttttgttttatattaggcacactgtattaattttccaaaatgttataccacactatgttcttggtcctgacctattgctctggaggaaagagttgtataagaacgtggctcatgtgaacttttgctagcttcatttgaggacctgagaatcatggggaaagggaaggtaatgttttcattgaaatcatcacagtgatttttattccctgggaacacagcgtgtactaaaaatacatgagaaaatagcatgtatatgaaagctattctcaaaagtcacctgagctcaccatcttcatagccaaccctaccagttataaagatggcagctctatcacttgattaagtgggaggtggtcaaatattttggtgcctcattttcttcatctgtgagatgggaactgttatgcctggcttactaagagtcttgtgagagactgagaagttgattttgttcatatccaatctgtaaatgcgaagtcaggggaagtaatgtccctgaaataaacgggttcatgccatctagggacaataaatggttttcttgttgtaacttctggttaatatcagtaccttgatgtcatcaccgtgatgacaaagagaagagttattgttgatcttcttggttttggtctgtctcttttcttaggataaagaaaaacttccaaactagaaaaacaggccctggttcccttagtttgcacttgaacccaatatgttgccttgtacatacttggtccctgtcacattgactgcttgggaggcttccagggagaagtatgagaccctgaggggtgagaatgggcagctagcaagaacatggaaattctgcttggcactacagtcataaatagaaaacactgtgtgtgctcaggggagcaggggatgccactgaagaaactcaagggaatgtgtatttgaaggaaatgcaaaaactaagtatttagcaaaatgaaattatgccttgatgactaaaaggcactagaaaggttgtgtctactaacttcagccctaatcagaacagatgcctagaaggagcatttttgtgacaacttcatagtgattagaatcagtggagaactccatcttagtggcaggaatataatgaaactacccacgcaagaacatggttgaatcacatttgcttgacttagggcaaagtacgaaagagagacaaaagggttctcttggaaacaagaagagtgactccagatgtggcctgaataattgccatgttaagttaatgcaaaagatcagaacagggctacatttgcacaggcagtttctctccgggccgtagttttcactgatgatcacctttcacagcattttccccaaccagcatttcacttagtcttctctatacccagcacctcccccggcacccccggcaagcccactatcacttccgacttccaacgtggcatccgtgagatctgtccacattaggcgaagcaggagaacactgagagcagcaggatgggtttggaaagagcatgcctctggaaacacagcttcctgggaattcacatgaggccagtcctacagagagcaagatgcaccccaggatttcttcattttctaatagatgtgggagtgctccattttccccgacagcgaatttcccctgagaaacgatactagaccctgggtttgcccaccttgtaactcttccttatctcctccttttcatccctaattcatcctccctctggcatggaattgacgcccgtgcagtacatttgccaagtggcaccttctttcaatttatgttttattttgctatggtggtgattctttatttgctggttgtcttttctcacacatctttctctctgtctctctctttcctgctctttgtttttctgcccagaaaaacctgacttcgataccaaaaaagatgaaactacagaaactcaaatttaaaaaaaactttaaaagaaacaaaaaaatactcaacgattctttcagctttattaacattttccattgtttcttgcgacttgtgtctcgttctttgtagtattgatgatgaacatttgataatgaatgttcttgtatattcagataaagaaaaaaaaaccaaaaaagcggtctgaatttaatagtgtttataataaaaattttaaaaatgaccctcatagcacgcaaaacaggatggggaatttcccctcttctttctgtgacaatgcgcatcattcctgcattagtttttaacaccagactacctacattcatcatttccctcatttttcttttattttcttgcatttgtgaattagtttaagaatgctagaaaagtgtcgagttgtgcacatccatttcttgtttcacaatgtttaaaagtgacagtaattcattttgtaaactaaaaaaaaaaaaaaaaaa

SEQ ID NO: 28351 - DNA, 3088 bp, Homo Sapiens
attgcaattactcattttgataaagtttattcttaggcgttaaccatttctaaaggatccccaaatcatcacttacttaggtgaaattatataaaatgacacatttctgagaaatgtttaggtccagtgaaccgtagttggtttatgggagtgatttcgagatagccaaatgaactttgatttttgttttgaatgtggtggagtcaagagattgtagatgcctagtttgatttaaacactattgtaaacctatcttgcctattgtgtggacaccaaaagagaccaatgagcctgtttatttttcagaggtctaggaaaattgcatccgtgtgagtagatgtacagaactaatctaaaagtgactgctagtaatattttagaatataataatttcaagaattattctgagtgttttaaatgtgccctgaaatgttggcatgtcatttcagcatttccatttgaattgctcttgtaatatttttgcacaaaaaggactgagaaaaagactactttggttaaaggaaaaaaatagtataatttggtctttaattttaatgtctcctgtggaaacactggggatgaattttgttggcacagttattcaggatatttaaaacagtgttgaacagttcacaagaaattaagcaaacttggattttaaaaattaaaatactttctttccatgtgactgttttgcatagttttttccccctatgtcataacactacattccttgtttttcttaaataaaatactctgcaggttttgttgtgagtgtttataacagtattttgtaagctgcctgggtttcctcagggaaacattatttagtggaataggatatagtttatggagagacaactaagtgaaatcccatcaccaccaccagcaagcactgaggtgctgcattaagtgacaatcaaactagtaagtatttatgaaagaatttagaaaggggttcaaagaagcaattgcttttaaagcagttctctggggttcttgaataaaaatggctaaatgtatttatttatattttaaaatacctgtgtgttctgttttctcatcaaagtgatttcggtgtcatgtatttaatgtgtggtttgttttgttttgcaccatattcttcttagggaactggctctgatttggggtgcagtcaccaactctcatgataatctttacggacagtctgaatctactttacttcaggacggcagtggaggggccaactccagatgcccctgcacttccctcctcaagtcatctaagaaagaattttagaaataactcctttcaaatctgattcatacagttccaacctttttctagtttcacttgctgccttctttgttttatgggcactttttgtgtgattacttccccaacacagtcaaaggccagtatgacagaaccaatggcacatgatgcctctattttgcccatttggggaaatgttagtaaaagaaatagcatcttttaatggctgtcattatcatatccatattaaaatccatttaaagttcttaaatttggcggaataatgtatacaggctgtaaacttctacaaaaaatgtttgctgtctttaatatggtgtcaagttacttggtcctttgaaaacaaaacaaaacttccatacacagcactgcccagtaaagcagtgttggaatattggaaacctagacattcgaggatccttcttgctcacaagcattggaacagaatcctccactttaggactcagagaagctatggagtcccacaggctaggtatagcacacaacttagagaacggtagttaaagcacgtcaaccacaattgaatttaatgatctaaaaaatatttcttaactctgagggttaaactgaagatacgttttcaaataaaagcttttaaatttcttaggaaacaaactgtgacatcgcttttaaaaatgacattcaaatgtttataatgtgtgtttttgagttggcttggactagtgcaagttcactgctggcaatggttatgccagtagttaagttaaaataagttgttaccttcagattgatgtcttgtataaccacaatcatcttcaagcaaaaaaattggccaggaaatgtctttttaaaaaaaaaaaaaaaaaaagatgtgtcagccagaacagttaccattcagaccatactggaatgattttgaaatctttactatggtttaagttggggaaggcctcagtatggcattttcatattcactctatgtaaagattgaagcccaaagatgagttaaattcagtgctgtattgaaaccagtcagtgcaaaaaaaaaaaaaagttttacctttgtaaatttttcattgttaacatcagttggtagttgttaaaacatgcaccaaattctttataatgttctgtgtggttctcaatgtgatattcttgacattgctgtccttactgcttggttcttggttttaaattaaaaagtagatgtagctcatcatttttacttccaaaacggtggagctaaaaacggctaattgatcttgagataagaataccctttactaaggcaaagatttaattgaaatccaaaatgatttatagaaacgaaaggcattttccatttgttgtcttctgccgaaattctgaattgcatacacgcatgaaggataatgaatggtttcaacggtgctatattaggttctctgattttcatgacctatgtatgtttggaaatacaatattgtataaaatgtggatcgttttgttaccgatttaatattgccattttaatttggtgtaacaattggttacacttgtttttcaaagctatcctttgaggagaaagtcaaaatgtgttgttagcctacctccactcaggcctcttgctgtgtaatcattattccaggttatgatgtgcatagcttttaaaactgcgtgtactattattctgctctttcccatactcttgtcatgtattcagaacctaaacttatagcaaaagagccaagcagtagcagtttttgtaaatgtaaaaataattagatccagactttgtttccttcaattttaaaaataaaaaatacctcagtgctaaaaaaaaaaaaaaaaa

SEQ ID NO: 28352 - DNA, 4840 bp, Homo Sapiens
gagcatggcatgggctgtagtgaacagcgggctcaacaacaggtcaggacaaatacattagtgaagctcatacagctgtcttttatgaggtctgtgctgagagctaatgacgtttacagttcagctaaaacaaatagacaaacaaaagttctgatcagtggtaggatcagccaaaggatcaaaccttctgtttctaaccatcagagaaattgtggactgcatgtccgttgggcatacttcatgagtattatctcctaccccgggatcttgataaaagttaaatagcagagggttcaaggtcatattcctggtgatgcagcatcgtgagttaagactttgaacttttgggtcaagctctggtttggattttggttctaccgtttactggctgtgttacatgagaaagttacttagtcttcttgagccgccatttccttatccataaatgagaataataattgtacttgtatcttaagactatgataaaggattagagattgaggtaatacatttaaaatgtttaggacacagtgcccagaaagtgctcagtagccagtggtttcaggtggggttgggatgcgttttaattttaacggtaatcatgtggaatgctgaatctttgtggccagttgaaggcaaatgcataggtgtgctttcacaattagctcaggtgtaagattctcctaattaaaggctataccccaaaagaggcgggttatctatagatagaaccagaatctttttcagaaaacagtcactttgataggaacagcacattcattaatggcccctaataaaaagcagcatcagtgggagagtcaaaccattagcctggaagcctaaaaattgacagagctgttggtgtgtgtgtaagtgcagcgtatgttgcgtacttacataattgctaatggaagtatcagtttataaacttcaaccaggaaatactaacctatgttacttgttactccttaaaatgccttttaggtcgtgatgaagaaaaattaaagtatattaaaaaatatcttcaggctgtaggaatgtttcgagatttcaatgacccttctcaagacccagacttcacccaggttgtggaattagatttgaaaacagtagtgccttgctgtagtggacccaaaaggcctcaggacaaagttgctgtgtccgacatgaaaaaggactttgagagctgccttggagccaaggtaggggcctgcgggaagaggttgaatcctctcaactctacctcttgcctggttactcagcgtccaggctttcatcccacttgacatgaatcttcctgtagcctgaagcttgagggtgtttattcttccttctgaagtccttaatgacttcctccattagtcacgagccaagcggcaagagccatcatagacacaactcaacccacctttttaagcatgtctgcttttcacaggaccctcaccacactgtttactcacccgaggttttctagctgttgcacctttgtgcatgcccctccctgcctgaaagtctcttctccaactcatattactctgttctgtgaactccataagacttggttcagataccagctactctgcattgggttctcagaatctcatagcagaaagtcccctttcccttattggacacttcatggtgcttgggctgaaatacttcgatagcattccatattctttaacttacattgttggtactttatttgcatgtatgatttctgttgctagactgtacgtgtgagaataggatttgtgtctgaatcaccttgggagcccgcaaggtacctagcacagtatcttacatgcggtagattttcaatgaacatttcccaaaagaatgattaagatgtatgatggattttatctgtgagacaccagtattatgccaaatattcagctgtactttgtttgcgttgttgatcatgattaattgagtctggtcaaaatagcgcctttttctaaatttccataaggttagaatccatagtcttaatcagtccatatccattaaactgtacaataatgtcattgagttcaatttagactaactttaaatttgtagttttagcatttacatttttgaggtgggaaggaagtaattgttactaatttcagtgcagagtaagactcagatatcatgactgctttttgtaaagatttcaaacgagtaatttttctgtagcatttcagagtttacttgcagagatacttatgcttttgttaagaattggcctttaaaattatagttaccaaagtattccttcttctcaagtgagaactgttgactatatgtatgtattttcctctagccagatacatgtatatcttatataaatatattcctatataatatacattttttcttcctttagcaaggatttaaaggattccaagttgctcctgaacatcataatgaccataagacctttatctatgataacactgaattcacccttgctcatggttctgtggtcattgctgccattactagctgcacaaacaccagtaatccgtctgtgatgttaggggcaggtaagtgcatttgactccatcctcatggtcatacatgtgtgtaggtggaaatagcccgagacagggcccagggccttggcggagttgtacatgtagttccctgaacctcgtcttttccagatacagatatttattggcccataaatatctacacaataaatagtatccaaagcaaagtttttaaaatcgaatgcacactgcataatagtctctcttgagaattaacacagaaaataagtagaggaaagcaaaggaagctggatttctgggaaagcctacattcttgtgtcagactttggaagaaaaataaagtgttaccacagactttgttctccgtgaaacccctgagcagcaggattgagttctgacgtgaatgctgggaggtgtttctcagtgagggcacagggcactggctgataaaacctggggccactggcctgtttcgcaattctggttgagttgttaatatttacatatgtggtttccctactataaggtctctttagtttccaagtttttagtcatccccaaagctcctcttatatccatccacagaccagacagtgtcagcagttcctttctatgaagcagacacgggcattaggaaagccttctttgcctgagcccgtgtattgccacctaagctttccttgtctggtctggagcaaaccagtcttctgtagacaagttaccagcttgtctgtggctttttgtcccctcatgtccccacccccactgctcatgtttttgctacttctgtgatacttcctaagacagagcacccagtgttccagtagcagtctctgtatctgccaaagtccagcagatcctccacttcaagatatatctgaacactcgatttttacttcttggctgaccgttccttgccagccagcacacagctgatatagtttcagaaagggctccttcaatgatgattttcatccaaataaaacataattagaaagatgattttccctctaaaaaaaaaattaaaaactcattttgtaatatattcctaaatggttttacatttatctctttaaaaaaaaagtaagcaaacctctttcttcatttccttgcctagctttgagtttactgcatatatctaaatgaccgttggccagggagcctttagatttctgtttggcagcagaaacagcagatagcgccaacatgaagggagcgtggtcaggtggtggcaggaaatgcagactgaagaaaatcaggctcttttctgaagtgtgcctggcacctagagcaggcagcctcccacactgcatctgtgtttaccatttcgcaggattgttagcaaagaaagctgtggatgctggcctgaacgtgatgccttacatcaaaactagcctgtctcctgggagtggcgtggtcacctactacctacaagaaagcggagtcatgccttatctgtctcagcttgggtgagggagagttttcttttgcaccattgcttttgttgaattgtatccctcatgtatcttgctgtgtcaccttgtaacagatgtgagattatctgatgatatctaattgcatagtcgtttatcagttggtagttagacttaaacccttacattccatctaaagagagccctcttgccctctagggcacctaccatgaatggagtttgcaggactggaagttgctttggttgagtcagtgaatgagtggagagtgaatgtgaaggcctaggacattaccacacactactgttgactttataaacactggacacttaggccacactaacttaataaaaaaaagtttctttcttcaataatgtaaaccgtagcttacttttattttacaaacttttaagtttattgaaactcttgactcttaaaacacttagcttaaaacaaacatattgtatagctgttccaaaatattttctttatatctttatttcataagttttttcctatttttgaagtttttatttttttactttttaaacttttttgttaaaaaccaagacaggctggacccagtagctcacacctgtaatatcagtgctttgggaggccagggcaagaggattgcttcaagccaggagtttgaaactagccagggcaacatagtgggacccctgtttctacaaaaaaaaaaaaatgtaaaacaattagccaggcatggtggtgcatgcctgtagtcccagcttctcgggaggctgaggctgcaggatggcttgagcccaggagtttgaggttgcagtgagctatgatcacgccactgtactccagtttgggtgacagcaagaccctgtctcaaaaaaaaaaaaaaaaaaaca

SEQ ID NO: 28353 - DNA, 3703 bp, Homo Sapiens
ggttcactcggcgcaaacatggctgcggccctgcgcgccgcgggcgtcctgctccgcgatccgctggcatccagcagctggagggtctgtcagccatggaggtggaagtcaggtgcagctgcagcggccgtcaccacagaaacagcccagcatgcccagggtgcaaaacctcaagttcaaccgcagaagaggaagccgaaaactggaatattaatgctaaacatgggaggccctgaaactcttggagatgttcacgacttccttctgagactcttcttggaccgagacctcatgacacttcctattcagaataagctggcaccattcatcgccaaacgccgaacccccaagattcaagagcagtaccgcaggattggaggcggatcccccatcaagatatggacttccaagcagggagagggcatggtaagctgctggatgaattgtcccccaacacagcccctcacaaatactatattggatttcggtacgtccatcctttaacagaagaagcaattgaagagatggagagagatggcctagaaagggctattgctttcacacagtatccacagtacagctgctccaccacaggcagcagcttaaatgccatttacagatactataatcaagtgggacggaagcccacgatgaagtggagcactattgacaggtggcccacacatcacctcctcatccagtgctttgcagatcatattctaaaggaactggaccattttccacttgagaagagaagcgaggtggtcattctgttttctgctcactcactgccgatgtctgtggtcaacagaggcgacccatatcctcaggaggtaagcgccactgtccaaaaagtcatggaaaggctggagtactgcaacccctaccgactggtgtggcaatccaaggttggtccgatgccctggttgggtcctcaaacagacgaatctatcaaagggctttgtgagagggggaggaagaatatcctcttggttccgatagcatttaccagtgaccatattgaaacgctgtatgagctggacatcgagtactctcaagttttagccaaggagtgtggagttgaaaacatcagaagagctgagtctcttaatggaaatccattgttctctaaggccctggccgacttggtgcattcacacatccagtcaaacgagctgtgttccaagcagctgaccctgagctgtccgctctgtgtcaatcctgtctgcagggagactaaatccttcttcaccagccagcagctgtgacccccgccggtggaccccgtggcgttaggcaaatgcccaacctccagatacctccgatgtggagagggtgttatttagagatcaaggaaggaagtcatccttccttgatatatatacagcctttgggtacaaattgtgtggtttcttgaggattggactcttgatggatttctatttttatataactatacagtaagcatttgtattttctctctctaggtataagttactagtttggaatgtccatcaggacctttaataaatgagttaaaaatttgtcttatgagacacacctatttaagtacagattttggctttattgcccaaaaccctcctgaaagggtacggagagtcccctctgtgggctggcagtgtgaatgagatctgtttagtctcgtgcatatagttgctgttttttaaatgaacacagttgagtatttgaagtgaatttgaaaaagaaatgttacttaatctttccctaagcccatgggttacagaatgctagggaggcaatttggttacctgcaatggctgcttttgccagcgaggccaccattcattggtcatcttggtatttgtgtgtgaatctcactttcctcaatgtaaaaaggaatcaagtatggatttcagaggtgctcttagattccccatacacccaagggtaataaacgtgtacaagtacagtgttcatgatacgtgccttggtgggagtccgtggtgccacagggaaggggctcccactgcttctggtctccagggacagtgctgctggaaaggctagtgatgagcttcaccctggagctcctcccgggaccttgcaagcctctccatccagcatcttctctatcttagttgaatgccttctttctgaacatttgttttaagaattattttataaagtcaacaatactttgcttgaattctttcttaatttacgattttttattataaaaatgtatagtgatacaatgggacatgtgaagaatacagaaaagtaaccactttaatgcaataactgttatcataatattgtatttcgtggtagtcctttcctgtagatatttttaatgccatttaatgccattgtcaccttggatttatgagtgagaagtgtttctaaaaatatagaaataatgtcagatcagagtctgatcttctatgtttgtatttaaatggattaaaagatccccggtggttccatgaagaatttgtaaagatcactttctctttcctccaagccctgaaactttgttcttcaaaagagcgtttcttttttttttttttttttaagccagtttataaagtggaagtattaggagattcataaatcttctatattgagaattggctatgttaataaatattacaacatcattgaggttttagctaagtttgattcatgctgtctgttaaatcaaaactgatctaaatcagaattattaaatgtgaggagcttttttaatacaggaaaagaaacatgtcatccacttgagttaatagttttcctacgttgatgacagccctcatgagtagcatccacatttttaaaatttcaaattggtttttctactagtagattgtgtttctagagaaagatacaaggcataggtgattgtttaggattttcctctagcctttgccattacctttttggggatgaggttcacagtagactttgagtgaccgtcccaccgtgaagtgaattctctgagctggtggtgtggtgctggaaggaaggttatttttggagccactctctccccttaaggatatttcccaagggcctgcttcaattctttgatgactttagaggtgaaaaaatatttttatggagatgatgcagaaaactccaattcaggagcccttgcgagtatatctgaagcacttatttgctaaggaaacctgaattgatagcagtactgtgctgtctggaataatgtccttgatactgagttgggaccagactggcttttatagtgacaggcaaagaggaatttattgagatcactgctcatggcatttgttgctgtaagaagtgttgcctttgattgttactaaccacggatgggtaacggtcatacattaggctagtgtttggtaggacaaaatctttttagagctttgaggattgtcatcctgttggtcaactttgaaatacaaatgtttgccctggtaattagcaatgaactgctggcagtttcttcagctgtgtatatacggatctggcttttaattgatgaatcaacttctacagaaacttttgcagggacagtgttgatgaggcagtttagcttgccagggtgatgataaagcccaggtccctgcatgtatagtgctcttctaaagaatatgcattcttgaactacttaactttttaaaaatcacaataaatttttgcactcaaaatttgcttcgtaaaaaaaaaaaaaaaaaaa

SEQ ID NO: 28354 - DNA, 4817 bp, Homo Sapiens
cagaccgtcgctaatgaatcttggggccggtgtcgggccggggcggcttgatcggcaactaggaagccccaggcgcagaggccaggagcgagggcagcgaggatcagaggccaggccttcccggctgccggcgctcctcggaggtcagggcagatgaggaacatgactctcccccttcggaggaggaaggaagtcccgctgccgccttatctctgctcctctgcctcctccctgttcccagagctttttctctagagaagattttgaaggcggcttttggattcttcacttctcttgaacaaggaactcactcagagactaacacaaaggaagtaatttcttacctggtcattatttagtctacaataagttcatccttcttcagtgtgaccagtaaattcttcccatactcttgaagagagcataattggaatggagaggtgctgacggccacccaccatcatctaaagaagataaacttggcaaatgacatgcaggttcttcaaggcagaataattgcagaaaatcttcaaaggaccctatctgcagatgttctgaatacctctgagaatagagattgattattcaaccaggatacctaattcaagaactccagaaatcaggagacggagacattttgtcagttttgcaacattggaccaaatacaatgaagtattcttgctgtgctctggttttggctgtcctgggcacagaattgctgggaagcctctgttcgactgtcagatccccgaggttcagaggacggatacagcaggaacgaaaaaacatccgacccaacattattcttgtgcttaccgatgatcaagatgtggagctggggtccctgcaagtcatgaacaaaacgagaaagattatggaacatgggggggccaccttcatcaatgcctttgtgactacacccatgtgctgcccgtcacggtcctccatgctcaccgggaagtatgtgcacaatcacaatgtctacaccaacaacgagaactgctcttccccctcgtggcaggccatgcatgagcctcggacttttgctgtatatcttaacaacactggctacagaacagtcttttttggaaaatacctcaatgaatataatggcagctacatcccccctgggtggcgagaatggcttggattaatcaagaattctcgcttctataattacactgtttgtcgcaatggcatcaaagaaaagcatggatttgattatgcaaaggactacttcacagacttaatcactaacgagagcattaattacttcaaaatgtctaagagaatgtatccccataggcccgttatgatggtgatcagccacgctgcgccccacggccccgaggactcagccccacagttttctaaactgtaccccaatgcttcccaacacataactcctagttataactatgcaccaaatatggataaacactggattatgcagtacacaggaccaatgctgcccatccacatggaatttacaaacattctacagcgcaaaaggctccagactttgatgtcagtggatgattctgtggagaggctgtataacatgctcgtggagacgggggagctggagaatacttacatcatttacaccgccgaccatggttaccatattgggcagtttggactggtcaaggggaaatccatgccatatgactttgatattcgtgtgcctttttttattcgtggtccaagtgtagaaccaggatcaatagtcccacagatcgttctcaacattgacttggcccccacgatcctggatattgctgggctcgacacacctcctgatgtggacggcaagtctgtcctcaaacttctggacccagaaaagccaggtaacaggtttcgaacaaacaagaaggccaaaatttggcgtgatacattcctagtggaaagaggcaaatttctacgtaagaaggaagaatccagcaagaatatccaacagtcaaatcacttgcccaaatatgaacgggtcaaagaactatgccagcaggccaggtaccagacagcctgtgaacaaccggggcagaagtggcaatgcattgaggatacatctggcaagcttcgaattcacaagtgtaaaggacccagtgacctgctcacagtccggcagagcacgcggaacctctacgctcgcggcttccatgacaaagacaaagagtgcagttgtagggagtctggttaccgtgccagcagaagccaaagaaagagtcaacggcaattcttgagaaaccaggggactccaaagtacaagcccagatttgtccatactcggcagacacgttccttgtccgtcgaatttgaaggtgaaatatatgacataaatctggaagaagaagaagaattgcaagtgttgcaaccaagaaacattgccaagcgtcatgatgaaggccacaaggggccaagagatctccaggcttccagtggtggcaacaggggcaggatgctggcagatagcagcaacgccgtgggcccacctaccactgtccgagtgacacacaagtgttttattcttcccaatgactctatccattgtgagagagaactgtaccaatcggccagagcgtggaaggaccataaggcatacattgacaaagagattgaagctctgcaagataaaattaagaatttaagagaagtgagaggacatctgaagagaaggaagcctgaggaatgtagctgcagtaaacaaagctattacaataaagagaaaggtgtaaaaaagcaagagaaattaaagagccatcttcacccattcaaggaggctgctcaggaagtagatagcaaactgcaacttttcaaggagaacaaccgtaggaggaagaaggagaggaaggagaagagacggcagaggaagggggaagagtgcagcctgcctggcctcacttgcttcacgcatgacaacaaccactggcagacagccccgttctggaacctgggatctttctgtgcttgcacgagttctaacaataacacctactggtgtttgcgtacagttaatgagacgcataattttcttttctgtgagtttgctactggctttttggagtattttgatatgaatacagatccttatcagctcacaaatacagtgcacacggtagaacgaggcattttgaatcagctacacgtacaactaatggagctcagaagctgtcaaggatataagcagtgcaacccaagacctaagaatcttgatgttggaaataaagatggaggaagctatgacctacacagaggacagttatgggatggatgggaaggttaatcagccccgtctcactgcagacatcaactggcaaggcctagaggagctacacagtgtgaatgaaaacatctatgagtacagacaaaactacagacttagtctggtggactggactaattacttgaaggatttagatagagtatttgcactgctgaagagtcactatgagcaaaataaaacaaataagactcaaactgctcaaagtgacgggttcttggttatctctgctgagcacgctgtgtcaatggagatggcctctgctgactcagatgaagacccaaggcataaggttgggaaaacacctcatttgaccttgccagctgaccttcaaaccctgcatttgaaccgaccaacattaagtccagagagtaaacttgaatggaataacgacattccagaagttaatcatttgaattctgaacactggagagaaaccgaaaaatggacggggcatgaagagactaatcatctggaaaccgatttcagtggcgatggcatgacagagctagagctcgggcccagccccaggctgcagcccattcacaggcacccgaaagaacttccccagtatggtggtcctggaaaggacatttttgaagatcaactatatcttcctgtgcattccgatggaatttcagttcatcagatgttcaccatggcccgcagaacaccgaagtaattccagcatagcggggaagatgttgaccaaggtggagaagaatcacgaaaaggagaagtcacagcacctagaaggcagcacctcctcttcactctcctctgattagatgaaactgttaccttaccctaaacacagtatttctttttaacttttttatttgtaaactaataaaggtaatcacagccaccaacattccaagctaccctgggtacctttgtgcagtagaagctagtgagcatgtgagcaagcggtgtgcacacggagactcatcgttataatttactatctgccaagagtagaaagaaaggctggggatatttgggttggcttggttttgattttttgcttgtttgtttgttttgtactaaaacagtattatcttttgaatatcgtagggacataagtatatacatgttatccaatcaagatggctagaatggtgcctttctgagtgtctaaaacttgacacccctggtaaatctttcaacacacttccactgcctgcgtaatgaagttttgattcatttttaaccactggaatttttcaatgccgtcattttcagttagatgatttcgcactttgagattaaaatgccatgtctatttgattagtcttatttttttatttttacaggcttatcagtctcactgttggctgtcattgtgacaaagtcaaataaacccccaaggacgacacacagtatggatcacatattgtttgacattaagcttttgccagaaaatgttgcatgtgttttacctcgacttgctaaaatcgattagcagaaaggcatggctaataatgttggtggtgaaaataaataaataagtaaacaaaaaaaaaaaaaaaaaaa

SEQ ID NO: 28355 - DNA, 2145 bp, Homo Sapiens
ggccgaggggacggggtccgactcagaaatggcggcctccatgttctacggcaggctagtggccgtggccacccttcggaaccaccggcctcggacggcccagcgggctgctgctcaggttctgggaagttctggattgtttaataaccatggactccaagtacagcagcaacagcaaaggaatctctcactacatgaatacatgagtatggaattattgcaagaagctggtgtctccgttcccaaaggatatgtggcaaagtcaccagatgaagcttatgcaattgccaaaaaattaggttcaaaagatgtcgtgataaaggcacaggttttagctggtggtagaggaaaaggaacatttgaaagtggcctcaaaggaggagtgaagatagttttctctccagaagaagcaaaagctgtttcttcacaaatgattgggaaaaaattgtttaccaagcaaacgggagaaaagggcagaatatgcaatcaagtattggtctgtgagcgaaaatatcccaggagagaatactactttgcaataacaatggaaaggtcatttcaaggtcctgtattaataggaagttcacatggtggtgtcaacattgaagatgttgctgctgagtctcctgaagcaataattaaagaacctattgatattgaagaaggcatcaaaaaggaacaagctctccagcttgcacagaagatgggatttccaccttatattgtggaatcagcagcagaaaacatggtcaagctttacagcctttttctgaaatacgatgcaaccatgatagaaataaatccaatggtggaagattcagatggagctgtattgtgtatggatgcaaagatcaattttgactctaattcagcctatcgccaaaagaaaatctttgatctacaggactggacccaggaagatgaaagggacaaagatgctgctaaggcaaatctcaactacattggcctcgatggaaatataggctgcctagtaaatggtgctggtttggctatggccacaatggatataataaaacttcatggagggactccagccaacttccttgatgttggtggtggtgctacagtccatcaagtaacagaagcatttaagcttatcacttcagataaaaaggtactggctattctggtcaacatttttggaggaatcatgcgctgtgatgttattgcacagggtatagtcatggcagtaaaagacttggaaattaaaatacctgttgtggtacggttacaaggtacacgagtcgatgatgctaaggcactgatagcggacagtggacttaaaatacttgcttgtgatgacttggatgaagctgctagaatggttgtaaagctctctgaaatagtgaccttagcgaagcaagcacatgtggatgtgaaatttcagttgccaatatgatctgaaaacccagtggatggctgaaggtgttaaatgtgctataatcattaagaatactgtgttctgtgttattgttctttttctttttagtgtgtggagattgtaattgccatctaggcacacaaacatttaaaaggatttggactgcatttaattgtaccattcagaatggactgtttgtacgaagcatgtataatgcagttatcttctttcttttgtcgcagccagtcttttttgcttctcctacaaaacgtaacttgcaatttgccagtttattattgttggatacaaagtttttcattgataagagtcctataaataagataaatacgaagataaagctttattctttagtgtttaaatacagtatatctaataactagcctcattagtagagcagtatattaaaacaatgttttatgtaaaaagtgtttatcttcagcaccaaatacatgataaatgtatcaatcactatttataaacagagctttcaaacactcctcagaatattcttctaagtattttgatgaagtaactttgtaattatttgaacattgttttaatcattaggaaacactgattaactgcaagtcttcatgattctgtcatattaagaaacacctgtaggtttgcttcaaataaaggcatatataccaaggacttacagacaaaattaagaatgtcaatttaagttaataaaaatctcccaatatgaaaaaaaaaaa

SEQ ID NO: 28356 - DNA, 3640 bp, Homo Sapiens
attctccgaggcggccgacatgttttttttttttttttttttttttttttagtgttaactggggcatgaatgtggcggtttccatcacaggtgctgaaaacactcttggaggcaactgcagctcttttgaaagttttaattgcgtctttcaataatccttcccccaggaggagcaaaggccagtgcagatgatgtatcaggaggccacgtttaagctcgcccacgtgggcgaggtgcgcgcgcagctgctggagctgccctacgccaggaaggagctgagcctgctggtgctgctgcctgacgacggcgtggagctcagcacggtggaaaaaagtctcacttttgagaaactcacagcctggaccaagccagactgtatgaagagtactgaggttgaagttctccttccaaaatttaaactacaagaggattatgacatggaatctgtgcttcggcatttgggaattgttgatgccttccaacagggcaaggctgacttgtcggcaatgtcagcggagagagacctgtgtctgtccaagttcgtgcacaagagttttgtggaggtgaatgaagaaggcaccgaggcagcggcagcgtcgagctgctttgtagttgcagagtgctgcatggaatctggccccaggttctgtgctgaccaccctttccttttcttcatcaggcacaacagagccaacagcattctgttctgtggcaggttctcatcgccataaagggtgcacttaccgtgcactcggccatttccctcttcctgtgtccccagatccccactacagctccaagaggatgggcctagaaagccaagtgcaaagatgagggcagattctttacctgtctgccctcatgatttgccagcatgaattcatgatgctccacactcgcttatgctacttaatcagaatcttgagaaaatagaccataatgattccctgttgtattaaaattgcagtccaaatcccataggatggcaagcaaagttcttctagaattccacatgcaattcactctggcgaccctgtgctttcctgacactgcgaatacattccttaacccgctgcctcagtggtaataaatggtgctagatgttgctactattttatagatttcctggtgcttagccttataaaaaaggttgtaaaatgtacatttatattttatctttttttttttttttttttctgagacgcagtctggctctctgtcgcccaggctggagtgcagtggctcgatctctgctcactgcaagctccgcctcccgggttcacgccattctcctgcctcagcctcccgagtagctgggactacaggcgcccgccaccacgcccggctaatttttttgtatttttagtagagacggggtttcaccgtgttagccaggatggtgtcgatctcctgacctcgtgatccacccgcctcggcctcccaaagtgctgggattacaggcttgagccaccgcgcccggctatattttatcttttatctttttctttgacatttaccaatcaccaagcatgcaccaaacactgctttaggcactggggacacaaaggggacagagccatcctcctttgacacctggtcttcagttctgtgcccaacgtatatagttttgacaatgaccaggttggactgtttaatgtctttcaacttaccacgtaatcctcttgtagggatcacatctttctttatgatattgtatttctctacctctaacagtaaaaattccattcaacccttaaagctcacttcaaattcttctttgagaagtttttcctttctccgcaaccagatgtacatatttgaactctctttgtacttggagggcacttctttcgtggtagttcttttatttttattaatctctgtatccttagatagtcctccaacaaccaaaggttgggactctgtcttacatatctgggtgcccctcatagtgcagtaataagtaagttgattatatacgagctatgtaacttatattttttaatggttggatatcactgagttttttttttaagaatttttttattgaggtaaacgtcacataacataaaattaactattttaaagtgagaagttcagtgccacttagtattgttaacaatgttgcataaccaccacctttatttaaagttccaaaaaaaatgttctcctctaaaaggaaaccccatcccattaagcagatactctccattccttccttcctccagcccccagcaaccaccaatctgctttctgtctctatggttttatctattcttgctattttatataaatcgaattgtatgagaccttttgtgtctggcttctttcacttagtacaagtttttgagatttatttacatagtagcatgtatcaacacttcatttttatggccaaataaaattgtattatgtgtttatagcacaatttatttatccactcattcattgatggactttgggttgtttctgacttttggctattgggaatagtgctgctatgaatgtttgtgtacctgtatttgtttgaatgcctattttgcattctcttgggtatatatctaggagtggaactgctgggtcatatgttaattctatgtttagctttttgaggaacagacaaactgttttccacagcagttgaaccattccacattcccaccagcaatgtatgagaattccaatttctgtccacttcctcaccaacacttattattttccttttcctttttttaaaaaaaataagttatggccatcttagtgggtgtgaagtggtatctcattgtgttttttatttgcatttcctattgtaatgagctagaaactaaagtacaaactagatgggacatccagtccctttgatagataatgctgagtaaaaaatgagatgaaagacatttgtttgtttttagaacacgagtgacagtttgttaaaaagctttagaggaggaatgaaaacaaagtgaagtacacttagaaaagggccaagtggacatcttggatgtcaagtgcctagttcagtatcttttttttttttttttttttttgagacagtgcctcactctgtcacccaggctggagtgtagtggcatgatctgggctcactgcaacctcctcctcctggattcaagcaattctcttgcttcagcctcccaagtagctgagactacaagcacccaccaccacacccggctaattttgtatttttcagtagagacggggtttcgccacattggccgtgttggtcttgaactcctggcctcaagcaatccgcctacctcagcctcccaaagtgctaggattacaggcataagccactgagcccagccctagttcagtatcttttatgtaaattataaacatctgcaacattatgtatcatatgcagatacttattgcatttcttttattagtggtgaaagtgttctatgcatttattggctcttgaatttcctcatctatgaattgtcattcacacacctacttttctgcttcgtttttacatatgtctttgcctattaaagatattatccctctgttttatattttctctcattcttgtattgccttttaaattttgttatgatgtttcattaataaacagtgttttgttttcctctaaaaaaaaaaaaaaaaaaca

SEQ ID NO: 28357 - DNA, 3356 bp, Homo Sapiens
tagctggcctgcttttagtccaaaggaacaggggttgggggaagttcccagggcttgagaggtcttgaagccaaacaggggttccagggacactagggtgcccactctggcattttctctccttcccttcaattcacagactctggtggagcaacgttcaggtggttcaggaaagggcagcaataaggggccactaggtgtgacagaggaactgcacatcatcagcttcacggtcaaatatacctaccagggtctgaagcaggagctgaaaacggacaccctccctgtggtgattatttccaacatgaaccagctctcaattgcctgggcttcagttctctggttcaatttgctcagcccaaaccttcagaaccagcagttcttctccaacccccccaaggccccctggagcttgctgggccctgctctcagttggcagttctcctcctatgttggccgaggcctcaactcagaccagctgagcatgctgagaaacaagctgttcgggcagaactgtaggactgaggatccattattgtcctgggctgacttcactaagcgagagagccctcctggcaagttaccattctggacatggctggacaaaattctggagttggtacatgaccacctgaaggatctctggaatgatggacgcatcatgggctttgtgagtcggagccaggggcgccggctgctgaagaagaccatgtctggcacctttctactgcgcttcagtgaatcgtcagaagggggcattacctgctcctgggtggagcaccaggatgatgacaaggtgctcatctactctgtgcaaccgtacacgaaggaggtgctgcagtcactcccgctgactgaaatcatccgccattaccagttgctcactgaggagaatatacctgaaaacccactgcgcttcctctatccccgaatcccccgggatgaagcttttgggtgctactaccaggagaaagttaatctccaggaacggaggaaatacctgaaacacaggctcattgtggtctctaatagacaggtggatgaactgcaacaaccgctggagcttaagccagagccagagctggagtcattagagctggaactagggctggcgccagagccagagctcagcctggacttagagccactgctgaaggcagggctggatctggggccagagctagagtctgtgctggagtccactctggagcctgtgatagagcccacactatgcatggtatcacaaacagtgccagagccagaccaaggacctgtatcacagccagtgccagagccagatttgccctgtgatctgagacatttgaacactgagccaatggaaatcttcagaaactgtgtaaagattgaagaaatcatgccgaatggtgacccactgttggctggccagaacaccgtggatgaggtttacgtctcccgccccagccacttctacactgatggacccttgatgccttctgacttctaggaaccacatttcctctgttcttttcatatctcttgcccttcctactcctcatagcatgatattgttctccaaggatgggaatcaggcatgtgtcccttccaagctgtgttaactgttcaaactcaggcctgtgtgactccattggggtgagaggtgaaagcataacatgggtacagaggggacaacaatgaatcagaacagatgctgagccataggtctaaataggatcctggaggctgcctgctgtgctgggaggtataggggtcctgggggcaggccagggcagttgacaggtacttggagggctcagggcagtggcttctttccagtatggaaggatttcaacattttaatagttggttaggctaaactggtgcatactggcattggcccttggtggggagcacagacacaggataggactccatttctttcttccattccttcatgtctaggataacttgctttcttctttcctttactcctggctcaagccctgaatttcttcttttcctgcaggggttgagagctttctgccttagcctaccatgtgaaactctaccctgaagaaagggatggataggaagtagacctctttttcttaccagtctcctcccctactctgcccctaagctggctgtacctgttcctcccccataaaatgatcctgccaatctaatgtgagtgtgaagctttgcacactagtttatgctacctagtctccactttctcaatgcttaggagacagatcactcctggaggctggggatggtaggattgctggggatttttttttttttaaacagggtctcactctgttgcccaggctagagtgcaatggtgcaatcacagctcactgcagcctcaacctcctgggttcaagcaatcctcctacctcagcctcctgggtagctagcaccatggcatgcgccaccatgccctattttttttttttaaagacagggtcttgctatattgcccaggctggtcttgaactgggctcaagtgatcctcacgccttggcctcccaaagtgctgggattataggcatgagccactgtgcttggccaggaattttttttttttttttttgagatggagtttctctcttgttgtccaggctggagtgcaatggtgtgatctcggctcactgcaacctccgccttccgggttcaagtgactctcctgcctcagcctccccagtagctgggattacagatctgcaccaccatgcccagctaattttgtatttttagtagagacggggtttctccatgttggtcaggctggtctcgaactcctgacctcaagtgatctgtccacctcggcctcccagagtgctgggattacaggcgtgagccactgttcccagcaggaatttcttttttatagtattggataaagtttggtgtttttacagaggagaagcaatgggtcttagctctttctctattatgttatcatcctcccttttttgtacaatatgttgtttacctgaaaggaaggtttctattcgttggttgtggacctggacaaagtccaagtctgtggaacttaaaaccttgaaggtctgtcataggactctggacaatctcacaccttagctattcccagggaaccccagggggcaactgacattgctccaagatgttctcctgatgtagcttgagatataaaggaaaggccctgcacaggtggctgtttcttgtctgttatgtcagaggaacagtcctgttcagaaaggggctcttctgagcagaaatggctaataaactttgtgctgatctggaaaaaaaaaaaaaaaaaaaaaaaaaaaaaaaaaaaaaaaaaaaaaaaaaaaaaaaaaaaaaaaaaaaaaaaaaaaaaaaaa

SEQ ID NO: 28358 - DNA, 4365 bp, Homo Sapiens
tgttttttttttttttttttttaaaaatagtaaaatttgtaattttattatgggcttaaagtatatatcttgggaaacaatacgtttatgaaaaacagtggtttgggttctgatggcagttattaatcagtaacaccagtatgggagagaatgaatgtgttataggttatgaaggctaacttggaaaaaaaggtttattctacaatagaacactggagaagtaaaagcaattaaaatgtaaacaaactgtaaacaagaaataccatccctctctctttacctgactagtaaatagtctatataaactacatagacatcaaaggttttatatatgtacacagccaacataatatcaaaatatattttattctggacctctttcagatctgattcaaattacagttgtcaaagcaatacaatgcaaaggggaactgcaacaacaacaacaacaagaaatgtgcctagaaaggataaaagggtcactggggacaaatcattgtgatgtggaactaaaatacgtcgtaagtgtaattaacatggtccaggacagcacagaacatctacatcagtcttccttacacaataatcatgaaaactgaacaatgaagttctttaacatgtacaaaaacctgtcatgggctggtttacacttttacaacagttttaaagttaactggataactaaagaaatgatgcagacattttaatccagtgctataggtaggctcacagaattagacccaaaggatttgtaaaaacaaaaatggaaacagtatagctacaatgtcaaagtcaggaaagaagaaaatttacttccgtattcaaggattacagagctacaaatgcagtctgtgtgtttttgtttgtaatgagatggataagtacatcagactagatacaacatgcagaatgttttcctgaacttatccggaaattccaaagaaaacatcatgaaacagcttacaaaaaaaaaaaaaatatatgccctagttattcaccctgcttcaacactgtcaacgtaaaggcagaaataaagcaagctatcaatacctcagaactactgatataagacatcaaatttctaaatcagtgtattaaaaaagtgaacacttcctctttcttctctcttctacatttaactagaatcatgtttaaaaaaaactgatattaaatgtgacacttcagagctactactggaaggagtaattcataacttccctaccctccttccatccctgctgattcaggagaagggggaaaaaacaaagaaaacaaaacgaaaaaccaaccagggtctcctgtagatttgctgctattccacaaaatgttggcatttgctgccatgccacaatgttggtccactgaaataggatttctgcggaaactgtcaacagtagtaattcaccatatgcaagtaccatccttatcatgcgagaataatcacaggttctgtagaaatgtacaatgtacttaagataatgaaaattgtagcgctgcatttgagatttatttctctacttagctagtaaaacttgtcatttttgctcacttaagtatgatcatttgtgattcctttaaatagcaaaaatgcacagtcctctttaggcctctactcaataatagtttacattactcttaacaaaatcattctacataaacagatagctccttaaaaatagtactctctcattaaatctaatttgacagaaagaagtttaagggaaaaaggagtgctttgtaagtgaaaaagtacaaatctttggcctttctcttgacattttcgtatgtcaaaaagcaaaaaaccttcatgtatttcaatctagtgattactttttgcaccataatttgttttttacaccacaaaaggaggcactttcagtatctgtaaaaggtatttaatcctaaaacatacttacctagagaataattaaaacagaattcaatacaatctagtatctattaggaaattaagagttatcacttctaaaagtcatttgaaagtcaatgatgttatctggtcaatggcaggaaatgggaactggaacaaatataagaacttatgggatttcctacacggagacaaaaaaagatattcctttatgttgtttaaaagtggcagctgctctttctttattccattttaatcaatgagtattgattcaagttttcctttctatttttccttatgataagtttcttacagtagcttatacaacaacaaatagcatagaaaaactactggattcaattgatcatcaggaataagttctcagaaaaacacaggcggaaaaataagcaagaatcccaaacacagaactttacaagctgtgaaacttggtctcttgcaatcatgttactgctcaaattagagacaatcttattgctgtctattggagcagcatcgtggcacatcagcaggcaatgatgatgttgagaacagcagcaaaaataaacaatcgtatgctcatgaagaacccaagcctacaaaatggatacctttcagaaaagtatatacttaaaagacccaagacgtcaggataataaagctctgtatttataatcttttatatgtcctattgtggctattatgcttaagtaaaatagctaaagaaaaaaaagaaaaaaaaaacagaaaagatgacaatatcataaaaatgtagctgtctattttggcagctatattgcagaatttcttgactatcttttaatcagctgggaaaaagtcaataactgtatgcaaatgaataaactgtccatatcaaaatacaaaagtactatcaataatcacctctgactttcagatttaaattcagtgcaattgacaaatgcatcactaaaggaaaatgcagcttaaaagatactcaaaacatttgtgtctattcctgggagcacattttaaaattattgcacagatttttttaatttttatttattttttttaaacaataacagaggtcaaccacagatgtggacctccagcaataaaagcaggaattcaagtgccagatactcagcatattaggtttcctacgtaagtcacagggtaatatgttctaaatatctctaatgtgatccaaaaccctaaaaagagctggcacaaaaccatcgtgaatgactgcctctcttgatgtaaatttttaaaaatattattacagtatcatagtccccactaacaacaactggggtacatataacaatgtattgtgaaattaagtgtatttattctctttaccaatagcaaatgctaccctaccttagtaaaaccaagacttgcttcaatcaatgctgttttgtaaaaatagcaaagcaacgaatgctgaaatcaatcaaagctgcattacttgggttaaatcagtttctacttagaacacaggttaaaattttagtactaaaaggcctcaaaataattagtgacagaaatagtgttattaatttgctaagctcaacaataagcaattccttaattaaaatcttcgagatataaatttgatgactattctcttcagaaatgacatacctggattatgttaatcatgacaagccttattagtcacacatataaacatggcctcatgcaatcatttgtctgtatatgttactctaagttgcatgagcacaaggtttaatatctatatcttcaagaaaatacttgatattataaacagagtaaaagacatgatatagtagtgattactaaaaaaaaaaaaaattagcagcttaaatctatctatatttgaaaaaacgtagtcacaagtaccacaaatgcagaatcagagcagcaggaagaaggttagtgcaattatactttcattaaaaaaaattctgaatcactgctatttaaaaacaccttgaagcaagtcttttgtttgagattgttttttaaactaaggtagcaaacattttgccatgtaatggcagtgttatatgccgttatcttgctttgtataaagaaaacaacatgagagatttttaatactggagtttggttacattacatatttaagcttctacacagaatggtggacacttcgagaagctaatccttatccagaaacattttaatctcttaaaaaacaaagcaaaacaaacaaacaacaaaaaacccaaaactacgttgctccttttcacaatagtgcacatttttaccataatttagttatggctacaaaacatcagaagattttttttaatgtatcttctctatggtaattaaaaaaaaagttgtgcccttctagtctttaattggcagaaatatgtcccaaaaaagaaactattgcatttaagccacatcaccaaaaaacaaaaaaaaaaaaaaaaaaaaaaaaaaaaaaaggaaaaaaaaaaaaaaaaaaaaaaaaaaaaaag

SEQ ID NO: 28359 - DNA, 4871 bp, Homo Sapiens
ttctagaggccgaggcggcccacatgtcttttttttttttttgtttgtttttttgtagtggtaaatggagattattttttgtagcttatgaatatatttgtttctgaaatgattcttttctttttttaaaaaagtgagatttgtaaaagaaaaaaaatactttcctgaaatgtgtagggtgttattagcttgttagattttctaactttttttttcttacttttcaggctggagtgagacagctctacgtacagattgactttgcagccatgtagtgaatggaaagaaattatgcaccttttatggaccaaatttttctggtactgtacgatccaaaacattgtacccagctttttaaaagagagaaattatcactacaactcccgagcactaagtagacggggtagagtcagccgttcatgctttgtggggagttcacagctaagggatcagatttaagaggatatctcctggacttttggtcttttcttttgtgctctttcctccaaatctttttgacttctgaggtttttagcttaggatgttaatttgtccttttgtctttctttttttgtttttgttttctgtttgtttgttttcatgttgaatgcccacaccaccatcctctcatcccagccagtaagaatttcagttgtgggcctccagtcttctggaatgtcttcactgcagctgctggaaatcactgctttcattcccacaaaaccagtattacttttttttaaaaaaagaaagaaattggaaatctgtgctatacgtaatgtcataattgttgacgttcttcagtataatcatgtttgttaaattgtttgtaccttgcaaacttatgaaccaaaccatattgggttttcaaagtgcctttgtatccaaaaatgtatttgccagcatagaaatgtaccatcaagagtcatgtatgttttatttttgtttttattttttattttttgagatggagtctcgctctgtagccaggctggagtgcagtggcataatctcagctcactgcaacctctgcttcccgggttcaagctattctcctgcctcagccttctgagtagctgcgactatgggcgtgtgccaccatgcccagctaatttttgcatttttagtagagatggggtttcaccatgttggccaggatggtcttgatctcttgacctcgtgatccgtccacctcagcctcccaaagtgctgggattacaggtgtgagccaccacgcccggctatgtttttttttttttttttttttttaacaatggatattctgtaaaatatcctgtacaaaacaagactattgccagtaatgtatacaaattgtctttttgtgtacttccagcataggtttggatatatgaacatttttcttttattgttttatcttcacagaaaataaaaggtgttaatttgctttttaaaacaaatttaattatcacattttaaattactttgtggactgtgttttcaaaactttgcaaattcatctgttacacagaaaattttgacttaaaacatctgctgaattccaaatttctgtaatagctactgtatctgtgataaactttcctatatctttccttgccatttctatggattttataatgaaagaaaaaggcattggagactgaaggcagaaatggttgtgacagtgctgtttggctttttcattcttcaaatgccaagtcatccactttgttttcctgtttaggctttgcacaaatacaattgctttcaggaatcctaaagcagcattttattgagtttgaattattaaaggtacagaggaaatgtggtgatgtagaacttttcctaacacaggtatctaggaagtaagtgctgagttgattttctaggttcttacgtatttgaaaaataaaattgcaattcgagataagtgcttgagcactctacttaagtattctctgtgttttatgaagagaaaatgatctgattttcccttatacttcattttacaatacatattcccttttaacttaaaaaaattgtaaatgtgggagaaaaaaccctgcaggatggaaacaattattaagaatgtagatcaataagtactttttagtgatgtggcagaaatccctgttgattctaagttttagagtgtcttttcccctatttctgacctacaactataaactactctctattaggagaactagaccactttcttcattcttttctaaactgctgcagattgccgtgaactctatcaatagtctcttttccgcaggcaaagtggcattttctaaacatgtttgcttactgccaggtggtttgaaatctatgatttactgcagtagtatgtgcttaaaacaactgttgaggtcttttaagcaggaaagttcaaaaggaagtgtcctgataatggtactggtttttctacaaatataagtagtcattagaagtttgcaaccaccaccaagtctgagagaactctgggatattctgtgggttttggcatattagatagagaaaatgacagatctagatgaagggagcttttggatgtgtgcctttaaaaactgattatgtataaatactgatatttcacatacggagatatttgaagacccaagtctgcctttcacagagccctccattccaagtttagtttttgtcaaaatatgaatcattttatttgactgtactatcagtacacaaatgcatgagtatgtttatacagtgttagactgatgtgaatttgcatttgttacattacattgccagcgcatatcatttagcaagttggcattaacatttatgctttaattaaatgccagtatacctatgtgtgcagcagtaaaaaattagtgagaaaaagcaactttttgtcactcttaggaaatattttgtcttattagtgttcttggcacatgtatattactaaagtagataattccaatgagaaatactaccagattattgttataaaattaatttacaatgtccctgatattgagctaactcttaaaaaaaccaaacaaaactcgtatctgagtgtaactttgccaatattttaaaagccaaaatattctctggacaacaaatttgtattgctcagggacagtttaccttgcctggtaaaccttcccaaacagaaatatagctatactatctttggttttgtttttttgttttttttgtttgtttgtattagatggaatttcactcttgtcgcccaggctggagtgtagtggcgcagtctcagctcactgcaacctccacctcccgggttcaagtgattctcctgtctcagctccctgagtaactggaattacaggtgcacgccaccacgcccggctaatttttgtgtttttagcagagacagggtttcaccacgttggccagggtggtcttggactcctgacctcaggtcatcctcctgcctcggcctcccaaagtgctgagactacaggtgtgagccaccgtgctcagccactagctttggttttttaaacatagattatattcctcaagatgaagggcttaacatatccacagcttcctcagtttgctaactccccatgcatctttgtgaaggacagtatctagtttatctgtaggtcagtgttccttgtgctgtcatttcccttatatctggaatttgtcagcattcctgaaaacctacacgtgtatatcagtaaccaaaatgctatgccttttttgcacctttgtacagcagccaaatcatgaactcaaaatgtatttgatcacagttctataatgtttttacctacctattatggaataatcagtttttacagagattattaatatggtagaaccctgttatgtaattccaaaacttaagaaccatatttacattgcttaacacagaattttacatctaagcaaggactggctttagaagcagtgtagttctacctctcattttacagatgagaaaaccgaagcccagaaaaactctcatttgctcaaagtcacagagaaaattagtggcaaagccaaaaagattcagatcttctgactcgaagttgagagttctttatactctattatgctgcctctccagtgtaatatttgcctttctgtaaatgggattaaatatgatttgtaaataaaggacatctgacctccttttttggtacattaaggcactttataaatggacttttattgtctcatttttcgtatataattatttccatcatattctttatggaagatgcaattaattttaacttttttactcttataaaaccagttcctgacattttaaaaaacaatatctgtaaaatggatccttttatgagtgaatttttctgctaattgcccaaggctaaatccaatttaaggattgcttagtttctttattttgtttatggtctctgaactggtatttttttataaaccaggctaattcacaggtcataccatttcattcttgtcgtgttggcttccagtcactggaaaagcttttgcattttaaagatttttagagccatgcaaaactgggcattaaatgttgcataaagcaaatcttttaagtaaggtaaaatgttgaagtcttaaccagaattcctacaactaattactaaaactgctatttctaactcttcatgaaagcattacctttggaaagttaaactttttttttcctttcatcaccgtctttgaaacaaattattttccaattcataagaactttggtaaaaaaaaaaataaaaggaaattatatgtttttctttggacattcattggaaggcttgttgaagacatgatcccccagaagccttagtgacccagatctcaaccagagactcaagatagcctcaaatacagtgaaagattatgtatccagaaaaaaaaaaaaaaaaaaa

SEQ ID NO: 28360 - DNA, 5182 bp, Homo Sapiens
agttggaaagagaccacagactttgagggaagctcactcaggatctgctctccggcaaagtagtaagtgaggtgctgagagcagaatgagctactttgtggattctgctgggagcagccccgtcccttactcagcgcctcgtcctgcagtggtgaggcaaggacctagcaacacttatgaagatcctcgaatgaactgtggtttccagtccaattatcaccagcaaagaccttgctaccccttttgggatgagatggcaactcaggaagttcctactggtcttgaacactgtgtctcagatatggaatgtgcagatgtcccactattaactccaagcagcaaagaaatgatgtctcaagcattaaaagctactttcagtggtttcactaaagaacagcaacgactggggatcccaaaagacccccggcagtggacagaaacccatgttcgggactgggtgatgtgggctgtgaatgaattcagcctgaaaggtgtagacttccagaagttctgtatgaatggagcagccctctgcgccctgggtaaagactgctttctcgagctggccccagactttgttggggacatcttatgggaacatctagagatcctgcagaaagaggatgtgaaaccatatcaagttaatggagtcaacccagcctatccagaatcccgctatacctcggattacttcattagctatggtattgagcatgcccagtgtgttccaccatcggagttctcagagcccagcttcatcacagagtcctatcagacgctccatcccatcagctcggaagagctcctctccctcaagtatgagaatgactacccctcggtcattctccgagaccctctccagacagacaccttgcagaatgactactttgctatcaaacaagaagtcgtcaccccagacaacatgtgcatggggaggaccagtcgtggtaaactcgggggccaggactcttttgaaagcatagagagctacgatagttgtgatcgcctcacccagtcctggagcagccagtcatctttcaacagcctgcagcgtgttccctcctatgacagcttcgactcagaggactatccggctgccctgcccaaccacaagcccaagggcaccttcaaggactatgtgcgggaccgtgctgacctcaataaggacaagcctgtcattcctgctgctgccctagctggctacacaggcagtggaccaatccagctatggcagtttcttctggaattactcactgataaatcctgtcagtcttttatcagctggacaggagatggctgggaattcaaactttctgacccagatgaggtggccaggagatggggaaagaggaaaaacaaacctaagatgaattatgagaaactgagccgtggcctacgctactattacgacaaaaacatcatccacaagacagcggggaaacgctacgtgtaccgctttgtgtgtgacctgcagagcctgctggggtacacccctgaggagctgcacgccatgctggacgtcaagccagatgccgacgagtgatggcactgaaggggctggggaaaccctgctgagaccttccaaggacagccgtgttggttggactctgaattttgaattgttattctattttttattttccagaactcattttttaccttcaggggtgggagctaagtcagttgcagctgtaatcaattgtgcgcagttgggaaaggaaagccaggacttgtggggtgggtgggaccagaaattcttgagcaaattttcaggagagggagaagggccttctcagaagcttgaaggctctggcttaacagagaaagagactaatgtgtccaatcatttttaaaaatcatccatgaaaaagtgtcttgagttgtggacccattagcaagtgacattgtcacatcagaactcatggaactgatgtaaggcaattaatttgcttctgtttttaggtctgggagggcaaaaaagaggtgggtgggatgaaacatgttttggggggggatgcactgaaaatctgagaactatttacctatcactctagttttgaagcaaagatggacttcagtggggaggggccaaaaccgttgttgtgttaaaatttattttattaaattttgtgccagtattttttttcttaaaaatcgtcttaagctctaaggtggtctcagtattgcaatatcatgtaagtttgtttttatttgccggctgaggattctgtcacaatgaaagaaaactgtttatatagaccccattggaaaagcaaaacgctctcactgagatcagggatcccaaattcatgggacttatataagaaggacaattaatgctgatttgggtacaggggaattatgtgtgtgaatgtcatctacaattaaaaaaattagcacatccctttacttacttgttatcagtggattctcggggtttggacttaatgttgagctaagaagcattaagtctttgaactgaatgtattttgcatccctggttttggacgacagtaaacgtaggagcactgttgaagtcctggaagggagatcgaaggaggaagattgacttggttctttcttagtcctatatctgtagcatagatgacttggaataaaagctgtatgcatgggcattacccctcaggtcctaagaaataagtcctgaatgcatgtcgttccaaactaacactctgtaatttttcttttatgtcttattttccaagagtcctccattttttgcaccccctcaccgccaactctgttattcagtagagagaagtgtacggctttctgattggtgagtgaaaaagtaacttgagacacgacctaagttgaagagtttagacttgctgagttttagaagtgatggaaattaagagagcatttcaataaaatgtgacttggctgtctttggaagagaagtgcaaggctttcctttgaagaatttaaattagtccggtaggatgtcaggtgagactgtgtatgcaaaatgaatggcacaggtgatgccagggcctcttgcttgggtctgatgtcttggcacagggtaagtgaaggttaattccagaagagaggaatgacttgaaggcaaaggaaactaaggaaggaggttcagtgaggaaaataaggttgtccatgagatttgaatagatttttagttcccccaaggtttaaatacaaacatagtcaagcaaggtagtcatctttctgctggttgtgagggggaatctgaaaatggagttttagaggaaaagtcaacatctaactagtgaggaaaagtgcctaatacaattagaatctccctcactctatagttgcccagttgaacggataaggaggaggggtggcttttatggacttccatgagagaaggaaagaaatatttcaggtaagcttctcagggctggccctttttgggatttggatgagaaattggaagtactaactactttctagcatatctttaagaaaattgattgttatttactcccagatcctcttgcagacccagaattatcaggaacatagctctgtgattcatgagtgtccccatactgatgaattggagcatccatatggaaagcaaaggcagaattatcccagctgtattattttgatcttttggatgcaggtgccttaatgaagctctcaaaatattttaggagctgctcagggagtgttgggtggaactgtttggactacattgttttctcttagattatgtgatttttgttgggcactggcaaaaggtgtgtgtgtgaatgtgtgcatgtgtgtgaatgttgtgtgtgtgtgtgtgtgtgtgtgcgtgtttgtgtgtgtgtgtgtgtgtttgcagacatgcaaaactgcagctgaaataataccttagatttctaggtaagtctttccacatttcaataatgggtaagagtagaaccagggccgggtatcaattattgcttgctgtttgcaaccaggcataaaatcactttctcaaatcatccaccgttcctattaaatttatgccggaaacactccttctgtgagtataactcctgcagttcctatagcagataagatataagaaagtgcctcctagtgctcctccgcccgcttgtttgctaaaattccctttctctctaagtccaccattttcaagatttgtagatagtgtattagttaagacagctttgtcgatctggccagatgttttttctcctttgtccaaaggccagagaccatcccaggaagagtggtgggtggtttatacactggaaatgttgcgtttatgctttttaaaaacacacgttaacttcagaggaaggatgggcaaatctggtctagctgggtgaaacccttattttcccagagatgccttaacctttgttggttttggctttagggttcagagtcacttttgttcccttctccattctggagagggacttcccctacatagagccctgatttttgtggctgtggggattggaggtagcattcaaagatcagatgtgcttttcctcactttggagatgaacactctgggttttacagcattaacctgcctaaccttcatggtgagaaatacaccatctctcttctagtcatgctgtgcatgccgcttactctgttggggtctatataaatttgttgaactcttacctacattccaaagaagtttcaaggaaccataaatatatgtatacatatacatatataaaatatatatattaaaataaaattatcaggaatactgcctcagttattgaacttttttttttaagaatactttttttttaagctgagaagtatagggatgaaaaagatgttatattgtgtttgactattttccaacttatattttcatataatttatattttttaaaagctgaaaatttagaagcaagatgaaaaaaaggaaaagcaggtgctttttaaaaatcagaactgaggtagcttagagatgtagcgatgtaagtgtcgatgtttttttaaaaaaaaatgcaaaaaaattcttatggcggagttttttgtttgtttattttagtagctgatgctggcacatcattttgctggagagttttttatatactgtagcctgatttcatattgtattttaaactgtgtgaaattaaaaacaaagaatttcattcataaaaaaaaaaaaaaaaaaaaaaaaaaaaaaaaaaaaaaaaaa

SEQ ID NO: 28361 - DNA, 2334 bp, Homo Sapiens
gcaggtcatggcgctggctgctcgactgtggcgccttctgcctttccgacgtggagccgccccggggtctcgtctccctgcggggacttcgggcagccgcgggcattgcggcccccgtcgattccgcggcttcgaggtaatgggaaacccaggaactttcaacagaggccttttactctcagctttgtcgtatttgggttttgaaacttaccaggttatctctcaggctgctgtggttcatgccacagccaaagttgaagaaatacttgaacaagcagactacctgtatgaaagcggagaaacagatacagacagaagctgctcagttgcttacaagttccagtgagaagaattgagaacttttcagagaagatttatgaaatagctaataaacattgccttttcttttaattctaaacttaatatatgaactataactgttctacggctttttaaatgttgtgaccatttaaccgtgtaaatataaaatattctaggcttcttcacaaataatagggtaaaataaataatcgccataagagtggtagaaataaatctccatggctcaggcaaagagattattttgcatcctggataccagcaatgcaaaatggtatgagatttctaaggattgatcacattgggatgggagatcaagcaaagaaatatttgtagaggaggggaaatggatctataggggatatacagggggatggattttcaaattggattgattctaagttgaaatcttgaagagaaggtgtggtgacagtggttaggatgttgtgggttcctgacataaagtagttaaatgatatatcttggagctaacctgtgtaagtaaagaactaagtaaggagatgactaaaaatggagtagtttccttttttatttttttgagacagagtctcactttgtttcccaggctggtgtgcagtggcacaatctcggcccactgcagcctccgcctcccgggttcaagtgattctcctgccttagcctcctgagtggctgggattacagggttgtaccaccacactcggctaacttttgtatttttggtagagatggggttttgccatgttggctaggctggtctcaaactcctggcctcaagtgatctgcccgccttggcctcccaaattgctgggattacaggcgtgagccaccgcacctggccagtttactttaaatgtggtgtagtctcatggtaaactgaatttgtcatcagatgcaaagttctattccctaatggaatggaaggaacacaaaacttaagagtgaaatggaatactaagatgtttttaaataggcaggactatgctactcacttgaggctggagtgccaccactgcaaaatctttttaagttttgtaaaaaggagcatcttgaatccacttagataaagagagactgtgtgtgtaggtggatttttcccaaaggatttgggaattgtaatgttacaatgaactgtatggatatgtttgtcatgtacattttcaaacaaaaaggaaaactgaaagtaatgatctttgtatacccatctcttagattcagtgattttgctatataggttgtgtatccctcatctgaaatacttgggactagtagaagcatcttggatttgggatgtttttccaaattttggaatacctgcatacacacaataagatatcttggagatgggacccaagtttaaacacaaattcacttgtttcatatataccttatgcacatagcttgaaggtaactttatataacattatttttaataattttgtgcattgagaccaagtttgcataccttgaaccatcagaaagcaaaggtgtcattatctcagccactcatgtgggtaatttgtggttggttgatgtcaccatcattcctgactgaatgtatatgctaccaataagcagttattttcttatacttattcatgcataagtacttaacagtaaaaaatatgacataactcgcacaggaacaaggatggcaaaaaaaaaaaaatatgacacaccactgatacagtgaaaaaataatgtggtcagggtagctaggcaacagtagcatcaccagaaacctgtatcagctgttaaacggcaacaacaatggcaggctttcagtttcccacttaatgatgctgtattttaaaaggttattgtatactgtaattttatttttgtaggtgaagagaaacagaagcagctgaagggccaggaagtgggtctttctagggatgtggcattctgctggatggctttttaaaatgggttttttcctttagggagaccgaataaactgtgttgtgcacctgcaaaaaaaaaaaaaaaaaa

SEQ ID NO: 28362 - DNA, 9747 bp, Homo Sapiens
aggggcgagaaagcgccatggcggcggcggcggcggcggctgtgtccggtgctcacgccgcggcgaggttcactaagaatctttccccagacaaaatcaacctgagcaccctgaaaggggagggtcagctgaccaacctggagctggatgaagaggttctacagaatgtactggagctgcccacctggttagccatcactcgggtctactgcaacagggcctccatccggatccagtggacaaggttgaagacacaccctatttgcttgtgtctggataaggtagaggtggagatgaagacatgtgaggatcctcggccccccaatggacagtctcccattgcccttgcttcaggacagagtgaatatggctttgccgaaaaggtggtggaagggatgttcatcattgtcaattctatcaccatcaagattcactccaaggccttccacgcttcttttgaattgtggcagctccagggctatagtgtcaaccccaactggcagcagagtgaccttcgccttacccgcatcactgacccctgccgaggagaggttttaacatttaaggaaataacttggcaaacactccgaattgaggcagatgctacagacaatggtgatcaggacccagtcaccactccattgaggcttattacgaaccaaggcaggatccaaatagccctcaaaagaagaaccaaagattgcaatgtgatatcctccaagctgatgttcctgttggatgacctgctctgggtgctgactgactcacagctcaaggctatgatgaagtatgcagagtcactgagtgaagccatggagaagtcagcccatcaaagaaagagcctggcccctgaacctgtgcagatcactccaccagctcccagtgcccagcagtcctgggcccaggcatttggtggcagccagggcaacagcaacagcagcagcagccgcctcagccagtactttgagaaatttgatgtgaaagagtcctcctaccatctgctcatctcccgcctggacctgcacatttgtgatgatagccagtcccgagagccaggttaggaaaactctgaatggggccaattctcgcatagcccaaaatattgagggcagattcctggattcatccctgaccgcttaacaggaggttgccagagattgcagtgcatgctcagaggggtgctggaaatatccctcttcaagaggacgtctggaaacttgcaggtgatagctgcaaacattgggtacgccactgtgaggccatggggacccgaggccagtgggcccagaagctggtgatggaatttcagagcaaaatggagaagtggcatgaagagacgggtctgaaaccaccctggcaccttggagtagactctctctttcggagaaaagcagattctctttccagtcctcgaaagaaccctcttgagagaagcccctctcagggcagacagcctgcctttcggcctccagcatggaaccgcttacgctctagctgcatggtggtacgggtggatgacctggacatccaccaggtttccaccgctggacagccaagtaaaaagccatctacactcctttcctgcagtcggaaacttcacaacctccctacccaggtctctgccattcatattgagttcacagagtattacttcccagataatcaggagcttccagttccttgtcctaatctctacattcagttaaatggtctgacatttactatggatcctgtcagtttgctctggggaaacctcttttgcctggatttataccgcagcttggagcagttcaaagctatctacaagctggaagattcaagtcagaaagatgaacacctggacatccgactagatgcattctggttgaaggtgagctttccactggaaaagagagagcgggcagagttgcatcgtccccaggcccttgtcttctctgcgtcaggcatgattgccaccaatacacgtcatgctccacattgtagttgttcagacctccagagtctcttccggggttttgctgctgctgagttctttcattccaattatgatcactttcctaaggttccaggtggctttagccttctgcacatgctttttttgcatcatgcctttcagatggattcctgcctgcctcagcctaataccctccctccccagagacctaaggcttcctgggatctctggtctgtccactttacccagatctccttggactttgagggaacagaaaacttcaaaggccataccttgaattttgtagcccccttccccctgtccatttgggcctgcctacccctccgctggcagcaagcccaggcacggaagcttcttttggcctcagaggggaggctgaaaccatcagccagttttggaagtcctgtccagtctgaggctcttgcccctgactctatgtcccatccgcggtcaaagactgaacatgacttgaaaagcttatcaggacttacagaagtcatggaaattctgaaagaaggcagtagtggtatggacaacaaagggcctctgacagagctggaggatgtagtagatgttcatatgcttgtacattccccggcccatgtccgcgtgaggcttgaccactaccagtacttggctctgctttcgcctgaaggaggtgctgcagaggcttcaggagcagctgactaaggatacagagtcaatgactgggtctcccctgcagaatcagacagcttgcattggagttctctttcccagtgctgaagtggctctgcttatgcatcctgcacccggtgctgtcgatgctgactctgcaggctcagatagcactagcctcgtagattcagagctatctccttcagaggatcgggaactgaagtctgatgcctcatcagaccagggcccagcaagccctgagaaggtcttggaggaaagtagcattgaaaatcaggatgtatcccaggagaggccacatagcaatggagaactgcaggactcaggtccacttgcccagcagctggcagggaagggccatgaggcagtagagtccctacaggccaagaaactgagcagaacccatgcctccagctcaccagctgcattgaagcccccagctggcagggagactgctgtgaatggacagggtgagctcatccccttgaagaacattgagggagaattgtcaagtgctattcacatgaccaaggatgccaccaaggaggctctacatgccaccatggacctcaccaaggaagctgtgtccctgactaaggatgccttcagtttgggcagagatcgaatgacctccaccatgcacaagatgttgtccctgcccccagccaaagaccaggttttgccatgttgcccaggctggtctcgaactcctggattcaagccatctgcctgccttggcctcccaaagtgctgggaatataggcggagcccatggccaagacagatgagggggtggcagccccagtgagtggaggtgctgcacgactccgatttttctccatgaagaggacagtatctcaacagtcatttgatggtgtctcattggatagcagtggccctgaagaccggatttcagtggacagtgatggcagtgatagctttgtgatgctcttggagtctgagtctggtccagaatctgttccaccaggatctctttcaaatgtctcagataatgctggtgttcaagggagccctcttgtgaataattatggccaggggtcaccagcagccaacagttcagtttcacccagtggagaagacctcatctttcacccggtctcagttctggtcctgaaggtgaatgaggtgtcttttgggattgaggtacgtggtgaggacctgactgtggccctgcaagcagaggaactgaccctccagcagctgggcaccgtgggactctggcagttcctgcatggacagtgcccaggtacatgctttcaggaatcctcaactttgaagactggccacatcaggccagctgtgggccttcgctttgaggtggggcctggagcagctgttcattcccccctggcctcacaaaatggcttcctacatttattgcttcatggctgtgacctcgagctgctcacttcagtgctcagtggcctggggcccttcttggaggatgaggagatcccggtggtagtccccatgcagattgagcttctgaactccagcatcaccctaaaggatgatatcccccccatctatccaacatctccaggccccatccccatcactctggccatggaacatgttgtgctgaagaggagtgatgatggtgtgttccacataggcgctgctgctcaggacaaaccatcagctgaagtacttaaaagtgagaagagacagcccccaaaagaacaggtgtttttggtgcccacaggagaggtttttgaacagcaggtgaaagaactgcctatcctacaaaaagaacttatagaaactaaacaagccttggccaatgccaaccaggataaagaaaaacttcttcaggagattaggaaatataaccccttctttgagctctgaaaccagtggctcagccatctgtgccaaggagagaggctatcaccagcaatagcaccacctaggacagagggcactgtccagtgctgaataagtcactacggatgccagagggactggggagcactcacttcacttgtgtgggtgtgctttccactagctgttcttacttggactgaggacaagggcaaagcatgattgtatcccaggaaacgggcttgccctgtgtgtggcacaagcatcatgtcttgcctgtataaagccttttggtcctctgtgtactaggtggaatcttctcaacactgtagggccatttcacctcatggtttcatggcagggacatttgcttccttcacaggcctgtgtgaacaagcaaaagtacccacctcctcggtcacccacagagccaccaaagattccatgtcccagagcttcccatagcagacctgaaaagtccatgacctgagctttggccatggtagtggagtggaacaggaaatagtccagcagaggagtgtgggggaagggggcaggagaggcacaagaataagggagacctggactctgcctttttgggaaaaggaaccaagctcatagcaatttggctgataacacaatcagatttttccaggttaagcttcctttctgttatactttcatcattgtgatgctgtggtagaaagtaaataacagtagtggctcagtcatttaatctttcccctctataacacaacttacttgaaatttaaatcaagaaaaaatttctgacgctgagctaggttggtggcatgatatgccaggggtcagtgggggagcttgcttctgagccccctgttgtctgcctggagtcctgcttgtctttcccagctgtgctgagtggctcttctgtctccctggggtccctggcacatctgctttcccagctctgtgaccttaccagttctctcctcagcccttggtggtttgggagctgaatatatgttttaaacttttacataaacaactcaacctgttgcctctcacttccctccatcactgtggcttttaaaactcatgtattttgactcaagtgaaaaaaacacaaaaatccctcatcccagctaggttttgccccctgccctataagagagctatttccccctttctttcctttgaattcttctccaacaccatcccttcattcatactgccctgtgatacacttgaagctgtgttgattggacagacgttcatcagctaacttacctttacttggcaagatggtaaaatagtaacttagtgatgttactaaagtctcgaccattcacctttccatactgaaggaaaggtaaaaaggcttcttctatgggaaattatgcttgacttgcatactctagtttgatgaggataaaaagaaacatgtaattgcagtggtgtttacaactaattgatcacaaccaatcatagatttctttgttccttctccactctcaacacttcatttgactagaaaaaaaaaatgtattcaccaaggaacaggacccaatttgttcagacttttgttaagtttctttactaaggcaatttttgaaacaccagttactatgggatggtgggaatttttcatgcttaagaaatagagacttaggaacaaagaaacatctttctggagaagatgctaatgggaagttacctaaggcttgatgcttggttcaaccttatttaaaatttttataaatgacctgaaagtaggattttacagtgaaatcaaatgtcactacttccaggcagtgaaaggtaatctagaagaggtttaaaaaacacaaaaccggtcgggcacagcggctcacgcctgtaatcccagcactttgggaggccgaggcggggagatcacgagttcaggagatcgagaccatcctggccaacatggtgaaactttgtttccactaaaaatacaaaaattagctgggtgtggtggtgggtgcctgtagttccagctactcgggaggctgaagcaggagaatcgcttgaacccgggaggcagaggttgcagtgagccgagatagcgccattgcactccagcctgtcaacagagtgagactccgtctcacaacaaacaaacaaacacaaaaccacagaagggttactaataagcagggctgagaatactcagaaaactgacaggtgaggttcaacataatataaggaaatgtatttatggaagaattatcaactgatatgcctgaacactgttagaactcaggaaagaaacaagcattgctgagggggaggagagatcaatgtgctgctgtggccaaaagcctaattgccctgtgggcatcatcaggaagggcttttggagataacagagaacagcactttatacaaaaccatggatatgtcttgatcggattatctgtgtttctagtgaccttatttacaagatatatgataaagggaggaaaggtccagagaacagccaaaattatcaggggatggaggtatatccatatgaggacacatttttaaaatatagactctatcctgcaaagatgaaagcagaggggagttagatcaaatatccaatcaagagcaaggacccggtcctgtactactagctctagggctctatctcatagccttagtaaagaaagcacttctcatagcaaatcagaaatgtaaggagctcattgtctaagaagggatgccaccagaaactatacatgggtgcaggtttatgaggaatccttgcatgacggccttctacaaggaattatagaaaagtagggctacttggtaatatacaactgagagggtaactgtgtccctcaacaaactactccttagtgcctctttcaaaggcagaatgttgatctgaatggatcactggtcaagtatggcatctctaatgttcttgaagggggaggaaggagatctggtagctggaaaatataattattccacgttaggctcacctgaattggtttaaaatcatattctgattctcttctcatcccttcctcccctcacccaccatatacctctggcatccctccatgcaaagaaatgtcgaataggcatttcttggtataatttacctacacttgtgcttgtggggtgggagtaaaaacatatccagtaagtaccaaggctaacctcctaatggctggagctcagttaggtctctgggctctctaaaggagtccagagctcttgtccatgtcacaaatggagccttagaatttctgtctttccttatgtggcagctttggccattgtgtcttgaaattctccctcaggaaatgtgataggggatattatcccatgggattttagtaaaaatcagcttgcctaatttcatattcgtgttcataatgaagaaatgcgaagtggtggtagtcctcaggattaagtgtaaaggaaaatatgcaaggaaaaagtagcagtgtcagcccttttggactgcttatgatttctgccttagagctacaagacttggaacaagaaataacaatacctcaagaaaatgtctggagagatagcaccactgtccctcaaagacttcagccactgcacattaccaattcagctgtgaagcatttacaactgtattatctgtgattgtctgcatttcctgtttacatgcatgtgctggggatatgctttagtgtgtatggactagagtttaaatcctgtctttaactgggctgcaaggatggctatcaatcccaaattctgttttcaactcactggaataattaatctggtgttcctgatataaaacaggtgggttctattcacatgatggctgctctttaccatatatttcacctgaccctcattttgccatgggcctcaacctttatgtgtgctttttatggctctgaaaggactggctcccgtgtgtggaatatacaaggtataaacaccacccctcacatacccctgtaacttaaatgcttccatttaactcacttagattactttccccttagtggtaaacgggttgggggatgggtggtagtgcaaagaaggtagtttgaaatattgccatagtaatatgggaactttttattccaaccctttaccctggcttttttttctctcaatatttgcctaaaattctaaaatgagttatagtaaaatcataaaactatggaaacaactgaactttggtacacaagttagttcgatgacatcttgttatttgagaacagtaaaaggtgtgtcattgcctcatgatttatcatagtcattactaagggtttcagagagaatctggtgtgaagcactatcctttcagacactaaggcctttacctagttgctcccctaccttctgtcggaataggattattcccatgcacctctgggtaggtataggtagtagctattgaacggggattattttccccatggcacaaggggaaacactcttggataaccttcaacaatgaggctttgctaagtggccagacttgggatttgatcttcctcacttgttatttattaagtttaagccttattcagtatctctaattgcaatagatatagttcctgtgacttctaaaaaaaattcctgttaatgctgagacagtatcttttttgtcagtttattaatttttggtcaagatttagcctgagtcttaaagcatttatttgtggaatgccccactgaagtgtcttctccattggctaagtacatgtttaaagccatgggttttaatgtaagatactttcagtatctaattctgtttcccccactgagggtgctaaagagaattagaatctttactaagacatgctcaggaaagcttcacgagagaacagcttcaaaatcctccctatgacactgaatggtagtgaggaaagaattcttggggatgccagttacatacaatagccttattactgctaatcactgtcaataaaaggtcacttcattcacctctatttgaggaaaacaatgagaatgtatctgatgaactagaatccttgtcagtattgggaaattttaatgttgcaatatctagtcaaactttgagtgtactggttctgtgaaccacctaaaaaaacaaattaaatgtattaaaccataaaaaaaaaaaaaaaaaaaaaaaaaaaaaaaaaaaaaaaaaaaaaaaaaaaaaaaaaaaaaaaaaaaaaaaaaaaaaaaaaaaaaaaaaaaaaaaaaaaaaaaaaaaaaaaaaaaaaaaaaaaaaaaaaaaaagaaaaaaaaaaaaaaaaaaa

SEQ ID NO: 28363 - DNA, 3900 bp, Homo Sapiens
cagggagggacgcccccgccgacaggagaattggttcccgggcccgcggcgatgcccccccggtagctcgggcccgtggtcgggtgtttgtgagtgtttctatgtgggagaaggaggaggaggaggaagaagaagcaacgatttgtcttctcggctggtctccccccggctctacatgttccccgcactgaggagacggaagaggagccgtagccaccccccctcccggcccggattatagtctctcgccacagcggcctcggcctccccttggattcagacgccgattcgcccagtgtttgggaaatgggaagtaatgacagctggcacctgaactaagtacttttataggcaacaccattccagaaattcaggatgaatggggatatgccccatgtccccattactactcttgcggggattgctagtctcacagacctcctgaaccagctgcctcttccatctcctttacctgctacaactacaaagagccttctctttaatgcacgaatagcagaagaggtgaactgccttttggcttgtagggatgacaatttggtttcacagcttgtccatagcctcaaccaggtatcaacagatcacatagagttgaaagataaccttggcagtgatgacccagaaggtgacataccagtcttgttgcaggccgtcctggcaaggagtcctaatgttttcagggagaaaagcatgcagaacagatatgtacaaagtggaatgatgatgtctcagtataaactttctcagaattccatgcacagtagtcctgcatcttccaattatcaacaaaccactatctcacatagcccctccagccggtttgtgccaccacagacaagctctgggaacagatttatgccacagcaaaatagcccagtgcctagtccatacgccccacaaagccctgcaggatacatgccatattcccatccttcaagttacacaacacatccacagatgcaacaagcatcggtatcaagtcccattgttgcaggtggtttgagaaacatacatgataataaagtttctggtccgttgtctggcaattcagctaatcatcatgctgataatcctagacatggttcaagtgaggactacctacacatggtgcacaggctaagtagtgacgatggagattcttcaacaatgaggaatgctgcatcttttcccttgagatctccacagccagtgctcccctgctggaagtgaaggaactcctaaaggctcaagaccacctttaatcctacaatctcagtctctaccttgttcatcacctcgagatgttccaccagatatcttgctagattctccagaaagaaaacaaaagaagcagaagaaaatgaaattaggcaaggatgaaaaagagcagagtgagaaagcggcaatgtatgatataattagttctccatccaaggactctactaaacttacattaagactttctcgtgtaaggtcttcagacatggaccagcaagaggatatgatttctggtgtggaaaatagcaatgtttcagaaaatgatattccttttaatgtgcagtacccaggacagacttcaaaaacacccattactccacaagatataaaccgcccactaaatgctgctcaatgtttgtcgcagcaagaacaaacagcattccttccagcaaatcaagtgcctgttttacaacagaacacttcagttgctgcaaaacaaccccagacttctgtggtacagaatcaacaacagatatcacaacagggacctatatatgatgaagtggaattggatgcattggctgaaattgagcgaatagagagagaatcagctattgaaagggagcgcttctcaaaagaagttcaagataaagataagcctttgaaaaaaagaaaacaagattcttacccacaggaggctgggggtgctacaggaggtaatagaccagcttctcaggagacgggttctacgggaaatgggtcaaggccagcattaatggttagcattgatcttcatcaggcaggaagagtggactctcaggcttctataactcaggattcagactccataaaaaagcctgaagaaatcaaacaatgtaatgatgcacctgtttctgttcttcaggaagatattgttggaagtcttaaatctacaccagaaaaccatcctgagacacctaaaaaaaagtctgatcctgagctttcaaagagtgaaatgaaacaaagtgaaagtagattagcagaatctaaaccaaatgaaaaccgattggtggagacaaaatcaagtgaaaataagttagaaactaaagttgagacccaaacagaagaacttaaacagaatgagagcagaacaactgaatgcaaacaaaacgagagcaccatagttgagcctaaacaaaatgaaaatagactgtctgacacaaaaccaaatgacaacaaacaaaataatggcagatcagaaacaacaaaatcaaggcctgaaaccccaaagcaaaagggtgaaagccggcctgagactccaaaacaaaagagtgatgggcatcctgaaaccccaaaacagaagggtgatggaaggcctgaaactccaaagcaaaaaggtgagagccgccctgaaactccaaagcaaaaaaatgaagggcgacctgaaacaccaaaacacaggcatgacaataggagggattctggaaagccatctacagagaaaaaacctgaagtgtctaaacataaacaagatactaaatctgactcacctcggttaaaatcagaacgagctgaagccttaaagcagagacctgatgggcgatctgtttctgagtcactaagacgtgaccatgataataaacaaaaatcagatgacaggggtgaatcagagcgacatcgaggggatcagtctagggttcgaagaccagaaacattgagatcctctagtagaaatgaacatggcattaaatctgatagttcaaaaactgataaactagaacgaaaacacaggcatgaatcaggggactcaagggaaagaccatcttctggggaacaaaaatcaagacctgacagtcctcgtgttaaacaaggagattctaataaatcaagatctgataaacttggttttaaatcaccaactagtaaagatgacaaaaggacagagggtaacaagagtaaagtagacactaataaagcacaccctgacaataaggcagaatttccaagttatttgttggggggcaggtctggtgcgttgaaaaattttgtcattccgaaaatcaagagggataaagatggcaatgttactcaggagacaaagaaaatggaaatgaaaggagagccgaaagacaaagtagaaaaaataggattagttgaagatctaaataaaggagctaagcctgtagttgtgctacaaaaactgtctttggatgatgttcagaaacttattaaagatagagaggacaaatcaagaagttcccttaaacctatcaagaataaaccatcaaagtcaaataaaggtagtatagatcaatcagtgttaaaagaattaccccctgaactcctggcagaaattgagtccaccatgccactttgtgaacgtgtgaaaatgaacaaacgcaagcgtagcacagttaatgaaaagccaaaatatgctgaaatcagttcagatgaagataatgatagtgatgaagcttttgaatcctctaggaaacgacataaaaaagatgatgataaagcttgggaatatgaagagcgtgacagaagaagctctggggatcataggagaagtggccactctcatgaaggaagaaggagttcaggtggtggtcgttatcgaaaccgaagtccgtcagattctgacatggaagattattctcctcctcccagccttagtgaggttgctaggaaaaaaaaaaaaaaaaa

SEQ ID NO: 28364 - DNA, 5760 bp, Homo Sapiens
actcattgtgtctgtgtcgaggcgtcgggagggcctaagtccgtgtgcggtgcccttcggccggcctgagccccagagtcagctcccctttctcgcccagcgcccccaggccgctcccggggctcacggaatagtaaagaaacacatcataaaacctcccaggacataaaggtgagcacagaccctgtttggatcaagtcagttcctggagcctgaatgatgactgctgaatcacgggaagccacgggtctgtccccacaggctgcacaggagaaggatggtatcgtaatagtgaaggtggaagaggaagatgaggaagaccacatgtgggggcaggattccaccctacaggacacgcctcctccagacccagagatattccgccaacgcttcaggcgcttctgttaccagaacacttttgggccccgagaggctctcagtcggctgaaggaactttgtcatcagtggctgcggccggaaataaacaccaaggaacagatcctggagcttctggtgctagagcagtttctttccatcctgcccaaggagctccaggtctggctgcaggaataccgccccgatagtggagaggaggccgtgacccttctagaagacttggagcttgatttatcaggacaacaggtcccaggtcaagttcatggacctgagatgctcgcaagggggatggtgcctctggatccagttcaggagtcctcgagctttgaccttcatcacgaggccacccagtcccacttcaaacattcgtctcggaaaccccgcctcttacagtcacgagctcttcctgctgcccacattcctgcaccccctcatgagggtagtcccagagaccaggcgatggcatctgcactattcacagcggattcccaggcaatggtgaagatcgaggacatggctgtgtccctcattctggaggaatggggatgtcagaatctggctcggaggaatctcagtagggacaacaggcaggagaattatgggagcgcatttccccagggtggtgaaaacaggaatgagaacgaggagtcaacctcaaaggctgaaacctcggaagattcagcatcacgcggggagacaacaggaagatcccagaaagagtttggagagaaacgtgaccaggagggcaaaacaggagaaagacagcagaaaaaccctgaggagaaaaccaggaaagagaaaagagattcagggccagctataggaaaggacaaaaaaaccatcacaggagagagaggtccaagggagaaggggaaaggattgggaagaagcttcagtctgagctccaacttcaccacccctgaagaagttcccacgggaacaaagtctcacagatgtgatgaatgtggtaaatgcttcacgagaagttcaagccttatccgccataaaataatccacactggagaaaagccctatgaatgtagtgagtgtgggaaagccttcagtcttaactccaaccttgtcctgcatcagaggatccacacaggagagaaacctcatgaatgtaacgagtgtggcaaggccttcagccacagttccaatctcatcctccatcagcgcatccactctggagagaaaccttatgaatgtaatgagtgcgggaaggccttcagccagagctctgacctcaccaagcatcagagaattcacacgggggagaaaccctatgaatgtagtgaatgtggaaaagctttcaaccgaaactcatacctgattttgcatcggagaattcacactcgagaaaagccctacaagtgcactaagtgtggcaaggccttcacccgcagctccaccctcactctgcatcacagaatccatgccagagagagagcctctgagtacagcccagcctcccttgatgcatttggcgcgttcctgaaaagttgtgtgtaaaggaagaatttgccatcaagccatttcccccttttgtttctaaaattatttcagagatgtgtgctcctggagggaaaaagaaatacagcctcaacagattaaaaaacaaaagtcacacttaaggacccttctagtcacatcagcagtgttctgcctttatgtagtagttgggcatataatccttccacacagcccctgcagggaaaggctaatcttacggataatccacgtgagatttccacacaagagaaaagcacacgcatagtgaaatgtcagtcttttcagtaatgaggatacctttaaggcactcttggactctcggcaaccacaacataatagttgaaagatcaagattggctccacgaaagtgatacggaggttaggatgctacttgctgcaaacaagccctactttggccaacatcctgcttatttctcaaaaaagagggacagtgaaaacaaaaacgacattgggacatgctgctcaaggtagttatatatacgataagttgtatatatgatcactggtagcctaccaaagctgtagaaatctaggactgtgctaatcagtatcaaaccaaagatttctatctcttcccgaaagagagggtatgtgcaccagtctacagttccaaaggactgcaacaaatgtagatggttctgtcctcatccctgagatcagttctactgaaatggcaacaacaactccaaatacatctctcccttcttgaaatccctaaagcactatcgcactcctaaatgcatttctccacaagttagcacttgattgtatactgtcttttaatccttcattgtttcatgtatgaagtctttaatcaccccctaacccccaaaaaagattcggttgtcaagggatatatttctatccctgccagcacagtgctggacatagtgagtactgaacacctaagaggcactcattcagactgacttctacaggacttctacgtgtgtgataaaagcctgtgaatcgtgagtccctgaaatatggtagcctggcccagcttctaaagaggaccttcgtagccacaaggcatgctaaacctctagggtctgatgctgtttttgttccaaatataaacgaaaggcactagtcagccgcctgcatagactttctaaacagtgagtaaataccatggaatgtcagaaatgactttatcatcgtcatcttgaagaaaaatatgaacactgatgaaggtcattttttttttttgacatctttctgtggcaaagctcttagaattctttgcagttagctgctgaacagtatgatgatttggggattttctgaatcatttgtacttagatactggagttcagaagatgtgatttttgttgcttttcagaaaaaggaacgtggtagggagtgttttttcccacgcttttccagtaactttgcaaaagcattaattgttcactggcaattactaaatgtattttgttgctctgagaaactcagcagtgtactgagatgtggctggctgtgccatcgtcatagtgcacagtgacttttctgtttcttatcactaaagactgaggtgaggttatgaaactttcattggtcccatcgttgtgcgcagggtgcaactggctacctagaagctgatggcaggagactgtttcacacacaggagattgtgagctgtgtaagtagtcatcgccactcaagtaggacaagggtcctacccaaggctaggaccgccctgcggaaacagaaacatagactgagaacaaacctcaagactatcagtgtgacctccccataacaagagaaccccatatatagtttgagactttcccttgagaaacttatactaaaactattactcatcagtcattcactgatcagcagctaaagtccatgagaccaaatggttttatatggaaccaacaaagtgggagctaaaactgcacagtggtcattctttggcctctccttggctttatgacttaaaccaactacaacttccctatagcttctaagcagtttcatcagcattacttgggaaaacgtgttgcaagtcaaccagtcactaggatatttctacccatgcaacggaagaaaaacccattactccagaagagtatatctaagtaactaaaatggaggcagaaaatgttttaaggattttcttcaaagaataagccacagcaatggttttgtagaaaactcctgtgcttttgagcaaggacttttgccctctagaaagcaactgaggccaggtgcggtggctcacgcctgtaatcccagcactttgggaggccgaggtgagcggatcacctgaggtcaggagttttgagaccagcctggccaacatggtaaaatcccgtctctactaaaattataaaaattagccgggcatgatggtgggcacctgtaatcccagctacttgggaggctgaggcaggagaatcacttgaacccaggaggcagaggttgcagtgagccaagattgcacactgcactccagcctgggtgactagcaaaactccatctcaaaaaaaaaaaaagaaagaaagaaactgaaaagtgaggtgtggaactccaggcaacgacccaagcacttattttttaagagggaaaggactttggtcatgtttacattggcctttggttttttttttttctttcagccacaactatatgctgatataactcagccatcacttttgagttttgtttttaaatgaaggttaaatgtgacctgtgccctcacatttaattccgtttcatggagacatcttcctgactttgttggatagctgccactagggttgcttcgatcttcagccacatgctgtccttgaagcagctatttgaagatgtgttttctgaggaaaacaggctacaactgtttattaaaaccacttgcagtgcattcgtttatcagatgctcagtgcaaagtgtaattgggtcatggtcaaaaacgcttgcaacatctaattggcgttcaagatagtcattcaaaagttcttggcccgctgaagtctgttaacagttgaaacattctacagttaaccattagcatgctagttgtcctaatggaaatttttgaagagtttttcaatatataccctacccttgccaggaagagaagtaaaatcctcaggttgtggggtatttgtttctactccagcctggcaggcaaggctaaaacctgagattatcgatctatgagacatcttgatatgtaaagcacttaatattaaaggcataaaagtgaaactgctaaatatgtatagagaggttgacgtgtgatacgtgggacagttcacatagacatcagagaatttattccagaaaggagcctcctgaatgtgatgaatacggcaaagcctttaatcacatctcagcccttagcatcggaaagcttatactgtaaataaacttgatgaatattatatgtgaggaaaactttcatgtatagcactcattgcttcagacagaaaatgaattccgtcggtatgttccaatcgtgatgaatttgagaaacattgcaagagggagctcaatcttggccgggcgcagtggctcacgcctgtaatcgcagcactttgggaggcagaggtgggcggatcacttgaggtcaggagtttgagaccagcctggccaacgtggtgaaagcctgtctctactaaaaatacaaaaattagccgggcgtggtggtgggcgcctgtagtcccagctactcaggaggctgaggcaggagaatcacctaaatctgggaggcagaggttgcagtgagccgagattgcaccactgcactccagcctgggtaacagagactctgtctcaaaaaaaaaaaaaaagaaaaaaaaaaaaaaaaaaaa

SEQ ID NO: 28365 - DNA, 4133 bp, Homo Sapiens
actggtggtggcggcggcggcggcggcccgggctccggctgtcggggaagctgctgagctgtgatggtgatgacgagtgcctgatcaactttctagcgggagaacgatcatggaggtggtgccagctgagattgctaagaagcctcgaacgccaacctctggtccagtaatcacgaagctgatctttgcaaaaccaattaatagtaaagcagttacaggacagacaactcaagtttcaccaccagtcattgcaggtagggttctttcacagtctactcccggaactccatcaaagaccataacaatatctgaaagtggtgttattggatcaactttaaattctacaacacagacaccaaataaaatagccatctcacctttgaaatcgccaaataaggcagtgaaatcaactgtgcagaccatcactgttggaggagtgagcacatcacagtttaagacaattattcctctggcaactgctcccaatgtccagcagattcaagtgcctggaagcaagtttcattatgtccgacttgttactgccacatcagccagtagctcaacccagccagttagtcagaatcccagtacaaacactcagcctcttcagcaagcaaagccagtggttgttaatacaaccccagtgcggatgtcagttccaattgtctcagctcaggctgtcaaacaagttgttccaaaaccaatcaatccaacttcacaaatagtaactactagccagccacagcaacggcttatcatgcctgccacaccactgccacagatccagcccaacctcactaacctgccaccaggcactgtcctggcaccagctccgggaacagggaatgtgggttatgcagtgcttccagctcagtatgttactcagctacagcagtcttcatatgtatcaatagcaagcaactctacctttactggaacatctggtatccagacccaggcacggcttccattcaatggcataatcccatcagagtcggccagtcggccccgaaagccctgtaattgtacaaaatcactgtgtttgaaattgtattgtgattgctttgcaaatggtgaattttgcaacaactgcaattgtactaattgttacaacaatttggaacatgaaaatgaaaggcaaaaagcaataaaggcatgccttgacagaaatccagaagcctttaagcctaagatagggaaaggaaaggagggagaatctgatcgacgtcatagcaaagggtgtaattgcaaacgatcaggatgtcttaaaaactactgtgaatgctatgaggcaaaaataatgtgttcctcaatatgcaaatgtattggctgtaagaattttgaagaaagcccggaaaggaagacattgatgcatttggcagatgcagctgaagtaagggtacagcaacaaacagcagccaagacgaagttatcctctcaaatttcagacttgcttactaggccaacaccagctttaaatagtggaggcggaaaattgccatttacatttgtaactaaggaagtagctgaagccacatgtaattgcctccttgcccaggcagagcaggcagacaagaagggaaaatcaaaggcagcagcggaacggatgatacttgaggaattcggacgatgtttgatgagtgtcatcaactctgcaggaaaggcaaaaagtgacccttgtgccatgaattgctaactcttgcacaaaagactgataaatggaactgtacagaaaatttaaggtgcagggacacttgattttctggaagaaaaacaattactgtattttaattcagtccttgttttaaaagacctgaaattataatactgaaggagaagaaattttaaatgaggaaattagtacattttaaatcttagttaaatctgcttatgccccttctaaattgaatttttctttattatatagattttttaatttgcttgggtttcttaagaattagatgttctctttctgatacctttgacaaaaaatgtttataaattcatataatttataatgtatggtgttgtatgactttgttaatagaaaagccaaagcagcagtggttagcacccattctttgggacttgatctagaatatctgcagacagaatgttacataaacaaattcttatgaaacacattcaaatgacattttgtatttagaaaaggactatcttttaaagaaaaagcagccttttagggccgattctggaataatatcctgttgtcactttgggaatgtcagaaggggaaacaatccccaggcacactaaaaattttttaaagttatttaaaaaaacatataaaatattaaaggacagtaaatctcagaggatgggcaatgtgtttctataataaggaaaggctaacagatgctctgggctgtctccattttctttcaaagaggtggtatgtatttgaagtaataaattgtcaaagtgattactgggtactattaaaatgataggtggatataaatggaagtaaacattatgtagtgataatatagaacctcacatagtaatcaagtataaaatttggcatgggtggagaaacaaagaatagggaagctgcaaaagatgaatttagagaagttttcatctatacaatcaattatttttacagacttttttttttttttttgagacggagtctcgctgtgtagcccaggctggagtgcaatggtgagatctcagctcactgcaacgcctctgcctcccaggttcaagcgattctcctgcctcagcctcccgtgtagctgggactacaggtgcatgccaccatgcccggctcattttttgtatttttagtagagacggggtttcaccgtgttagccaggatggtctcgatctcctgacctcgtgattcgcccgcctcggcctcccaaagtgctgggattacaggcataagccgccgtgccaggccctttttatagacttttgaactaagaggtttcaaaccaaatcgcaactcttacttgatttacagaaatgggcctcctaacaaaattttcaaaattgtggtgggatttctttttataagggaagtttaatatggcattattttcagccagtgatttggaaggtctgttttcctataattactaaaataacctaaatcattttcagtattcaaaaactctatgaatttaagagcctgttgtgacaggactcttgattttatgacaagaaaaaaccatgttggaattcaggcattttgttaggtaccttaatcatcagtaattagtatatgattatttcatttcctacaaggactctatagttgtatgtattaagtgtgtatatatgttcatatgaacatgcaagatataggcaatagaaattaagtaatccaaaagaggattccgttattcactaaagtatcttccttttaaatttggatttataaaatcatagtgcagtaactttaaatgtagatagttcaaacattcttagcacctcaatctagtatgtttaattaaaatttgtataaatgtaaattagtgtaagagggtaaaataataatcaagttatttttcaaaagattgcaataagtttttggtctaaacttaaactttgttcattttgtacatactctgtgttaattctaattgcacctttgtgatgtgtatttatatacagtgtgcagaaaatgttcgtgaaattttgattacaattgtagattatgtatgatggcattgcttacgaatgttttgcttgtaaaaaaatttcaaggtgcaatcaaatgctactagtttttctgattttcaaaaatctatctatctaaaatattaagccttttccttcctgtgtagtacttactaaataactttttgtattcaggcatttgcatcaaattgctgaacaagatgaatagccacattaattcaatgattttaaaagactatttggggagggttgggtatataattttttagctctatttacatcccaaagtagaaagattaaatttatatttactagagctattcaaagaatacacttttctatattgtaaaaacaggacagcaaagtaaatcatacagaaaataaacatttatactattctgtaaaaaaaaaaaaaaaaaaaaaaaaaaaaaaaaaaaaataaaaaaaaaaaaaaaaaaaa

SEQ ID NO: 28366 - DNA, 4619 bp, Homo Sapiens
agaagaggaagatgatgatcctgatgtttattactttgaatcagatcatgtggcactgaaacacaacaaagattatcagagactattacagacgattgctgtactcgaggctcagcgttctcaagcagtccaagaccttgaaagtttaggcaggcaccagagagaagcactgaaaaatcccattggatttgtggaaaaactccagaagaaggctgatattgggcttccatatccacagagagttgttcaattgcctgagatcgtatgggaccaatatacccatagcctggggaattttgaaagagaatttaaaaatcgtaaaagacatactagaagagttaagctagtttttgataaaggtttacctgctagaccaaaaagtcctttagatcctaagaaggatggagagtccctttcatattctatgttgcctttgagtgatggtccagaaggctcaagcagtcgtcctcagatgataagaggacgcttgtgtgatgataccaaacctgaaacatttaaccagttgtggactgttgaagaacagaaaaagctggaacagctactcatcaaataccctcctgaagaagtagaatctcgacgctggcagaagatagcagatgaattgggcaacaggacagcaaaacaggttgccagccgagtacagaagtatttcataaagctaactaaagctggcattccagtaccaggcagaacaccaaacttatatatatactccaaaaagtcttcaacaagcagacgacagcaccctcttaataagcatctctttaagccttccactttcatgacttcacatgaaccgccagtgtatatggatgaagatgatgaccgatcttgttttcatagccacatgaacactgctgttgaagatgcatcagatgacgaaagtattcctatcatgtataggaatttacctgaatataaagaactattacagtttaaaaagttaaagaagcagaaacttcggcaaatgcaagctgaaagtggatttgtgcaacatgtgggctttaagtgtgataactgtggcatagaacccatccagggtgttcggtggcattgccaggattgtcctccagaaatgtctttggatttctgtgattcttgttcagactgtctacatgaaacagatattcacaaggaagatcaccaattagaacctatttataggtcagagacattcttagacagagactactgtgtgtctcagggcaccagttacaattaccttgacccaaactactttccagcaaacagatgacatggaagagaacatcatttactagtcctcttcaacacatagcaatggtatcattgttaattatgtgcacagtttggaaagattctctgctttcccagaaatgacactcacagcatgagagcttcctgagtgttctcgtcaagtacagctctgcaccgttgtggctctagatcactgttcagcagctgaacattcctggtgagcaaaggtttccctggtgaatttttcaccactgcgttttaggtggtgatcttaaatgggtgagatggaacgagagcacacattaaagagagagtaaattccaaaggtttcaaagaacttggtcataaatatgataatgagaagacaaagtatttatattaaaacagtttagtagccttcagttttgtgaaaatagttttcagcacagaaactgacttctttagacaaagttttaaccaatgatggtgtttgcttctaggatatacactttaaaagaactcactgtcccagtggtggtcattgatggcctttagtaaattggagctgcttaatcatattgatatctaatttcttttaaccacaatgaattgtccttaattaccaacagtgaagcactacaggaggcaactgtggcattgcttccttaaccagctcatggtgtgtgaatgttataaaattgtcactcagatatattttttaaatgtaatgttatataagatgatcatgtgatgtgtacaaactatggtgaaaagtgccagtggtagtaactgtgtaaagtttctaattcacaacattaattcctttaaaatacacagccttctgcctctgtatttggagttgtcagtacaactcatcaaagaaaactgcctaatataaaaatcatatatatggtaataatttccctcttttgtagtctgcacaagatccataaaagattgtatttttattactatttaaacaagtgattaaatttagtctgcacagtgagcaagggttcacatgcattcttttatactgctggattttgttgtgcatcatttaaaacattttgtatgtttcttcttatctgtgtatacagtatgttcttgaatgatgttcatttgtcaggagaactgtgagaaataaactatgtggatactgtctgtttatattatagaatgcttgttgtgacttccttttggttagattttggattttttttttttaccagtgttaaaaccagaaattggtattttttaaaatggtttgcttcacatatttaagagttttctttctgtcatttatgaagaataaggaatgtattatggaaaagagggtgatcttaagcaaccctgtaaaaaatggtaaagatttttactcagtgtgtgctgaaacactaaattaaactagcttacaaaaaggaaacacggaccatggttaaagaaaaaggcaattattattgctcaggtgtgaaaactaaagttgaaaattttttttctagttgtgtctcatgaagataagcccccatgtatttaaacagatggcttttgaaaaatcaccttgtttcctggaaattactattaactataggaaaagatagtataaatattctaagattgattgttatatttgacccaatttttagaatcacctgttttttcctattttaaatcaagggaacattatttactagttctcttcagtacatagcagggtactaaaatcataccctgaattttttttaattgagaaaagtaatagaattttaaatatagaaatatgagaattttaaagtaatatattgattaaagatcactgatgatatagatataatatatcataacagaaggaaagtaaatggacttgagcttaacttctcaccctggaattattagtgggtgaagaggggaatcattagcattctgggcgtttttatattaaatgttttgtgaatatgccagaagatctgccttcaacttataattaggcaagatagtaacgcttgatggtaacttctatgtttgtgtagaaataataccagttagttttgggaagccattcagatccattcaaaaattccataaagtatgatgtatgctttggaagagggatatgagtgatacaattgttatataaatggaatagacaaaccatttgaatgcatttttctagggcaaacattttttgagatttttgagttaagaagatttttcggcttgagcagaagatgtgtttgttttgcatttttcagctccaaggaaatagcccccatggctttaaaaggccctgaagttcagatagtagtaggtagtgttttgttattgttttaatttgagagttgcaggaataatgggcagagctgtcatttgccggtaggctaccatctgcctacatagaattattggactgtaagctaaaacagactgtaaaagacctacttgctaaagcattgcttattcagtggtattcagtagataagatctatttcctgatatattgtgctcaagttatttgcacatcttaagaaacttttaatatctaaaaccattgttgtaagatttaggtagaggaggtttccttttgtgtgatgcataataatagaaaacactgatacagtgtttactatgtgccaagcaagcatatgataactaattcttaacaactctatgaggcagggtcatttattatcctgttgtcatatgaggaaatctcgccagagagaagttaattaacctgcccaaggtcgtatagttagtaaagtggtcatgcttggattttaacctaggcagattacttcagagtcagcgtctgccttactatcctgtttcctgagcaggaatttccccttgtgtcaggcaacactaggtgttaggagtggaggtgtgcagatgttgccttacattctgttttcctgatgtggtgtgcttcctaagagtacaaacctgagcatatgtccaggcttgcaaagtctcaggcaaagctgggactaaggcttgtgtttcctgccttgggtaggattttcttctatgcatgttgggtgcttctcacttaacctaatagtatgccttgtctgttttccccccttcccctttttgtttaaattgattcacagaacacaaaaatttactaggtatgaacatttgaaaaaatggaatagagaaaatggtacatcacatgtaataaagataaatattgttttgtgaaaaaaaaaaaaaaaaaaaaaaaaaaaaaaaaaaaaaaaaaaaaaaaaaaaaaaaaaaaaaaaaaaaaaaaaaaaaaaaaaaaaaaaaaaaaaaaaaaaaaaaaaaaaaaaaaaaaaaaaaaaaaaaaaaaaaaaaaaaaaaaaaaaaaaaaaaaaaaaagaaaaaaaaaaaaaaaaaaa

SEQ ID NO: 28367 - DNA, 2588 bp, Homo Sapiens
ccacttcacagaaaacagtctttatatgtacctccttgtgcacatttgccagtatttgtttagggtcaatacagagatttggaactgttggatcataggataatagaaacgagggtcttggctagccctccccttcttatggtactggatacccgagggcaagattcagtctccattagctggtcctcttagcttttcttcttgtggatgctatttgtttttctttctttttttggagattgagagggcacagggatgagcttgctgtgataattgcaggccaagtttgtatgaatccaggacctcctatctgctgtgtcactgggcctgcaatgggttttcttccctctgttgttaagggacagataagatgtaattgccttaatgctgaattgcctttcagcaggagggaaaagggaccagtggcttctccttctctaggccagtggcatggaaaggagatgaagaaggagtaggaagaggagagggcagtgaggtgtgtagaggaactagagagaatcctgtagacctcaggttttgaacttggtggtggaagcatgatatgctctggcttaaaaatattcactgaagcactatgtatagtggttggggttggggacatgggctttggaactgggtagatggtgacaagggctttggaactggtagatagatacggtgcgattcctgtttctaggcataactagctaagttactcaacctattctgaacttgatttccccaaggatccttaagaattgttcctcaaaggggtagaaggggatgttccagaagaaaacagatgtgaagtgctcctccacacagtggagtgctaattttttttttttttggatggagtttcactcttgttgcccaggctggagtcaacggcatgatctccgtatcaccgcagcctccgcctcctgggttcgagcaattctcctgcctcagcctcccgagcagctgggattacaggccaccatgcccagctaattttgtatttttagtagaaacagggtttctccatgttggtcagggtggtctcgaactcccaacctcaggtgatccgcctgcctcagcctcccaaagtgctgggattacaggtgtgagccaccgcgtccagcagtggagtgctaattgttaattctctgctgtatgtcagttcctagttttgtgcggagactgtaaaggataagacgtgttcccgccttcagagcaagtatggcctagaaactgctgtgtaagtcaatcagcatgaatacaatgttggatgagcccaaactgcttggagtttctctcagtaagaggcactgggggaaaaaaggactgaattttccctttctctgaagcttaaactgtgccggggtgaatggatgttgcagcatgcaatttttgtttttatataaagtttagcctaatcaaaatagttgcatattattttcttagtagtcattgtaggaaacaccaattttttcttttctctctctttttctttctttctttctttctttctttttttttttaagaaagggggtgatctgtctagcttgtggactctctcaatattcaccctgtctctgaaaatcaccctcccacctccttgaattctggtgaaggcagtcccacaagtttgtgttccaccggttgaatagccctgttaggaaggcatccattttcccccacaagttcccataaaagccgtggggctgacccttactggactcaacttggggcatggccccatccttgacctaagtatggcccatggggctgtgctgaaggtggttccttagagagaataaatactgggcaggcaaaaacaatataggtgctgactgggcctagggtattctaggatattctatgtcttactactcagggtatcatgctctggtcagcagcatcaccattacctggaagcttgttggaaatgcagactcatagactcttaggccccactgtgggatctcatggatcagaatctgttcttaacatattcctatgcacattggaatttgagatgtgtgcagtgctggagcaagtcagggaactctggcccatatccatctcttcttcatggcatatccctgtatacacactgggcacctccatctcccaccagggctcacacctttgaaaccctaaagcagtgtgtgtcaagagaggccccaccatgatgaattgcttttagatgttcctatagtttcctttaagaccaggaatcagcatttcctttgttagctaggtaaaaataatgaattggaaaaaaagaaaaaaccaaccacaaaagatggtccaggttttcctcacagttaaaataactggttacatgggtgggaattgctgcataaaggcttaaatctattccttaaaaacaagctgtgtatacagttctccttttcttagctaaacaaaatgaactgggtttcaaaaattggagatgaatgaggttcttataataatcagttgcatttacttatcagctcttgttcctgttctcttcatttcctttcagattgaggcatttttaatgaggagagaagttagaaaagggggtcaggaaaactggaaaaaaaaaaaaaaaaaaa

SEQ ID NO: 28368 - DNA, 2735 bp, Homo Sapiens
aatgtagcctgaaactacatttctcagcggccactggaacgacctcaatctctgcctcctcgccagttcattgtggtcgttgacccggcagcgagctttggagttcatcgagggagaagtcagcgcccagctccgaggttggagcagccccgccgggcaacttgaatttctgcaaacgaacacagcaccgggagctctgcagacctgtgtcggcgcggaacccggactgagacatgccttttgaacttctcagatagaggaaccccagtgaagactgatcagttcttacaattctcaaagcatggcccataaatatgtgggtttgcagtatcacggatcagtgacatttgaggatgtggccatagccttctcccagcaggagtgggagagtctggactcttcccagaggggcttgtacagagatgtgatgttggagaactacaggaacttggtgtcaatgggacattcccgttctaaaccacatgtgatcgccttattggaacaatggaaagagcctgaagtgacagtgaggaaagatggaagaagatggtgcacaggataagaaagctccagtctacaaacaaaacatgccagaagatttttaggcgatgatgccacctgcacatggaaccaaaagatttgcagttggaagatgatacaatcggctgtaaagaaatgcccacctctgaaaactgtccatcttttgctctacatcagaaaataagtagacagaaaccacgtgaatgtcgggaatatggaaagaccctttgtcaagactcaaagcctgttcaacatgaaagaatacatagtagtgaaaaacccaacagatgtaaagaatgtgggaagaactttagtaatggacatcaactcaccatacatcagagattgcatgttggtgagaaaccctataaatatgaaaaatgtgggaaggcctttatcagtggctcagcctttgttaggcatgggagaattcacactggtgagaagccactcaaatgtaagcaatgtggaaagactattagcggtagctatcaacttacagtacataagagtattcatactgggaagaaaccatatgagtgcggggaatgttggaaagcttttctagtatatggaaagcttacccggcatcagagtactcacactggtgaaaaaccctttgggtgtgaggagtgtgggaaggccttcagtaccttttcatacctggttcaacatcagcgaattcataccagtgaaaaaccttacgaatgcaaagaatgtgggaaggcctttagcactagctcaccccttgttaagcatcagagaattcatactggcgagaaaccctatgaatgtaaggagtgtgggaagtccttcactgtgtatggacagcttactcgacatcagagtattcatactggtgagaaaccttttgaatgtaaggaatgtggaaaggcctttagacttagttccttccttcatgcacatcagcgaattcatgcagagataaagccctacggatgcaaggaatgcgggaaaaccttcagtcgtgcctcatatcttgttcaacatggaagacttcacactggcgagaagccctatgaatgtaaggagtgtggcaaggcctttagtactggctcataccttgttcagcatcagaggatccatactggggagaaaccctatgaatgtaaggaatgtggcaaagcctttattagtcgccatcagcttaccgtacatcaaagggttcatactggagagaaaccctatgagtgtaaggaatgtggcaaggccttcagagtgcacgtacatctcacacagcatcggaaaattcatactgatgtaaagccctatgaatgtaaggaatgtggaaagactcttagtcgagcctcgtaccttgtacaacatagcagaatccatactggtaagaagccctatgagtgtaaggagtgtggcaaggccttcagttctggctcataccttgttcagcatcaaagaattcatactggggagaaaccctatgaatgtaacaaatgtgggaaagcctttactgtttatggacaacttattggacatcagagtgttcacactggtgagaaaccttttgaatgtaaggaatgcgggaaggcctttagacttaattcattccttactgaacatcagcgggtacacactggtgagaaaccctttaaatgcaaaaaatgtgggaagacctttagatacagttcagcccttaaagtgcatctgagaaaacatatgagtgttataccctaagagtctgaggagtgtgggaagtgcttcgtgtgtggctcaaacattgttgaacatcggggaatttatgctggtaggaaactttcaaatgtgaagaatattggcaggtctattctcatcttataattcataatataactcagaaaacataagaatattcctttgtcatttataggtttgtaataccaatatttatactggtggaccattcagaaaaagtgggaaacgttattacttaatggttacagcactgacagcatgaacttttatatgatgcatttattctaatgtgattgtatgaacaagtgaataaaaaaccttggacctcctaaaaaaaaaaaaaaaaaaaaaaaaaaaaaaaaaaaaaaaaaaaaaaaaaaaaaaaaaaaaaaaaaaaaaaaaaaaaaaaaaaaaaaaaaaaaaaaaaaaaaaaaaaaaaaaaaaaaaaaaaaaaaaaaaaaaaaaaaaaaaaaaaaaaaaaaaaa

SEQ ID NO: 28369 - DNA, 3688 bp, Homo Sapiens
agattttgacttaatgtgtattatttatttttatgaaaattgtggacacataaccaagataaagaagtcaggtattccatagccattccttatctcctttctgcttagttgactttctagctgagtggtgcacagtgcatggaagattccacttagccggaccaggaagcttggtctcatctgtggtgcacaccaacagcaaacattgatgtaattctctacaacttaatctttggcacatagaggatttggcggtctccatgttcagggcacaatggctttaataagtgctggaaaatcactgaagctaaaccaagagcaccagatcctctttacctaaatacccagtctttaacatgagctagtccctgtaccatagtattgtttcagctgtagttggttgtcatgttaataagacagctgcacgtctaccttcttttcttttgatttccattgtcttggtaagttattgttagggttatttttaatgtgccttccagccagaaaaatcagctgtctaaagaagcattgcaattgtaatggggactcttacctcttagaatgcaagattttccctcctccctccctcttctccatctctttccctcatgatttgagaactgtaataatcctccactggtggcattacctacctagaaaacctgctgattcttagcatggaactttgcttcagtttgcaggacaaagtctgcttccttccggtcttcatttactttttatacaagggatgcagtcagctctccatgtataagatacctagatgatggatacatatttcataaatgaaatttatgtcattaatgaatatccccttgcccacaaccagctcaggctttcaaaattcgagaatggtcatgccacacagcattctaatctagatggattaattctgttgttcaaaacattctcatacctgcctttatattgaaaacaaattctagatacaactggggttattctggaaaagcacattctcacctttttttttttttgagacggagtctcgcactgtcgcagggctggagtgcattgtcgtgatctctgctcactgcggcctctgcctcctgggttcgggcgattctcctgcctcagtctcctgagtagctgggattacaggtgcccgccaccacgcccggctaatttttgtatttttagtagagatgaggtttcaccatgttggccaggctggtctctaactcctgacctcgtgattcacccgccttggtctcccaaagtagtgggattacaggcgtgagccgctgcgcctggcccattctcatcttattcaaattactggcacatgggcaagagagacaatgacatggatagaagcttttctgcctttctctgcacacacatacagtgaaggaaccacaggcagattttttgatcagtttggtgaatacattgctcgttgtcactgttccaaccacattggtaaaaaaaatagttaccttttgtcctttggatgtcatgtctaaactttggaaaatataagtcattgcccttttagagaatgtttgtgtagtccaaagattgtgagctccatatagtatgaaaatcaagtacttttgcatgagcaatagcagtttcaaagtgaaatattataatttaatctttttcaagtagatcaaaaattcttaactgattaataaaatattttatcaatatatcatccccctttcagagagaagtccccagaagagacagcacacttagcaattgccctcattattaaaggcctaggtgagtggcataaagggccatatgcgattatgtttcaaggtaaacattacctaaccttgtgtgggttaaaaacagtgaagtgtccttgtatcctgataaaatttttttttaaataacatggtgggttgacatttttgcatctgctataagttttctcacatgtcgttcttcctggtgagagcgggctgcatcattctggcacttaatttgggtgttcgattttgctatagagttctttgcagtacagcatagcctcttcttggccttgggaacagtgaactcttcttttgatggtgtggattgcatgcatatctggagagaggagggctcaggactgtgttcactttatttggtcagatgtattttatttgaaaaccatttgagcccaaaatacaagtgtacccttcccacttctggctcaagcacccgtgagccgactagacgtaatattaaaacttactgatgctgggcgcggtggctcatgcctgtaatcccagcactttgggaggccaaggcgggcagatcacctgaggtcaggagttggagaccagactggccaacatgacgaaatgctctcgctactgggaatggaaaaattagccgggcgtggtggcgcacccctgtggtcctagctgctcgggaggctgagacaggagggttgcatggacctgggaggcagaggttgcagtgagcagagattacaccactgcaacgagactcgggcccagacgagatctgcctgggcgacacagtgagactctgtctcaaaataaataaataagtaaatagaacctcctgagctaccctggcttataaggattcagattactttaggaaattaggcattagcactaggaggggggaagatggctggcaaaacttctagctagcaacctatgtctagcacatgggtaactaaccatagcgagatcctgaacacatatcctctaggtgcaggtggagggaacgatgtccaatacctgaagcagaatctcacatggacggaacgtctgtatttccctctcctgcacgaatcactcatcattcttggagggcttctctgcattcctccttttcttctctcccctcccctgccttttgtcttttctaaagagtctgaactccgatttccatgctctcctgctacattaataagcaaaacctgcttgtgtgtacggttctttactggaaacatgactttttgtttctgtattggttttactgtcatccagttttctagtttaatatctagcaaaactaaatctgaatgtactcgctttttccgttaagtatgccaagcacctcggttgaaaggcttgactcaaaccagaagtcttgctggaattcgtctctgaacacttgaaaaacagaaaccctgagccgcaacaaacatgcctctgtgtgtcgggattgcctttgtctctgcttccatgtggcttttccttttgtagctatgcttagtgacataatcttccctcttctagccttctcctttcaagcctgtctgttaattaaccatgtcagtattggcaagcatttatcttcccccaccctaacatgcgatcttctaagaattttgcaaaattctaaacaaatatagagacggtatatagaattcatatctagaaaactttgattttaatgtgagcttatcaaatttgttctggcttttttggcactaaggcaaaaacatgttaaccagaaataatttattcttcatgtatgtaaaatatttgagaatgtttagccttttattagaattttatttggaaaatatttatctttctacacattttacacttatgttcctttgcttataacccaatttcttaacttttttgttacttaagcaaatatcaattatgttttattatctaataaagtgtaagattcttactatccaaaaaaaaaaaaaaaaaaa

SEQ ID NO: 28370 - DNA, 4971 bp, Homo Sapiens
tgttgcatctttgatatcatttcctagactctactccatgatttaacttgaaattctgaaatgaagatggaggaggcagtgggaaaagttgaagaactcattgagtccgaagccccaccaaaagcatctgaacaagagacagccaaggaggaagatggatctgtagaactggaatctcaagttcagaaagatggtgtagcggattctacagttatttcttcaatgccctgcttgttgatggaactgagaagggactcttctgagtctcagttagcatccacagagagtgacaagcctacaactggccgagtttatgagagtgactcctctaatcactgcatgctttccccttcctctagtggtcacctggctgattcagatacgttgtcttccgcagaagagaatgaaccctctcaggcagaaacggcggtagaaggagacccttcaggagtgtctggtgccacagttgggcgcaagtctaggcggtcccgatctgaaagtgaaacttccactatggctgccaagaaaaaccggcaatccagtgataaacagaatggccgagtcgccaaggttaaaggtcatcggagccaaaagcacaaggagaggatcaggctactgaggcagaaacgggaggctgctgcaaggaagaaatataacctgctgcaggacagtagtaccagtgatagtgacctgacttgtgactcaagcacgagctcatcagatgatgatgaagaggtttcagggagcagcaagacaatcactgcagagataccaggtcatttggatccaggattcctagcaagtgacaaaacatctgctggcagtgcgccactcaatgaagaaattaacattgcgtcttcagatagtgaagtagagattgtgggagttcaggaacatgcaaggtgtgttcatcctcgaggtggtgtgattcagagtgtttcttcatggaagcatggctcgggcacgcagtatgttagcacccggcaaacacagtcatggactgctgtgactccccagcagacttgggcttcaccagcagaagttgttgaccttaccttggatgaggatagcaggcgtaaatacctactgtaatacaatgtcactgtgtttcctctgcactgttcccttccacttcctcatcctctttgtgacatggaagttcattgtcatagcttcagcttcagaagctgtttgtggcatttgtaggattcaaactcatggaaaattccctcctcttcccccctttttttaattaaaagaagtcacttaggaaaataacatcacagagaaaagaatttcttctttccctcagtaggaatatagaatgatgaattttattagacaactttattttacttggtgacttttaatcttaggaaactctgccttccttttagaataatattttaattgccaggcaaaatgggtttcagtttttgaatcttgtatttatttttctgtataatgaaattaatatctagacttgaccactatctgcccaccccattggcactcccatcttagggcattcgcacacatatcagtcaggtccttattggcacctagtagggcatgtgcatttaaaaacttgtccttaaaaatagaagacagaagtattaaaattatattttcttttattttaagtcttctgccttctttcttgagtttgctcctgttgacttcccacagcacagataattgacatgtccctttgtgtttataaatactactaaggtgacctagttggtctccttgttgcaataattaataactctttgcaaaatgtctcctttgagacagaggcatttcagatagatacccaccatgaggtgttctgggcatctgaaggtattaagagttcagtgggaaaaatctctctccctcgcctttttttctggtttagtcaaataacgggtgaacatagaaacctgttgggaagaatatgaaaagttatgtggcctctgaggctacaggcacttgcaaatccgagaggaaggtgccgtctttcatagctggtctctgtataaagagtatgtagcaacaactgtttaacatccgagatgaagtggacctgatgctgtatttgggtatttttctcctctaccttctaaaaaaaaataccataagaagaatcagaatgtaccataagaaatcagatgcaaagcacgttaatgtcattggtaagttttacagagtctaaaaggattagcaaagggtagcaggagcttcagggaattcaggaaatgccagcattggaattttgtggcattagttactaccttctttcttataatatgttgtagttactagtgaattcttttaaaagcaatacctagagttagaacactatgtactctgcacagggggagtgaagtaatattggcttagaagacttcaccttttgtttttcatggtttttgtttgttttgtttttgtttttgtttccattgttaccgttgctatggccctttgcctgtctctccaaatcccctggtggctcttcttatcattaagagtatgagaattaccattttcagttttcattcagcaaacaaatttaccaagtgcctgctctgcataaggcactgtggggggtgggtgctctgggggctgctgagatgaatgacacacaccgcacatacacatgcatcagtgtctgcctgcctccccctgcccagcctattcttcttcttcttcttcatcttcttctttttttttttttgtaaagacaagtttattcctttacgcttcttgttgcattagttctcctgtatgttccttcttccacaggaatgtatttgtgcatatgttctttgatcttctctgatagcatctcatttgatctggcctctgtccttcatcagcttttattttttttatttttattttctgcttttgttagataaggcttttaagatcatgaacctccagctttagcaactcatatatcagtctctcacatggccacaattctagacaaaaaccaaagacccagaggccagagcaaagtaggaccttctgaagattcactactggtgtatccttggaccttcacattttactttaggattaatttattgaattttactgttacacatagtttttgacttgaattaaaatactagacaaagcagaaatgtacaatttctggtctgtgttttccaggaaattcatagagaagagaatagagtggatgatgtgacttgaagtttttgcagcttattttttcccccactgtcagggcagaggcccattttaatgaatgtttttgcatgatctgttcttatgttaaccacatattttttttcccaattccacacagcaggtgatttcccgtgtgacatattttcttcatagtccctaatatagtcatcctctacagagttggcgtgctgtgtgcactgtggattaggaacagagtggagctgtaaccagtctcttctctggccctttgcctttatgtcagcttgcacttttgcctcacttattcctagtccagctcccaactgcctgacttaatggaccagaacggagatttggatattaagatgcagagggggaggggaagggatggtagagatagacagctctcccctactaggttgggtcatttcccctaataactatagagagactgtgtttcgactctcttttcattgctgtttccagaagagtggagagtgtggtttcaggcaaggtattaatgatacaattccgtggtatacagctcctgtgacatttgaagtttcttttaaaggggtttttcttaatcaaagttttacatttggcagcataagtagttctttatgcttcacaggacattgtcttcagagtaatctctctgctaaaatggtacatgtgggtcacagattggtttatgccactgacggttaagtttccaccccctccaatttgtgaaaaacagagcagtgacctagctgttgcatcatcatgactgccatgtaacctgtaattgctgctctccagtaattgtcttttcattttgatggtaggggccagactgaatgaataatgcattcttttttattcaatttatttcattcagtttattcttggcaatcaaacatcccataaactttgcttttattatcaattatgaatatgaattgtctggtttactaatgtagtcatttgttcatctttacttttagcagattagcaccataactaacttaaaactaagtttgttacctgctttttatactgtcacaaaggtttttgaaaaagctggggacactattttgtcttttagttttaaacttttttaaggcaaagcaagctccccaatccctgttctccaatatgtgtatgatgtgacttccatgtagatataaaaatgattgtgccctaaccaaacttcctcagattgtgcactgtttgtttaaaataatcacgtattttagtctgatgctgttgtattttttcattttatttaaaacactacttacttcttattctcttaacaaattttaaaaggtagtgatcttaaaaaaaaatcactggataactaggaaatatttttgttgttgttttgtttcttaaagagtacagaggccattgaagccttttgctcctcttaccgtgaaaatgaaatgttagccattgtatggctaggaaccaatgcacttggcagttaatggatctgctgttgctggagtgtgagcgtggacttgatgcagtgatgacaaatcattgcttagaattaatgttttcaaatgtgcaactctagtttttaaaacaaaatttggttctttacattcattatttcgtttttgtttccctttagtatttaatggtctttggagaaaaaataataaaacagagtgttatatatatattttttggtgcaagataagattttctgttttttgaaataagtctgtagcataaaggttaaactattttaagacaaaataaaatagagtgtatttaaaaaaaaaaaaaaaaaaa

SEQ ID NO: 28371 - DNA, 5134 bp, Homo Sapiens
gaccagaggctgggtctaattagttgagaagcagtgacacccccaaccactccccaaacaggctggctcccgtctccaggccccaaggagccacacctggaccagaccccaggaaaggtaagcaccaacggcagacctgggatccgtgggtgggggcctctgggaatttccctagggggatgctgcatctgggggtcttgctgtcttgctaactggctctgtccctttctggacacagattctctgggtctcagtttccccatctgtacaggggctggagtcaatgatctctaagcatccatccagctgatcggctctagttctatggtcctgttggcttctaggattccttgttgttgtagtcaattgggggaagaaggtgcagagggagtgcacagagttaacatcctatcagcccaagcttcacctcggcacccgagtctcaggcagtctccctggcttctacataggcagtgcttcttcctcattgtgtggggctttgattttgtaattccaagagcctggggctcctggcaaggaaaatggttttcaaataatggtttcgaggaacaaagctggggaagaggcaatgtaagctcaggctctggcaggcaggcagagatcctgggaaggctgggtgctgactgcacatggagcaatgggaagggatgctggtgagaggagacgggggcacttaagctccggccccagctctgctctcagtgcccggctctgtggtcttgggctggccccctcccttctctgggccatagttttcccatctgtatagcaaggccattggacaaaatggtccctctgcagatgtggcttctgagttgtttgtgcctgagggacagccagtgttgggaagttcccccaggaggtccctgagccgagtctgaactttgaccacaagcttggagtccaagcagatgaagtcctgtgggagcttttggaggttgagcctgagtgagggagagtagctgaaggttctgtgactgaaggcttggccagaggggtgccccgagccctccagatgaacttggctgcaaccagcctctggtggggaaaggactgatctctggattcaaccacacaggaatgtgggacatggaagtaggtaagggatggaaaagatggcagagggcttcgcgggatgaagcagtggggccaggggacttagaggaatgcaggaggcatgggccactgcactcagccaacacctatccttgaggaatagaaagatccaggctccacaccacacaccatcactgactcaagtggctgttctgattcccagctgagcctgaggggttcggggaggtaatctctgaggtcctcactgctgggccgtgcctgggcatggcctcttcctgcaattttccaactaaactctccgggggggctcagcgccatggggtggttcgaagaaccatgatgaaggctggttcgaattgtgatgaccatttttgtccacatctcctaggacccataagccagagtttctctggagcttatagctagaaggggttctgggtcctggagtgcaggcctgtcaactttacaggagagcactagattgctttctgaagtggctgaaccaggttatgcttccatcagctgtgtatgagcatccccatcttcttgaccacacttgaagccatcagtttccttgaagcatatgggttgcacacttcattttgcatgtatcaaatttatataataaaaaatgtaaggaagccatggaaataaaaacgtaggtgtgccttctgtaggctgctacgctcctgtgcacgagggcgtctagaactttgccctccatgcacaagttgcagagcaccctcatcaggacatttacgaaggccctggggtgggatgggcactgcctatgtggccctcccccagcccagcagtatgcagtggcccgggtccaatcaaaggtcgcctgggagggtgagttgcaagaatctggggaaaagagcccaaggtggctgccgcctgctaacagcttgtctagacaggccccatggggcttcaccgcacattgcgagagctctggccagccccctgcccacttgcaaaagaggctgttggcagcaacacttcaccactagaaacctttactccaattcgaaacatgccttaacgcacagtgtgaattacccactctcgtggcccacagaggttgactcattcaggcccccttttgttcagatgaggaaactgaggctgactccgaagcctgggggctttcagatgtggagtgggtccctgtgcccaggtgatgaggggaccaggcgggtctggagcagggctggagtggggctcagatgtagtaggctggcagttaaaggtgccagatgtgagccaggctgctgggtttgaatcctggagctgcctcatagcagcagtaggactttgggtaacttacataggtgctgtatgcctcagtgacctcatctgtaatatagagatgataagagtacctgtctcattggtctactgagttgtccggattaactcattaaatgagttaaaactcatgaagcccttggaactgtgactgacacatagtaagtactcaataaaaaataactgctaagaccagccacagtggctcacacctgtaatctgagcattctgggaggccaaggcggaagaatcccttgagcccagtatttcaagaccagcctaaaggtcaacataggcagactctgtctctactatacatttttagattaaatttttataataataataaccactaaaatgtgattactaaagacagcttcttcacagtacaaagagatgctcttctgagtaccaactctttggaggataaactgcccttataccttcaaaaataacacttgccatatatcaagtcctttcaagtacctggagatttacccagcactctgagataaataccattatccctctgggcacacagaggctcagagaggtttagtcatttgcccaaagtcacacagcctgtacgaggccaggctgggactcaaactcagttctgactgattctaaaatcatgtgtttaactgctgcactctaggaccacccgcaatggatctgtgaaccagaaccagctctggttctgacctgcctagtagggcctttggcatttgggggaggaggccattggaagtccgaagcccccttccagattaggcatgattgcagtaagagaagagacagaccctttggccccccacccctgctcaggctcaaaaatgcagaccctgccgaaacagtccttctcacccagaagcaccccatagggtgggctgagtaaccttgggggcctcgtcagtcttgggctgccccatgccctgcacagcccgcctgaggtttgaggaaggggcagttggctaggcccagactggagaaagccaccccaccatggctcttctgcaagaacccccggccagccacaagcctaagccccctccttaaaagctcctcctctgaccttagctgtgcatcaagggagaaaagaaagctccaggccgggtgcggtggctcacacctgcaatcccagcactttgggagaccaaggctggcagatcattaggtcaggagttcgagaccagcctggccagcaaggtgaaaccccatctctactaaaattacaaaaaattagtcaggcatggtgacacgtgcctgtagtcccagctactctggaggctgaggcaggagaattgcttgaacccaggaggcgaaggttgcagtaaaccaagatcacgccactacactccagcctgggcgacagagcaagactctgtctcaaaaagaaaaaaaaaaagaaagctccaaactgctctgctgccacatactctactcctcctgtccctccaaggaggcagggatgggggtggagtgtctagagggaggctgcctgctggcctggggagggatccacagaggctatgacaccacccctggctgggctactgggctcagaggcccccggtcagcctgcccagagcctgccagccaccaggcatgtgacccaacaaccccgatgagctgagcaaggcagggtgaaggagaaagaggctggctaggaccaggccctggctctgcagccagcacaactgggtaactgtcccactcctctggggcctcaggccataatgttccctggtttgggacagaggggacagttgaggtcattccatgtgtgatagtagacacctggattctcagagagggaaaatctaaggagctgggggcgcgccctggatagacagagaagaagacggcattccaggtggagagctctgtgtacaaaggtatggaggcaggattgcagaggcattttcagacaacagcagagaagcccagttggctggaaccgagagttggtctgaagctcagtgaggctggaggttggcgaagcagagaaggcctagagtgtgcggtggctttggcaacagaaaccaaagcctcagagcttgggaaaagttctccttggtatctgtctgtccctgggagggggtgcctttctttagcctatttgtccccctccccaaaataccatcagccaagaaccccagtgcagggcagagacctaggaatttggataatgggcaactctgagatgtcaggcaatggggaaaggagagctcaggtgggactaggaggggtaggaagcccgagggctgcagtcaccatcttcagaccactccagagcttcctggggagcaggaacagaggacaggccatgaagcccagaaaggcagatggcagcagaatactaggaagacacctccaatagtctgtccaaagagggtgaggggattaggaagtacagacatatcctgagttacaattttctattttaaaatgctatgaaagctatatgcatttggtaccctcctcaacttatgacgcagttgtgatggggttataaggttacttcggataaaccaactctatattgaaaatatcgcaagtcaaaaatacacgttcgggccaggcgcggtggctcacacctgtcatcccagcagtttgggaggccgaggcgagcagatcaggagttgaggagttcaggagttcaagaccagcctggccaacgtggcaaatacccatctctactaaaaaaaaaaaaaaaaaa

SEQ ID NO: 28372 - DNA, 3443 bp, Homo Sapiens
gcagccggtccaggcctctggcgaacatggcgcttgtcccctgccaggtgctgcggatggcaatcctgctgtcttactgctctatcctgtgtaactacaaggccatcgaaatgccctcacaccagacctacggagggagctggaaattcctgacgttcattgatctggttatccaggctgtcttttttggcatctgtgtgctgactgatctttccagtcttctgactcgaggaagtgggaaccaggagcaagagaggcagctcaagaagctcatctctctccgggactggatgttagctgtgttggcctttcctgttggggtttttgttgtagcagtgttctggatcatttatgcctatgacagagagatgatatacccgaagctgctggataattttatcccagggtggctgaatcacggaatgcatttcaaagcttaaagttttcttggcacgcttttcaaacgcccatctgactttgaagcaggctgcctctccacagaaagcctgctccagcaatgactaaaggattgacctggtgccatgcatgctgctctgcacaagaaggacatttggaaatgaccttgaagcgaagttttgccaagttgatgaaatacgggccttcaagaagtgccatttctcaagcgatgtacagaagggtatccgcagcattgtcaaaaattaccccttaatttggtgttggatgaacatgaatttttaacctccataaggaatgatacttgctcttgattttattagttgcattttgtaacaggttggaaaaattaggtaatggagaactttggcataccacttttgtttcttttaggtgatttttaaaaaacatttgctgaaggagaggttgatgctcaaagggtacagtgataaatggagagacgggagtttaaaatgaaggataagccgcaaatgaggatgaagttaatggatagagaaaagatgggaggaagaggtatctctctttactcgtaagctgcccatcgatatgatttagactctaggagaggggcgtttctttcctcagtaggcacactcatagagtaaactgttgccgctgtttaaacatgttaattgatgttgacaccagttgttgctatacagttttccattttactgagcgatgtatttatgttgctgcataatgtcgcctgattgcacttctcatgctggtgaagttggctgacatttcaggctctggataacatgaagctgtgctttaaccttatttggaagtcagggttagagtggcactggaaggtctccttcagcttcccttcctgtgacctgcctactataaccctggcaaggctgagacagtccaagtttggggcagtcaaggtgggacagcagaagatttcagggtacaagtcatctattctcttatgccagctctcagatttgtatataaaatctgattctacacttcttttaacaaataataaataaataaataggaccatccaacccctctagagctctctaaggagactgtagaagacttgtggccactctcattttaaagattctaataatctccacaaagtaatcctgggaaacatacatctgtaagaccagggaaacatactggcaatagcaacttcccagaacattcctttttacactgcctgggatttttcaataagaaatttggcatttctgtaaatttaaagtgtattcagtaaaattaatgcgtttttttcttaaaagctcaagccttccagactcatcattttgtagttaaaaaagtaagccatgcaactgagataaaagtcaaagttatagattataactgtttgcacaactgttcacatttttaactttttttattttttggagactttttaagagtctcactgtgtcatccaggctggaatacacagtggcactatcatggctcaccacacccttaaactgcagggctcaagcaatcctcctgcctcagccccccaagtagctgggaccacagatgtggaccaccacccctggctacttttttaaaaatttttttgtagagacaatgggctcactatgtttcccaagctagagacaatggcctcattatgtttcccaggctggtctcgaactcctggcctcaagcgatcctcctgcctcagccttcctgaagtcctaggattacatgcatgagctaccacacccagcccctgctcacattttatatagtaacttattttaagaatagtaaagtatttgcaaaatagttttttaatacagtaatttattatatattgaaatcaagcttgatgatatttcattaggttttgctgagtgtcatatgctaagttatttgcttatgaatttttctccaattgcctgtatttggtaagtttgcatggaaagttctgacaggaaactcagaaatatttcattgttttaccctactatcttttttgatgtgtcttaaagttgatttgctttaaattgcagtatcatcctttttttctgtacctaaatgtttttaactgaagaacacaatttccctcaaaaccctcatccctaatttagagccctcttatattaatatgagtcattttaaatgtatttcctgaaacacttctcaacttcgtaaataaaaaagagatatatcttagtccattcaggctactataacaaaatagcacaattgggtggcttataaacaacataaatttatttatcatagttctagagcctgggaagtccaagagctgggtgccagcatggttgggttctgatgaggatcctcttccagattacagacttccagcttcttgctgtgtcctcacatggtggaaggaacaagtaatctctctggagcctcttttaaaagcccaccaatcccattcattgaggattccaccccagtgacctaatcacttcccaaagggccatctcctaatgctataaccttagaggttagggtttcaacatatgaattttgaggggacagaaacattcagcccatagcaggatgagaaaaagaaaggaaagtacaacaaagaacatcaaccataaggaacaccatgacttctgatatttaatatcatggatcacagattgtaggagtcgagaaacagaataaaaagacaaggcccaggcccagtgagcttttgatgcttgaggctcctcacgcccttgctctcccactgacctcagtgctcagcactggctttcttctcctggtgatatttccatttatcttttggtgtaaacattttagagatgagagaagtagggagcttatcattatttagtctgatcagacaatatcttcacttttaagttatgttcagaatttcattgtcctgttctttttaagaatcatatgagattatttttgtgtatgtgaataaactatgaagcattttcttacaaaaaaaaaaaaaaaaaaaaaaaaaaaaaaaaaaaaaaaaaaaaaaaaaaaaaaaa

SEQ ID NO: 28373 - DNA, 9577 bp, Homo Sapiens
ggagtgcaatggtgtgaactcacctagctgcagcctctgccttctggattaaagcaattctcctgcctcagcctcctatgtagctggtattacaggtgtataccaccacgcccggctaatttcttgtatttttaacagagacagggtttcaccatgttggccaggctggtctcgaactcctgacctcgtgatccacccgctttggcctcccaaagtcctgggattacaggcatgagccaccgtacccagccactcttgattaacttaatggaaatatttacagagattctttctcttctgggttctagcgtcttatctgtaacctctgcaggtaatacattttccttcctgatgatagcatttctatggttgctttcacttgcaaatcctctaacacttatttattcaatttctgattggcattagacataattctcaatttttagtgacagcactttgtttaacttacatataaatcgactttgccttgaactgtgacattgactagaaggatgaaacttctaacatgctctagaacatagtctgactggctaatttattatttagaagaaactaatattgccattatgagggtgtggggaaaagcaagagagatcagattgttactgtgtctgtgtagaaagaagtagacataggagactccattttgttatgtactaagaaaaattcttctgccttgagattctgtgaccttacccccaaccccgtgctctctgaaacatgtgctgtgtcaactcagagttaaatggattaagggcggtgcaagatgtgctttgttaaacagatgcttgaaggcagcatgctccttaagagtcatcaccactccctaatctcaagtacccagggacacaaaaactgcggaaggccgcagggacctctgcctaggaaagccaggtgttgtccaaggtttctccccatgtgatagtctgaaatatggcctcataggaagggaaagacctgaccatcccccagcccgacacccgtaaagggtctgtgctgaggaggattagtaaaagaggaaggaatgcctcttgcagttgagacaagaggaaggcatctgtctcctgcctgtccctgggcaatggaatgtctcggtataaaacccgattgtatgctccatctactgagatagggaaaaaccgccttagggctggaggtgggacctgcgggcagcaatactgctttgtaaagcattgagatgtttatgtgtatgcatatctaaaagcacagcacttaatcctttgtgggtgtgtaggggcaacccacccctacagagggacttaggtggctctgaagaaccagttgtatttctaatgtttgcaatgttaaatcactgatattgccaacgtgaaatagtttccatatgctgtgttgtcaatacacaacttttccaaagatatcccaagctgtagtcttaggaaattgtgattttacttatttggtctcataggaatttggggagctatgctggatctccataaaatgagctccagaaagacatgtgcgcgcacacacacacacacacactcacacatgtaccacaccacacttgactctgtttatttgggacccatgattatcagaagtgctattttcaacaaatacttctgagaaataatctgaacacttaattggatgtaaaagagtggctatttactattctaccctttagttagcataatcagtgtttccagcagcaaaagcaattggaaaattgctagttttattaggttcattattctcccttagcgtagtgtgacatcagcatggctattattcttaaatgcctctttaaaacaagagctggtgcttcttacaggcaatgcctaactcttgggttttgtagagggtccaaaactctttagaatctataattcagggaaagccttcactttggttttacattttgtctggtctctttggctgacagaatttatgtcacaaggagcacatgtttgggggaggctcatggacagcccattgcgcttgtgctttggtaggaagtacgtgcagttaaggggaaggacttagttactgattctagggaacaattgggtagaaagagatggactccctgtatttgaaattcagaactcaagcttggctctaagtgtttccttgctttgctgtgctccaggggagtcactgagcagaaggaagcgagttgcctgagattcctcaaagcctgcaacccttttggaggttacattgttattctcagggcctttatgatgcataataaagacccagcttggaccaatattaggatgagttatcttgctatgaacattcttttaggtagaagttgctggtcccatcttgctcacaatcctccaaaatttggaagtaactttccatgagacttagcttgcactgagagctgccctcccaccctctctccaaatttcctcttgggagtagcctaacaaggtgctgtcacagacccttgccagccacgatgaccccacccagaccatccctctgctgtttcattctttgatactctctgaagctctctggggaggggtgagacctgctgtctggtttgtacggtgtgcccaggtcttacagtcatggctggctgcctctctctgagaactgggactcctgagcttggtgaaatacctcggccatcgatcatgttaaattatcagggacactcattaaaaatccgagtctgctccagatggactctctctctttctgccctgaccgtgagagagactatgagagagagagaccttgagagagagtgagagaggctatgagtgagagagagagagagagaccgtgccctgacctgctggacagtggagatgctcgtgggctgtgaacaacagatgcaaaggctgctgggaatcccatctttccagcatcatctgccaaggcacatcagttcctgggtgtcttgatgggttctggcagcattactgtcattgaaggaaaacattttagccatattaaaggtgaatgcagcaatccccacacagcctgcctggaagggacgcgggataagggtaggttttccctgtgatggacaggaggcaggtggccctcccacagccctgcctggcaatggagatgtgtccccaaaaggcactgggggccagctggagtgctgtgccgaggcgggctgacccgggccttgggttcgctctgattgcagcggtttcccgccagctccttagagagctggcagatgacccagccccacagcaggagctgtgaatggcagaacgagatacaacaatttgatatccacttgccagatgagccgggtgtcgtcagtcgcctggctctgcgccaacctctttttgcacaaacacttaggaattcagccagaaggaaaagcactctgattatgaattgagcagaaggaaacaaagttctgcagataaacaccaatgagacaaaaaaccacgaataagaaaaatgacagaaaaggagaacattcccagaagcctccagccagtgaacggcctccatagcaagagcatggaggccctgggttttgaaccttgagataaggaagatgatgaaaacttccctagcagccaggcaagcacaagaatcctgtgaaatccaggtctaagtgttttgaccacagaagtaatattatgtcatagttgagagctgtgagttgctaaacccaaagaaatatctaaggtaagattatcttctcttccttgtagacggcgtctaaccatgtcccagtgatgttcagattcattatagggtcgaggtataatacaaaaatctgacgtattccagtcacactgtaactgaaaaagatattccaagctcatgagcctatctcccatccaaataacagtttgtctaagatcattaatttgatttgccaatttttaatctatttgagtctgagaattccacaattttgaggaattcttttgccaattattcacatattgtgcagtttgaacagaggagtgtaaagcaattccagcaggcccagcagtatctgtgactgcaataagacccataatcactgcaatcaaagtaaaaatgaatcttttagatctagttagaactccttttaatacttctgttaagatatgtatggatggagaagcatcccaccgtcgatccatggacacagggatccacacgccttctcttgcccttactaacagaataccatgctgccaatcaaaagttgaatcaatgcaagtaaacaatctacaattttcacaggttatagtttgggaatctggtttaatagctatgtttcctacaactagcatataagggggttttacacaactttgcaaagaaattgtcagattggaatttaggttaatagtataatatggcttatgatttcttgttcccataacttgatttccagaccaaattctaatgtggtacgaggccacagtgagacaggcagggagccccatggcagtgtccaggggtgaatgtttatagttgaagccccagtgggcgtgtgttacagagtgctcttttagtttagctgtctgtaggtagcttgtgttagtcggcttaattagacccccgccttattgcaaggacagagggctctctttgtcctggggttcttgccttggtgtaccggaagtggtgcgatctcagctcactgcagcctccgcctcctgggttcacgccattctcctgcctcagcctcctgagtagctgggactacaggtgcccgccaccacgccgggctaatttttttgcatttttagtagagatggggtttcactgtgttagccaggatggtctggatctcctgacctcgtgaatctgcccacctcggcctcccaaagtgctgtgattacaggcgtgaaagtgcaaggtttgattgagtggaagtatctctcagcagatgggggagtcagaagggagatggtttacccctggagtcgggtgagtggtttacccctggagtcgggtgagtggcctgactcttctccgactctcccagccaaactctgcgttgttcttccagtcagtggcctgcagtgtgccagtgcccattggtgagttcctcttgacgttcagcacccttgtgttcctccgctgatgtgctcctctcgaagttcagctgcctgtgtgtctgcccgctagggtctcagtgtttttataggcacagaatgggggtgtggcagccagggtggtcttgggaaatgcaacatttgggcaggaaaacaaaaatgtctgtcctcacctaggtccgtgggcacaggcctcgggtggagccctagccagggaccacaccctcctctacccagtacttcccttcctcacttccatatcatttaaagggaccatattcttcccttctgagcacttcccttctgtatcacaaagtgttgggattataggcatgagccactggtcccagccaattccgttcttttaatgcaaactagaaaataggtgttcagaaaggcctgccctatccacctcagggagttgctatgaagatcaaattagatcatgtgcaacagaagtttagaaaagattccaaaagcactgtgcaatgggattgtatttttaaactccactgagtggacttaaaactatggttttttttctttctttcttttttttggttgagacagagtttcactcttgttgcctaggctggagtgcaacgatgccatcttggcttactgcaacctctgcctcccaggttcaagtgattctctgcctcggccacccgagtggctgggattgcaggcgctcgccaccatgcctggctaatttctttctttcttttgtttttgtctttttagtggagatggggtttcacagtgttggccgggctggtcttgaactcctgaccataggtgatccacccatcttggactcccagagtcctgggattaaggcttgagccaccgcacccaacctgtgtttcttttttaagcaagaaaacaaatgcctctccccagcgctcactaaacaaatccctctgttttttttttccataggattcttatccttcttgccccactgcaaacaatctattttcttttggcccttccatccatctgtgaaaggggcagggtttctagctaacccttaatcaaatatttttgatgaccacagtcaagatagtacttattatttttttgagacggagtttcgctcttgttgcccaggctggagtgcaatggcacaatcttggctcactgcaacctctacctccagggttcaagtgattctattgcctcagcctcccaagcagctgggattacaggtgcacaacaccacgcccagctaatttttgtatttttagtagagatggggtttctccatgttggtcaggctggtcttgaactcctgacctcaagtgatctacccacctcagcctcccaaagtgctgggattacaggggtgagccacccagaccggccaagacagtgcttattaatgcctgagatgcattcaggagcacatgacctggctgtgactgttctaacaaagttccccaaatgggtggctcaggacaacagaaagtcattctctccatttccagaagcttgatgtctgaaatgggcagggccgtgctccctatgaaggccctaggcatgaatccttacttgcctcttctggcttctggtggttgctggcaatccttggcttgtggccacatcattccattctcttccttcattctcatgtggccttctcccctgtgtgtctctgtctcttcttctcttcccatgaggatgccattattacttgatttaaggtccatgctattccaatatgacctctttgtaattagatctccagtgaccctaatttcttttcattttttttttttttttgagatggagtcttgctctgttgcctaggctggagttcagtgacagaatctcagctcgctgcaactctgcctcctgggttcaagtgattcttcagcctcagcctgtgaagtagcagggattacaggtgcacgccaccatgcctagctgatttttgtgtttttagtagagacagggttttgccatcctagccaggctggtctcgaactcctgacctcaagtgatcctcctgcctcagcctcccaaagtgctgagattacaagcatgagccaccatgccctgcccctattttctaataaggtcacattctgggattcctggtgaatgtgaatttttggaggacagtattcagtctaacaaaaggcagaacatcctcattttcttccctacctcagaaataaagaagttaacttcaacccctctgagagagagaggcttcctgagcttccaacaatcagttatccaaatattagtcactgaagagcactaagggttgtgcacagcacgtggccagcccgttctcagagtctgtcaagtttaaggtgaacgctaatcctgaatgagttttaaaatgtatttggcatatcctcgtcattgtaaaatgttctcacatcatgatggctggggcttccccctcaggtgtaatctgcgaagtcagacgtgacacagcctgggtgaggtgggccaagctgggaactgggttaggagggaagctggggaatgatctccaaggtctcagatcccaaactggctttagcctgattcacccagagggatctcataaaaaatgcacattacggggcccaccccagacctaatgaatcagaattacctgggaaggagcctggggagctctgttttcagaagcagcccagccgaatcctacggtcagacagggctaggaaaccgagctcagtctagcgcggtagttcccaaactcgtctgtgctccaaaaaatacagatgctgatgtccaggcatggtggctcatgcctgtaatcccggcagtttgggaggctgaggcgggagtatcgcttgagcccaggagtttgagaccagcctggagaacatagggagatactgtctctataagaaatttaagagtcggcgaggtgtggtggtgcccacctgtgatcccagctaccgtggaggttgaggtgggagggtttcttgagcccaggagttggaggctgtaatgacctatgattgtgccactgcactccagcctgggtaacagagtgaggccctgtctcaaaaacaaaacaaaaaacggatgctatgtcccattccagaggttgatgtttaattgttcctgggtgtggcctgggttttggaagatttaaaaaaaattcccgggtgaccctaaagtgtagatgagtttggaaaccacacatggaaggcacacttgaatgggggagtagtgaggtggcatgggctagccggccagaacccaggggtggggcagtaggaaccagcattgccgaggccatgaaggctgggaagcatagtgtctggggcccataaaaatgcttcgacatgaatgctttagacctaagacaattggcttctaaatatgaaaactgcaaggctgaaatgaatgcatgtttaatgctttacaacattgtcaagtggtcagctgcaactccgttctgagggcatgatgcctgagatatgcctgtaatgggggttgattttaatgaatttaatatggtgtggagtggggccttcaaaagtaaagatgtcagctctaagtttgttgcaggggtcggggcaaaggtcttaaaaccccatggtgagcagatggccaatcctgaacaccccaattttaaaacagggctttttttaccaagagactttttgaaaatagctcctattttgagggggggaaccctggtaggagagagccagagttaagcccagctgagagtgggttggtaggcaagggtctgcctggtcctcactgaagcttgatactcagggtgagcttcctaaaccaatgcagatttgctggcccactgagcctcccagatgagaacctgcatttcaacaaggtcctcagtgcagcaaagtttgagatatactgggctagaacaaccaggggacacaaaggttctctgaaaactaaggaaaataggcagggtgtggtggctcatgcctgtaatccttgtattttgggatgccaaggtgggcggatcacctgaggtcaggagttcgagactagcctggatcaatatggtgaaacaccatctctacaaaaaatacaaaaattagctgggtgcggccgggcacaatggttcatgcccgtaatgccagcattttgggaggctgaggcgggcagatcactaggtcaggagatcgagaccatcctggctaacacggtgaaaccccgtctttactaaaaacacaaaaaaattagccgggcatggtggcgggtgcctgtagtcccaactactcgggaggctgagggaggagaatggcatgaacctgggaggtggagcttgcagtgagccgagatggcaccactgcactccagcctgggcaacagagccagactctatctcaaacaaaaaaaaaagttatctgggtgaagtggcaggtacctgttgtcccagctacttggggggctgagacagcagaattgcttgaacctgggaggcggaagttgtagtggcctgagatcgcaccactgcactccagtctggtgacagagtgagactcatctaaaaaaaaaaaaaaaaa

SEQ ID NO: 28374 - DNA, 8993 bp, Homo Sapiens
cgcatcgatcagaatgggatcatctccaccctgctcggctctaatgatctcacatcagcccggccactcagctgtgattctgtcatggatatttcccaggttcacctggagtggcccacagacttagccatcaacccaatggacaactcactttatgtcctcgacaacaatgtggtcctgcaaatctctgaaaaccaccaggtgcgcattgtcgccgggaggcccatgcactgccaggtccctggcattgaccacttcctgctaagcaaggtggccatccacgcaaccctggagtcagccatcgctttggctgtttcacacaatggggtcctgtatattgctgagactgatgagaaaaagatcaaccgcatcaggcaggtcaccactagtggagagatctcactcgttgctggggcccccagtggctgtgactgtaaaaatgatgccaactgtgattgtttttctggagacgatggttatgccaaggatgcaaagttaaataccccatcttccttggctgtgtgtgctgatggggagctctacgtggccgaccttgggaacatccgaattcggtttatccggaagaacaagcctttcctcaacacccagaacatgtatgagctgtcttcaccaattgaccaggagctctatctgtttgataccaccggcaagcacctgtacacccaaagcctgcccacaggagactacctgtacaacttcacctacactggggacggcgacatcacactcatcacagacaacaatggcaacatggtaaatgtccgccgagactctactgggatgcccctctggctggtggtcccagatggccaggtgtactgggtgaccatgggcaccaacagtgcactcaagagtgtgaccacacaaggacacgagttggccatgatgacataccatggcaattccggccttctggcaaccaaaagcaatgaaaacggatggacaacattttatgagtacgacagctttggccgcctgacaaatgtgaccttccctactggccaggtgagcagtttccgaagtgatacagacagttcagtgcatgtccaggtagagacctccagcaaggatgatgtcaccataaccaccaacctgtctgcctcaggcgccttctacacactgctgcaagaccaagtccggaacagctactacatcggggccgatggctccttgcggctgctgctggccaacggcatggaggtggcgctgcagactgagccccacttgctggctggcaccgtcaaccccaccgtgggcaagaggaatgtcacgctgcccatcgacaacggcctcaacctggtggagtggcgccagcgcaaagagcaggctcggggccaggtcactgtctttgggcgccggctgcgggttcacaaccgaaatctcctatctctggactttgatcgcgtaacacgcacagagaagatctatgatgaccaccgcaagttcacccttcggattctgtacgaccaggcggggcggcccagcctctggtcacccagcagcaggctgaatggtgtcaacgtgacatactcccctgggggttacattgctggcatccagaggggcatcatgtctgaaagaatggaatacgaccaggcgggccgcatcacatccaggatcttcgctgatgggaagacatggagctacacatacttagagaagtccatggtgctgctactacacagccagaggcagtatatctttgagttcgacaagaatgaccgcctctcttctgtgacgatgcccaacgtggcgcggcagacactagagaccatccgctcagtgggctactacagaaacatctatcagccccctgagggcaatgcctcagtcatacaggacttcactgaggatgggcacctccttcacaccttctacctgggcactggccgcagggtgatatacaagtatggcaaactgtcaaagctggcagagacgctctatgacaccaccaaggtcagtttcacctatgacgagacggcaggcatgctgaagaccatcaacctacagaatgagggcttcacctgcaccatccgctaccgtcagattgggcccctgattgaccgacagatcttccgcttcactgaggaaggcatggtcaacgcccgttttgactacaactatgacaacagcttccgggtgaccagcatgcaggctgtgatcaacgagaccccactgcccattgatctctatcgctatgatgatgtgtcaggcaagacagagcagtttgggaagtttggtgtcatttactatgacattaaccagatcatcaccacagctgtcatgacccacaccaagcattttgatgcatatggcaggatgaaggaagtgcagtatgagatcttccgctcgctcatgtactggatgaccgtccagtatgataacatggggcgagtagtgaagaaggagctgaaggtaggaccctacgccaataccactcgctactcctatgagtatgatgctgacggccagctgcagacagtctccatcaatgacaagccactctggcgctacagctacgacctcaatgggaacctgcacttactgagccctgggaacagtgcacggctcacaccactacggtatgacatccgcgaccgcatcactcggctgggtgacgtgcaatacaagatggatgaggatggcttcctgaggcagcggggcggtgatatctttgagtacaactcagctggcctgctcatcaaggcctacaaccgggctggcagctggagtgtcaggtaccgctacgatggcctggggcggcgcgtgtccagcaagagcagccacagccaccacctgcagttcttctatgcagacctgaccaaccccaccaaggtcacccacctgtacaaccactccagctctgagatcacctccctctactacgacttgcaaggacacctctttgccatggagctgagcagtggtgatgagttttacatagcttgtgacaacatcgggacccctcttgctgtctttagtggaacaggtttgatgatcaagcaaatcctgtacacagcctatggggagatctacatggataccgaccccaactttcagatcatcataggctaccatggtggcctctatgatccactcaccaagcttgtccacatgggccggcgagattatgatgtgctggccggacgctggactagcccagaccacgagctgtggaagcaccttagtagcagcaacgtcatgccttttaatctctatatgttcaaaaacaacaaccccatcagcaactcccaggacatcaagtgcttcatgacagatgttaacagctggctgctcacctttggattccagctacacaacgtgatccctggttatcccaaaccagacatggatgccatggaaccctcctacgagcttatccacacacagatgaaaacgcaggagtgggacaacagcaagtctatcctcggggtacagtgtgaagtacagaagcagctcaaggcctttgtcaccttagaacggtttgaccagctctatggctccacaatcaccagctgccagcaggctccaaagaccaagaagtttgcatccagcggctcagtctttggcaagggggtcaagtttgccttgaaggatggccgagtgaccacagacatcatcagtgtggccaatgaggatgggcgaagggttgctgccatcttgaaccatgcccactacctagagaacctgcacttcaccattgatggggtggatacccattactttgtgaaaccaggaccttcagaaggtgacctggccatcctgggcctcagtggggggcggcgaaccctggagaatggggtcaacgtcactgtgtcccagatcaacacagtacttaatggcaggactagacgctacacagacatccagctccagtacggggcactgtgcttgaacacacgctacgggacaacgttggatgaggagaaggcacgggtcctggagctggcccggcagagagccgtgcgccaagcgtgggcccgcgagcagcagagactgcgggaaggggaggaaggcctgcgggcctggacagagggggagaagcagcaggtgctgagcacagggcgggtgcaaggctacgacggctttttcgtgatctctgtcgagcagtacccagaactgtcagacagcgccaacaacatccacttcatgagacagagcgagatgggccggaggtgacagagaggaccaaggacttcttgccaaagacagctactcttttgtggccgcatacctgactgtgttgtacttttaaaaaaatgattttttaacaagtgcagaaacaaaaagatactggttgcattgtaactcatgcaacatccttttttttagaaaagaaaaacacagatttggccttcgcacattttttgcaaagaacagaaggtatttttttctgtagtgtgatcacaatgaaaactttattgtcttttgttccctttttccttgaggatttttcccttgtcgtttggggtatgtatctcctctctgagatgcatctcctggggtgtgtcctcgtctgtccctaggtacccagtgtgatgtgggacatgaatgtctgtgctaacttgtctcatgtgcaaccctttcttcttcgactggggtcgggcaggagtaaagggagtgatgggccagtacaacaccccttccaagggggcctgggaggagggtctgtaggacctgaggctccttggcagggctcctgcagaagagtggtggatttcttctcaccttgttctctgcctccagaggatcatagatggcttcatcttgctccagggaatttcatggtgttgttcagcacctttttcaagctgccccaaactcctgttcaagctttctattttgatgctgaatgaaaccccctaccacttttgcaaatcctgtgtagttgtcggtgccacccccatgctgggatagagaaagtgtctcccaggtcctttcccccagaccagtgacataacatcctgggctcagagtcccatcctcccgggagggaaagcacccaggatgcctgtgattggttggtcctccatgatgttcctgttcatctcctcctttctcccaaagccagatgtgagaacgagcactgcacagcaagccttcaatgtgggcaccatgtccacagaacagaaggccacccatggcaaaggcatggcagtggtggcgagggcaccagcctgccttccgaggcaaagccctctctctatgactttgagtatcttccctccaccactcagccgccaccactgagacgtaggaatgtggagggaggtgcttggcggcctttgattctggaaaaatgcttaacaaaaaaagccagccaaagagaggaaggcataagctaagcatccttctaaccagttcccaaagtcccatctgcctccatgtaccagctgatcgcagagctggactggggcaggctgggcttccaggaaattcctgaagttctgaaacagcttcccctctagagaagcccacccaatgtgttttttagtgacaggaagaaaggagggaagagctgatgtggtgtggcctgcccatatcatacaaccccaccaggagcagggcagttcccaaggtgggtgcccgtagatctgggaggccaggctggcatgattcctgtgaagaactgtgcctgtgtcgtcagggagaggcctgagccctctcagaagcagggacagcccacacctgaagagcacgcccaagctgaggcagcagccagcaggctgggggagcagtgagggcagggggagtcacagccagagctgggagccccttgttcaaggattccattcctggttcatccgcctaattaccattgtcattaccactcacaggaggctctgggagatgggaggggaagccaaatgcttccttttaagctgggcttcttagaaaatggaacttttatgggttacatttacattaagtgtggaaaatgaattctgagtctgagctattccccgtggaaaccttgttggactgataagctcatggcacctctatagccttactcacatagtcttcagaatattacacaagttaatgaaactgagaaggtctgactgcatgaggatcggagcagcatgtagtctgggttctgcctggcagagggaggcaaccaaaacttcttggggagaggagatttcgccttaacgtcatcccactgggattagaggatgtgtttcgctaagtgctcttcctgtttccaaaaaaaaaccaccctgctgcagcagtgcgctttggcctgcttgtccactggttgcccattgcccctggatccagagctctactgagtcagatacagtgctctgcaggcctgctgtgggaggcatgagctggagatgggggctcccatctggcaggatcattcttggatgagatggaaaacagtttggcctgaagaacacaagttttgtcctccagaagggacttacgcctctcaaaatgtactcttcataccaagggcccttgggcaaagtgctcctgcccagttgatcagtcccatcctggctgcctgacatcagtgaagacctgctggggatgtctgctcagaggtcaggaacggcatgcggtccacaggaaccagctccctacgcttcccccacgccctgtccctcctccacagccccctccccaaaggaatagggtggacttttagggatcaaaaacagaattattgggtgtttcatttctttttttctttctttcttttttttttcatagagatggggtctcactatgttgcccaggctgttctcaaactcctggcctcaggcgatccaccttggcctcctgaagtgctggggttacaggtgtgagccactgcgcctggactgagtgtttgtttctttaaaggatcttatatttttcctgtgctacataccaccacagcagcccagcttctgtggggagagaagttgaaggatcccgaagctttagaaaaaggatctcagctgtggcacaggcagtgttatgcgcctcactgccacattggtgctgttgtattgaaggtggtgcttctggccttggcccttttgagttggtttccatttgggctgcaggtgactcagtgactccctcctcaagctgtcctcctgctaagaccagcagtcacaaacccatggcaagggtgagtgtgaaggcctaaccctgtgcctatgtaataggctccaagcatcgactcccatcctgagaggaccggcccttttgacactcaccaaccaaatctgttcattcgatagagtgaccaggcctccctcacctgcccaggtgtatgatcctacagttcctgccttctctcctaccccgcacagctgccaactggtcctacatcctcagcccctctgccaccaccttaaataggactttactgattccccaactttgtttttttgtaggatgagatttcctttttatcccacccccccacaccccaaacagacattgctggagggcagactggaggaaggggaaggcatgcaggtaaattactgccttgtcagcctctgaccctcatctctcagaattgttggctgagaattaacccaaggaccacaccagtgcctgatttctacttagggagagaggattggaaacgatccctaagaaactgactgagggtgagaatggccaggaggtgtgtgtccaaataaccaggagggggcacagaagatgatggcaaggcagactgggcagtgttttgtagacacagaacaaagaatcagaatttgaaaaaagaagaaaaacaaatcttcgcagctgcaactttaaagtatcacctttatagatggcagggatttccattatgcaaatggaatctaagatttcaatgtgaaatcttagaatgcagttttaccacttgcagtcttgtatttgtggtggccatgtggtgagggcggtgatgctgagctttctgcccaggaggaatgagctttcaagctctcagcagggtgtcaggcttggggatttgagcatccactgctcaaagtccaggctattctccagtcctcacggcagccactaagcccaggagccagacctggcccagggacacatctcctgagggatcccagaaagaacccagtctttcctttcccttggggtccttgttagaatgaaaacctctctatttaaggcacatcattcccagctaggtttatacacttgtctatattttactggaggaaagggaattaaaaaagaactctgcagttcaaggccctttcatttaaccttccaaaaacagcaaactcattttaaagactcattgctgaggtgatagagagaaaccttatcctctccaacctttacattcacaaaaaccatccttgtgtacttgactgccctagacagtggtgactcttaggtttcattacgaatgtggaatatcagagtgtgggaaggcccaggcgagggccaatgttgtgtttcttaccccctctggaatgccaaaggcaaggtactaggtgacctcctggtccccaagaaaatgtgatttattctgagggcgaacagccaagggaggactagtctggagcacgctcggccgtcctggcaggagctgagcctcaggtgtctggcggtgccccagcagccctggattcacccaacaccagaatcccacttttctaaatccacctgttgttctgagcacctctgaacccgcagcttcggcaaaaggagtctgtaccaagctgcttctggatgaccaacactggagactctggccttaccatgtggaaatcattttcctgaagtctggaaccaattttgagaagtttttttctcaacacttttgtgtttctaacactgtatcttgactgtgtaaataccaacaaggctgtaaataaatgcagatgtagataccttctagaaaaaaaaaagcataaaaacaaaaccagaagtgatcccgtgtagccttcgttgacaaataaagactattttgtgtttaaaaaaaaaaaaaaaaaaaa

SEQ ID NO: 28375 - DNA, 5419 bp, Homo Sapiens
gaacatttcactgcgcctgctatgttttcctcttggatccagaatgccaagagggtcccttcaatctgccatttatctcctcttgagatgcacagaaatcgggcaccagttgctcagtctccagactgttctcagcatcagacaatggccccgtgtttcctttgctctttttccatacattggcctcacctctccgattttttttctttctccccttccgcttttaattttttctctcttacctcggtttgagcgtctgccttctttcatagctttctgttttctctcagcatctcctccacccccttatgttttcagtttcttgtgactcgctctccagattccttcatattcaggaatcactgtctttgcccaacattgttgtgaacgtgccggccttttattgtggttgttcatccctttccctcttgccttcattgctccccgagccctccacctcagcctcctaaaacctttgaagttcttcagactggaagtgtctctggatcatgctacataaatgaggcaatagcacttgggatccattcagcatgaggactgtggaaatgatagtctttctcccattttgccctaggacgggcatctgttgatgggcaaggaattaacagagagcacatcccattctctgtgaccaatcactactattctttttcagttgttcattcagcatttataagttatctactatatgtgagactctgaggaaaaaaagaagaatcagacactattccagtctaaaagaccctatatatctgacgcaaaatcttactccacctttcaggagcattagatatagctgatcaaatgatggattgaaaactccttcttgctttaggtcctaaccctcttttgtcttctctctacttcatgggcattcctcaatctcctaagctggttcttcatcttcccaatctctaaacacaagagggcttcaggactcagtccatgaaccccttgccttatcactggggttgctgaggtgcatagaaccttgagactttctgatggatcaagcatataataaagagactgagggagacaagagaagtcactgtcgccagagttagattcactgccaccgccacccccaggagctgccagaacccttatgtcgccaccaccacccagatccctgcaccatgacatcagagaagaccttcaggccacaccacacctttgaacaaagagtagaagtttgacttctccgagagcagcatccacccaaaatcttggtagtaacagaacgatacaaggctgagaagcagcttcccgtcctggataaagcagtgttccttgtactggaccacatcaacctgagtgagctcatcaagatcattagaaggtccttccagctcagtgctaatcaagccttcctcctggcggtgaacagacacagcattgtagcagagtgagaaggatgaagatggattcctgtacatggtctgtgtctcccaggagacaattggaatgaaattgtcagtgtaaaactgaaaaaaaaaaatgcatctattttagaatttttaaacctttaccaaggaaaaaataaaggaatgttacccactgagatcgatcagttcatctaatcacagatcgtcaaacagtagtgttcccacctaggagtgtcaggaagttgtgtttgtatttgaagcagaaaactgggctccaagtgagcacgttcagctttggaaactatgttatttaacataggctagcttgttttcagattttaaaagtttaaaaagaaaatactttgcattctaaaaaaaaagagagagactgagggagatgtatgctcaagcaatgggtgtatcctcttgttcttcaccaaacaaggggaaagttttacattcatttacattcattttacaagtttgtaagacatatacagcttagggagaaaaatatgaaggcctcggttctggggagaaagcatgcgggcatttgtagtactgagactaaaagtaaggggagaaagagttgctgaggtaaagctaagttagaatatgaattattgctactataaatgacactaaatagaacctgtgaaaaaggagaaaatgtgaactatactatcctcctaaataaaagtaaattatgataccaaaggcttttgaaagttttgcccttccctctgagagtgtccagggccacaaggccaaactgcaatggcagtttcagaacagcaagacttttaaaagctttggtgtcataatgttatcattttgaagggttcacctgaataaaagccttagatttctctgtgtggtgaatatgaagcacccattctaaaattaaccaaggtgatcagagggaactagggcttctcccctttaaacagtgattctgttttcaagatcagtggaaataagaaaaagatggaaaactatttgttcaaagaaaggtactacctagattacctttattttctcacttcttgctgctgctgccttgtcttagggaaaaattgctgaaaataataacggtgggagtaagagaaggctaaaagggagatgagtttcagccacatttggagaaaggaagaattagatgaacagagcttggatgatggcagtcggtttctttgtttggaggaactattaatagtcttgatttagcccttgagctcctgttttctgtcttttgtttgtgttttatctgtctgattttttcctccttgaggcagcttgaaatgtgaaagggcaagggaacagagctaacgtagggtggaaacatggttatatgtaattaaggtcttacttcctcaatttgctactactgaagcccaagggagaccaagttctgttccacacaccatgtgagaggaagaggttgactaagatgagctaggcagttttatcagcttgttggtcaagggatgtaggatcctgagatggattcaatattttggttgatattaacagaaatataatttttaatttttttccaaagaaccagacagaagtttaagaaaagagtttaccatccaagaatttaatttgcttttcatcagagtatgacaaaacaggcatgctagggtccagcctcaactaacccgagttggtgaaaggaaacagaactgaattggaaataaatgccaggaggttctgagaatcagaaaaaatgatgagaagggtcagggtgaagatgacaaagggcgatggttctcaaaatcctgctgcagtgtgagaagtagctgccttttagtgtaaggtctgggcttatggaggaacccaagagagtaagaatggagtcagcaaattcatatttaaatgaatatgcccacattcctttgccctattgattccagaagttgaaattgtggcctttaatgtgtttaagcccttagatcatttgctaagagttcagggggaaaaaagcagctggttcatctctggtattttcagatgggttttctttacagaagttactcataagtggtattttcaatggagaccttcagaaaaaagatgcttggatatctcatcaggtttcagagaagtgttcagacttgttaacccttttaactcagctaaatgtccattaaaccataaaacaaagtccattacacttttgggccggggacttgagtgactgactcactcaccctgggatgttgctcatctcctgtatggactaatattggggcttattagatcatgggggtcagaaggctcacttcctctgtgcttggatgctggggctgttttgatgctagttggctttctgtgggtcttctcccttatcagtagaggatacaccccacttctccagatgagtcccttataaaacagctgctgcttcataagacattcccttaacccaagccctttcctccctatcagttacactaattgaagatcaaaaccatttccccccacctcccattacgtattttctacttatcctctaagaaaagaattacaggttaggattactctagaagtggtagctgtcagtagaggaatgacatcctaaaatatgaccattagagacaagaagaaattagaaagctagcatgcagtgggcatttaataaacagctgctgggagtggtggcggtggagaagagcagagcagaggaggaggggagaaaggaggagttgtaaagtgggaaaaaggagctaacactttagaaggacaaaatggcggcaaaaaagtctgtcccttggttttctcccattgacaaatctaagactgatgatgtctaccctacttcctacctctcacaaaacaacattagaaggcaacatatttaggtaacccggggtcataaaggagagttgaaatagaagcttcagcaaataacccccgtatcatcaggccttggattatcagcaattccaagcactacctgagtctccatctcaaaaagctcttccttctgctggctggagtgcagtggcgcgatctcggctcactgcaacctccacctcccgggttcaagcgattcccctgcctcagtctcccaagtagctgggattacaggcactcaccaccatgtctggctaattttttgtattttagtagagacagggtttcatcatgttggccaagatgatcttgatctcctgacttcatgatctgcccgcctcggcctcccaaagtgctgggattacaggtgtgagccaccgcacccagccccctctgccttgaaaatactcacagcatcatctcaacagccaatacactgaaacccctctccacactgaagcacagttgtctgtgaagaaaaattagggaagccatagaggaacaatagctcctttgcaaattacagcttcatcagaaggaaagttgaggcaggcatatagtattttattttatacaccacaaacagacaacccctagacttggaattcagaattaacaaaagcattaaatccatcgggctttgagaagggtcaatgttttttcatatgtcttccctgctaccattatttgcataacaaatcgctgcaaaatgcattcatgtcagatgttggaaataaactctttggggtatagctatttttaaacaacccatagttatacgggtgtttttaaaacattcaaagcctgagtttatgtttcaaatcataagtgatcacaggaactctatattgttggtctggtgctgacctacagaacagagtctgaagtccctcagaaatgatgatgttttaaagagttacaaaagttcacattggctgtagattaaagccctgtatttctaggcaggtacacagaaatccctggtgccagtttctacctccactttggagagcattgaactttctttgcaaatattcaaaatacttccccaccagaagattttacttactgacaccgggaacaggcatccccacccacattcttcatccttaagaatcagaagttagaaaaaaaaaaaaaaaaaaaca

SEQ ID NO: 28376 - DNA, 3700 bp, Homo Sapiens
tatgaaggagaagcagagcaccaaggtatacttgtcactcatccccatcatcagcggtgtcctgctggccaccgtcaccgagttgtcttttgacatgtggggactcgtcagcgccctcgccgccacgctgtgcttctcgcttcagaacattttctccaaaaaggtcttgcgagattcacggatccaccatctccggctgctcaacatcctgggctgccacgccgtcttctttatgatccccacctgggttctggtggtcctctcggctttcctggtcagcagcgacttgggtctgccttcagagaatgtgttataaatgaatgcaagtgcctgcggtgaggaggaggccagtgcgattcttccagactcgagttagaaaggaaaaacctacgtctaccagtggccctggacgctcctgctcctggctgtcagcggcttctgtaactttgcccagaatgttatcgccttcagcatcctcaacctcgttagccccctgagctactcggtcgccaatgccaccaaaagaatcatggtcatcacggtgtccctgatcatgctgcgcaacccagtcaccagcaccaacgtcctgggcatgatgaccgccatcctgggggtcttcctctataacaagaccaagtacgatgcaaaccagcaagccaggaagcacctcctccccgtcaccacagcagacctgagcagcaaggagcgtcaccggagcccactggagaagccccacaacggcctcctcttcccccagcacggggactatcagtacggccgcaacaacatcttaacagaccacttccaatacagccggcagagctacccaaactcgtacagtttgaaccgctatgatgtgtagagtccaaaggacaggaccagactgttggtgactccttccccggcccccacagcagtatcagaaacttctgacaatcagtgaatgtacaacccagccgaggggacggtgcataactctccatcagaagccctggggttcctggccccccgtgagccgcaggaggatgcgttgcctgcagtgcagacggccgtgagctctgggcaaacctaaacagagaccagtgtctcatgctctttcttcctggagtctgtcatctgagggccgtgtccctgcggagatcttggccacgttgtacctttccatgtggaattattccccaagcagtgtagctcagagcacttgtgtctgcattccagataacattcaggacctgtgtgaaaagctggggtcactgtggctgtagaccatgaactggcagtgggggtgtccagggcggtgcttgagaacgtcagactggctagtttaattccctggcgcagatacgcataggaccaacagggtcaccaagcagacagggagcccgcgagaatcattcaaaacatccccagccacagagatggatccagtttcctggtcatccccttagcagttcacaagttcctggcaaatgttccaaagcaaaaagcgattgcaattagcatccagttcctgcagcctggtgctctgccctgcacgtcagggttggcatccacccagatccagatggaagggaaacttctctcttctcctttgcctcctcttccctcaccagagcagggcgcttctcttggggtggtgagaaggatcttcgagaaatcgtgttcagtatttcaagctctatttctgtggcacatgtcttttgagaggcatcttcacctcttctgtgatgacttggtatgttgtttggtagagagatcttgattttcggaggatcttgcatttttctagggaatattttgtagttgtgtgtgtgtgtttttgccttggtccccattatgggatgcattaggactggcctatgcatcgaaaatctttttgtttgtaaacgtttaaaaacaaagttccccggccaggcacagtggctcacacctgtaatcccagcactttgggaggccaagatgggcggatcacgaggtcaggagttcgagaccagcctggccaacatagtgaaaccccatctctactaaaaatacagaaattagccgggcatggtgtcgcgtgcctgtagtcccagctcctcaggctgctgaggcaggcgaattgcttgaacctgggaggcagaagttgtggtgagccgagattgtgcactccagcctgggtaacagagcgagactccatctcaaaaaaaaaaacaaaacaaaaccaagttcccactggtgatgcctgtctgacacgttttggtatttagtaggaaatgaagtgtttcgaagcttcgagagaagcttcaaaattgtcacaattgctgaaaacagaatgaatcgtgaacattatctcaatattttgtataatagacaagaccacagtgttttggttccctgacctgtttttgtgtttatgttaggatctgaatcatgttctgggtaaggggacgaggagcgaacactgcactaagatttggtttgccaaatcagattctttggtcaagagtcagtttggggccaggcgtggtggctcatgcctgtaatctcagcactttgggaggctgaggtgggtggatcactggagtttgagaccaccctggccaacatggtgaaaccccatctctactaaaacaaaaattagccaggcatggtggcacctgcctgtaatcccagctacttgggaggctgaggcaggagaatcacttgagcccaggaggtggaggtttcagcgagctgagatcacaccactgcactccagccttggtgacagagtgagactctgtctcaaaaaaaaaaaaaaaaggaatcagtttgggtcttggcagaaatcaacataaggaatatgacaagaccccagtaggtaaccctgagtgctcaggtccgagctgtggtctcttttacggcttcatgaaaggaccgtgccctcacggaggggaccacggcttggcttgtggggtcttaggtgatggctgccttctttcttcatcaccacacccagcttcttgctggcacttaggggaagagagcagcaaatgagagatttaccttttatctcccagcgagcgagatgtttccctgttcagagaggaagtaacatcacttatgcttgactggtgtttcttttgttgttgtttgtttttctttcaattggaattctgtatttaagatgttatgtcagctgacacatgggacactcctgaagaggtgactggccccccaccctgtttggcggtgagtttccgcaccaccggcctcagaagtgtccctcttgcttcgtctcttgttcgcttgctttgtaaatactttggtcccaagctgagacaattgctgtgtaaaacgtgaagagtcaatcccaaagggtgttatttgtcagaagaacttgccgtgtgccttcaccgaaggcagtcaagtctgcagttggatttttctcactggtgaatgacaagaaacagggataattttgcactgcggagatattacgggagttgtctatatgattatatatagtacctgattctttgaacatattattgaactccaaaatgaattcgacctccattcaggcttcctgaaatctctgaagttgctgaaatttgtatattattttccttttccaatgcaagatctgctggtgacgggaaatgactgtctggttttattatggtttataaattaataaatgggctatttaattctgtatataaaaaaaaaaaaaaaa

SEQ ID NO: 28377 - DNA, 4377 bp, Homo Sapiens
ggaggcaagagcagcccctgcaacttgggagtgcagagagtgaccatgagcatggtgtaagtctggaaaatgtataaaccttgcagatcatgataagagttttggtctttatgccaggagcagtgggaagccatggaagtgttttgttttcatttgtaaaaggagcttagtggatgagggcaaaatgatcaggctttagtttttataagatatcaggaggtggtatggtaaataggttgggtggatggagttagaatccagacagttccttaaggagacttttgcagttctcaaggcaaaaaataatgattggagtgggatgataacagcaaagacaaagagaaatctaaatttgagaaaaattagagaatgtaataaacagatgttgtgatggattgatcatggacagagatgttaaggaaactcttagatgtagaaatggcataacaggatcactatggttcatcatgtaagtattccatgggatgaggaatggtgaaaaccaaaacagattgttgagagatttggttgggaagtggcggaagaggaaaatacctggtctggagaatgattctgtttttgttttgtttttgagataggagagacctgcacatttaaaagctggtggggaggactccggttgtggggcagaggttaagcatatgtggcaaaagaaggataatgggtaatgtaagaaaaggggttggggggatggggagaaggatccaaaagagtgatgtggtgggaatggttgcctttagatatgaggagaaagaaggaaagagaatagggtgggtacagtctttggcagtagtcaagaaacacaagtcagcaagcactgacagttccaaagtcaattattaaaaatgctacattttctgtgtctattttctattacatgtgccattgatagataaacctgattgtgaaaagctgacagtgtttcagaattaaaatgtccttattctttgtcaagtataatgcagtctttcaaatacctacatatgtacatgaaattaagagtttataatagaataatgtatccgcattttatttcaactctctacctctgaagtttggtttggtttttttaaaaaaaaacctgggtaggttaattttttatattatttgcaaggcaatatgtgcatctgtgtgtgtgtatgtgtgtgtatgggtgtttgtgaaaatcacatcatctaaatgtatacaaagcttgtcaagtatgcattttataaatttttgatagatacttgtttactatagcacagcaatatttgaggatgggatagaggtcacattgattcctttatcttcaccttggtgaaaaaaatcatattttagttcaaagctgttcaagtaagtccttgctccgttttcccaccctgtcttcagtgatattatttggagtcagcaatcaatggattccatccctctgagacttgcttaacctacagctgctgatagaatacaggcaagagcttgttactttatctgaattgtccattgctaccttaatgagtgaaatggttaagtagaggagggggcgagtcttaaggaatgtgtgtaccatttgagctgaatatttcagtgtgtatagggagagggagggtgagagagaaatccacttacatcactagaactgcattgagtgtgagccttgcaggttaagagacagactacagtgtcttgctttctgcaggaagcagcaatgccgtttgtttcctaagaggaattttttatttagaaaaggaagctttctatccaggaaatggctttccttgtgcgttgctatgccaactgcctgcagccatggtcctccaaagtaagcacaataatgtaattatattggtgtattgcattcagactcatgatttttgagattgtgtgtgtgcatgtgctgtgtttctgttagtggctctcttgctagcaggcatgcttgtgttgagtgtgagggacagacatcattaaattaaatgtccatcagtgtcatgctgccaagattaattgtgcaaacttggttagtggagtgggacagagatcactggtcaccactctgtcagcatcattagcagctagggaggagttcccgattcacacgctctgccctgatttttttctttctttcattttctttttttctcttggttggagggttctgtatgtgtgattgcagatgaaacaagggtattaacaatgcttggctgaatgctagagcctggttcttataccaccctgactaatataattctgtgttaagcctttttgaggggagtctgtgtgcagtcagccattttagcttttttcttttttttttttttttcctctccttttcttttgcctcttgttcttcaatctcagaaatgatcttgttctcttggaagactgagagctgtgtgaggttttctcagtcttgtcatagcctaggatggttagagtttcaatgttataaaaatggagacgaacactgttgttcggattccttttctggtctacaagtgtgaagggtttttaagcttaccagtagtgacactttaagctgcagcttggttttccctcctccctttttttttcctttttcttttaatttaatgctgtagagggtgacttgccatcgtgagagattggtacatgatgtgtaaattcagttcagcatatgtttcttcattatgaaaccactagcaatcccagctaaccatggagttatgggccagcaggagaaacactcagtaagtatcgcaaatgctgcttgtgctttgatagcacgtcatagagaactgctttaaaatgggaattgttgctctttctcttcagggaaaacagtttttgtagaaggtatagtagtctgcttggagaggaggggagggtgcattaaagctggcttgttcttccaatgttgtaatttttaaaaatttgaagcaagaccagcaatttatttaaagcaaaatcactaatactgagaaatattgggcagctaatttttatatttagaaactaaagcttgacagttcagcttcgacttagtacttgaatagttttcaaaaaaatgtttttgtagttgaatttaatgagaaatcatcagaaaggttattgagaacgggaatctatagtgaggaattcgcatgtaggtttgagtgtaggagggagagctttggttattgatttggtaataaagcgatcagtgggactcatctgatttcttaacatgtattcatcacttatggaaacacagctttttttaatgccacaaaaaattattgcttctttataattgatcccatgagtcagctatgtgtttgtcatgctgaaatcccatgggcagctaccgagaaagacttttctatgcctaacaccaagtcagagcctcctgtttcaggaatgtgagttctcatggtgctacttttatatcaccatgttgggagttttctggcatcacacaaattcacatgattgatacatacataaatatattcaatagtgaaaatgcaaacgcataaatttagacagcctgtatagtagtctaagtatttttgaaatgcctacttctacatcctagcatctagcaggttattaaagtataggaattgtctttcatgtattctaaagaagataagatggtaaactttaaaagtggaaataagtcgctgaggctttgtaagtttatagatagaaggccatgaatgtagaatatttagatgctgaggttcatgagtacaatttggttttgttcattgttaggaacaaaattactaactaaatccaagagatgttcttagactaagtgattctttgcgcactgtctcacctcaggaatgagccatgcgagctgcgcttaaggcagcggctgtgttggaagcatgttatgacgctgcaccgagagcccagcccgttaccatgaggtcctcgtggtacttcactaattaactctctttggatcagatccagaaaaagaccagccctaaacttaatttcactagtaggaaaggttgttgtaaagaagttccattgtagtttgattttcttaacggggcctttgaaattaaactcttctgtagtcatgattttccaggtaaaagtaagagtgttagttcagctatgcttgaggaaccttagaaacaaaaattaaaccccaggctttttacttacctttttcatatgtcttttcttaaagtgtgtgtatgtttgtgtgtgggggtgtttaaatgaataataatataaatttaatgaacaaagaaaattgatggctgggtgtggtggctcacgcctgtagtccgagcactttgagaggcagaggtggaaggattgcttaaggccagaagtttgctactatgggcaacatagtgaaatccatctctattaaaaaaaaaaaaaaaaaaaaaa

SEQ ID NO: 28378 - DNA, 4149 bp, Homo Sapiens
gtgtgtgtgtgcgagggtgtgtgtgtgtgtttgtgtgtgtgtgcatatgtggggggtgtgagtgtgtgtgtgcgaggaagcgggggtgcgtgcgcgtgtgagtgcgtgtgtgagtgtctgtgtgtgtgtctgtgtgtgtgtgtgagtgagtgaattccagattttctgtctttccaaaacccgctcctgtcctctcgcatatcactcacagacggggatctgacagcagccacaaacctacagtgagtgatcgctctccccccggcacgaatccgccatagagatcggcgaggaggaggaggaggaggaggaagaaaagaaggaggaggtggaggaggaggtggaggaggaggaggaggagggaaagaggagaaggaagaagaagaaaaagaagaaacccactaccttcccaggattgccttttttttttccttatctttacgcgcgagtgtgcctgtggcgcgtgtgcgcccctcgtcccttccatccgaacccgggcttggatgtttaataaagaaatcaagtgtctcaacagtcaccaaaaaaaaaaaaaaccgcaaaaacaaaaccaaaaaaattccaaaagcaaaaacaaaaaagagagaggaaaaaaaattcaaaataaacaaacaaacaaacaaggcagaaccaacctctacttcaaagcagccggcacaagccacccgtgtctgccacccagagaggggggtctctggcccgtggtggaggagttgcaggggggatcgtcagggggacagaggccgagtgacgtcctaggagccaccgggcaagaggcggaggagacccagagaggccagagagacagcgggccccagcgcgcggctcggggctggggcgccagaagtgggactggagcgaagtagaggatgccgaggagaaaacagcaggcacccaagcgggcggcaggctacgcccaggaggaacaactgaaagaagaggaggaaataaaagaagaggaggaggaggaggacagcggttcagtagctcaactgcagggtggcaatgacacagggacggacgaggagctagaaacgggcccagagcaaaaaggctgcttcagctaccagaactctccaggaagtcatttgtccaatcaggatgccgagaacgagtctctgctgagtgacgccagtgatcaggtgtcggacatcaagagtgtctgcggcagagatgcctcagacaagaaagcacacactcacgtcagccttccaaacgaagcacacaattgcatggataaaatgaccgctgtctacgccaacatcctgtcggattcctactggtcaggcctgggccttggcttcaagctgtccaatagtgagaggaggaactgtgacacccgaaacggcagcaacaagagtgattttgattggcaccaagacgctctgtccaaaagcctgcagcagaacttgccttctcggtccgtctcgaaacccagcctgttcagctcggtgcagttgtgccgacagagcagcaagatgtgcgggactgtgttcacaggggccagcagattccgatgccgacagtgcagcgcgacctatgacaccctagtcgagctgactgtgcacatgaatgaaacgggccactatcaagatgacaaccgcaaaaaggacaagctcagacccacgagctattcaaagcccaggaaaagggctttccaggatatggacaaagaggatgctcaaaaggttctgaaatgtatgttttgtggcgactccttcgattccctccaagatttgagcgtccacatgattaaaacaaaacattaccaaaaagtgcctttgaaggagccagtcccaaccatttcctcgaaaatggtcaccccggctaagaaacgcgtttttgatgtcaatcggccgtgttcccccgattcaaccacaggatcttttgcagattctttttcttctcagaagaacgccaacttgcagttgtcctccaacaaccgctatggctaccaaaatggagccagctacacctggcagtttgaggcctgcaagtcccagatcttaaagtgcatggagtgtgggagctcccatgacaccttgcagcagctcaccacccacatgatggtcacaggccactttctcaaggtcaccagctctgcctccaagaaagggaagcagctggtattagacccgttagcagtggagaaaatgcagtcgttgtctgaggccccaaacagtgattctctggctcccaagccatccagtaactcagcatcagattgtacagcctctacaactgagttaaagaaagagagtaaaaaagaaaggccagaggaaaccagcaaggatgagaaagtcgtgaaaagcgaggactatgaagatcctctacaaaaacctttagaccctacaatcaaatatcaatacctaagggaggaagacttggaagatggctcaaagggtggaggggacattttgaaatctttggaaaatactgtcaccacagccatcaacaaagcccaaaacggggcccccagctggagtgcctaccccagcatccacgcagcctaccagctgtctgagggcaccaagccgcctttgcctatggggtcccaggtactgcagatccggcctaatctcaccaacaagctgaggcccattgcaccaaagtggaaagtgatgccactggtttctatgcccacacacctggccccttacactcaagtcaagaaagagtcagaagacaaagatgaagcggtgaaggagtgtgggaaagaaagtccccacgaagaggcctcatctttcagccacagtgagggcgattctttccgcaaaagtgaaacacctccagaagccaaaaagaccgagctgggtcccctgaaggaggaggagaagctgatgaaagagggcagcgagaaggagaaaccccagcccctggagcccacatctgctctgagcaatgggtgtgccctcgccaaccacgccccggccctgccatgcatcaacccactcagcgccctgcagtccgtcctgaacaatcacttgggcaaagccacggagcccttgcgctcaccttcctgctccagcccaagttcaagcacaatttccatgttccacaagtcgaatctcaatgtcatggacaagccggtcttgagtcctgcctccacaaggtcagccagcgtgtccaggcgctacctgtttgagaacagcgatcagcccattgacctgaccaagtccaaaagcaagaaagccgagtcctcgcaagcacaatcttgtatgtccccacctcagaagcacgctctgtctgacatcgccgacatggtcaaagtcctccccaaagccaccaccccaaagccagcctcctcctccagggtcccccccatgaagctggaaatggatgtcaggcgctttgaggatgtctccagtgaagtctcaactttgcataaaagaaaaggccggcagtccaactggaatcctcagcatcttctgattctacaagcccagtttgcctcgagcctcttccagacatcagagggcaaatacctgctgtctgatctgggcccacaagagcgtatgcaaatctctaagtttacgggactctcaatgaccactatcagtcactggctggccaacgtcaagtaccagcttaggaaaacgggcgggacaaaatttccgaaaaacatggacaaaggccaccccatcttttattgcagtgactgtgcctcccagttcagaaccccttctacctacatcagtcacttagaatctcacctgggtttccaaatgaaggacatgacccgcttgtcagtggaccagcaaagcaaggtggagcaagagatctcccgggtatcgtcggctcagaggtctccagaaacaatagctgccgaagaggacacagactctaaattcaagtgtaagttgtgctgtcggacatttgtgagcaaacatgcggtaaaactccacctaagcaaaacgcacagcaagtcacccgaacaccattcacagtttgtaacagacgtggatgaagaatagctctgcaggacgaatgccttagtttccactttccagcctggatcccctcacactgaacccttcttcgttgcaccatcctgcttctgacattgaactcattgaactcctcctgacaccctggctctgagaagactgccgaaaaaaaaaaaaaaaaaaa

SEQ ID NO: 28379 - DNA, 3834 bp, Homo Sapiens
tgaactgtaacagtcgtctactggtttatttttcatattttttaattgaaaattgagcttgcagaaatagccacattctacacatagttctaattttaaatccaaatctagaatctgtatttaatttgttttttaacctcatgctttttacatttatttattgatgcatgtcagatggtagaaatattaaaaactacacatcagaatgatacagtcacttatacctgctgactttataggaaagctgatgatataaatgtgtgtatatatgttatatatacatatattcaatactgcctttttttttgtctacagtatcaaaattgactggttgaagcatgagaagaatgtttcccccacacccagttaagagtttttgtgtctgttttctttgtgtatcagtgaacgatgttaagaatcagtctctctttttgaagaaaaagcaatattccttggaaagcaaggagaattgaaggactatgtttgccgtgaggaaatagattttcatgactagtttgttttatacttttaaggttggcatctatgtgggccttatatactctaaaatgaactttggtcaccttggtgcttatgggccattacttgacctatgaatctttaaggcacaatcagttgtactttacatttaaagatcacttgagtgatggccgcctttccctcctacccgctccttccccacatgccttccaaggttagctggtaactgtagggctgcagagctgagcccatggttgtgtgtaacttgccctcaccctcctcattgccaccttaggtcactttatgggtctcgtcctccagagggttcggaagtggagtctgttggcagccctcctgcaggccctagcaccctgtcctgctccttaactgtgtgtgtgactctccaagagagttgtcctgcctgctgaagtgaaccagtacccagaaagacaactgtgagccatcttggttttcactcgctgtttagctgaggtcttgggccacaaaaggggtttcacaaacctctggatatatcagagtttatgagaaaggaaacatgctcagtcaaaccaaatcaaacaaattgaattttatgttttataaagtgcttctgaaagctaagatttgaaagaagtctgaaatcaaagtatttggcagcataactccttaaaggtagtggcgttgatagaccattttcagacagaatttataaagaatctgaaaaggcaggtctgtgatagagaaatggacctgcattcagatccaactgcccagcaagcgtttggatgcagacactgctctggacgtggtatactccccagagtccataaaaatcagtgcttattttaggaaacaggttgccccccacaactggggtaaaagaagagagaaaagtcacgcttttctctcatttcattgtgtgtgcatgtgtgcgtgtgtgtgtgtgtgtgtgctgagatgtgtgatttttctttctcaaggatcatggcgggatcacagaactcttttatacaagtgagatccaggtctctgaatatctttttgtatataataataataaaaagctcctcaccaaattcaagcttgtacattatattttctttctgtgtttttaaatttaagttttattgttttgtatgtaaatatgtggacccaggaactgttattaatgagcaaaaagttactgttcagggcagtgattctgtttaataatcagacaaaatgtagacgagctttttaaagccatatagttttaactctgtacagtaggtaccggcctgtattattgtaacaataactctagcaatgtatagtgtatctatatagtttggagtgccttcgcttccatgtgttttttttttaatttgttcttttttaaattttaattggtttcctttatccatgtctccctgtccaccccctttccctttgaaataataactcactcataacagtatctttgccccttccacagttaagtttcagtgataccatactcaggagtgggaagaggaaatcatattcgtaatttcatttcgttgaagccctgcctttgttttggttctgaatgtctttcctcctcggtagcagtgagaccggtttcatttcatacttagtccattcagggacttagtgtagcaccagggagccctagagctggaggatatcgaatagattaaattttgctcgtctcttccacaagccctaaccatgggtcttaaaaacagcagattctgggagccttccatgctctctctctctcctcttttatctacttccctcccaaatgagagagtgacagagaattgtttttttataaatcgaagtttcctaatagtatcaggttttgatacgtcagtggtctaaaatgctatagtgcaattactagcagttactgcacggagtgccaccgtgccaatagaggactgttgttttaacaagggaactcttagcccatttcctccctcccgccatctctacccttgctcaatgaaatatcattttaatttcttttaaaaaaaatcagtttaattcttactgtgtgcccaacacgaaggcattttttgaaagaaaaatagaatgttttgcctcaaagtagtccatataaaatgtcttgaatagaagaaaaaactaccaaaccaaaggttactatttttgaaacatcgtgtgttcattccagcaaggcagaagactgcaccttctttccagtgacatgctgtgtcattttttttaagtcctcttaatttttagacacatttttggtttatgttttaacaatgtatgcctaaccagtcatcttgtctgcaccaatgcaaaggtttctgagaggagtattctctatccctgtggatatgaagacactggcatttcatctatttttccctttcctttttaaaggatttaactttggaatcttccaaaggaagtttggccaatgccagatccccaggaatttggggggttttctttcttttcaactgaaattgtatctgattcctactgttcatgttagtgatcatctaatcacagagccaaacacttttctcccctgtgtggaaaagtaggtatgctttacaataaaatctgtcttttctggtagaaacctgagccactgaaaataaaagagacaactagaagcacagtagagtcccagactgagatctacctttgagaggctttgaaagtaatccctggggtttggattattttcacaagggttatgccgttttattcaagtttgttgctccgttttgcacctctgcaataaaagcaaaatgacaaccagtacataaggggttagcttgacaaagtagacttccttgtgttaatttttaagtttttttttccttaactatatctgtctacaggcagatacagatagttgtatgaaaatctgcttgcctgtaaaatttgcatttataaacgtgttgccgatggatcacttgggcctgtacacataccaattagcgtgaccacttccatcttaaaaacaaacctaaaaaacaaaatttattatatatatatatatatatatataaaggactgtgggttgtatacaaactattgcaaacacttgtgcaaatctgtcttgatataaaggaaaagcaaaatctgtataacattattactacttgaatgcctctgtgactgatttttttttttcattttaaatataaacttttttgtgaaaagtatgctcaatgttttttttccctttccccattcccttgtaaatacattttgttctatgtgacttggtttggaaatagttaactggtactgtaatttgcattaaataaaaagtaggttagcctggaaaaaaaaaaaaaaaaaaaa

SEQ ID NO: 28380 - DNA, 3198 bp, Homo Sapiens
ttttttttttttttttttacaaataaaataagtttattgggatgtaaccccatcataaattgaggagcatccatacaggcaagctataaaatctggaaaatttaaatcaaattaaattctgcttttaaaaaggtgccttaagttaaccaagcattttgataacacattcaaatttaatatataaaaatagatgtatcctggaagatataatgaagaacatgccatgtgtataaattcagaatacgctttttacacaaagaactacaaaaagttacaaagacaaccttcaggaaccacacttaggaaaagtgagccgagcagccttcacgcaaagcctccttcaaagaagtctcacaaagactccagaaccagccgagtccgtcctcggggctccgtgtactttcaacacaccgtggacaggggaggaaatgggttctgcttgctgaccaccagcttctgatgctgatgcgatatgtagcctttgacgtgtcccatgtatatcaagttagccagaatacactgaacttcgtcaatgtccacgtcctccacctgcatgaacttcaaggcaaccagaaaagcatccagagacagctggtgtgttttcagtaacaaatacactttcttaaagaggttcctgtaggtgatgatcttcagcttctccaggatgaggaagattccgcagcgaatgaagaaggcctcgtgcttcgccagcgcctcgtgcagcagcagcaggttgccctcgctggtgaggggggaggcgcgtcagaaggagggtgagtttctcacagagcgtgcacgtcaactctcatcaggcttgcatttttaaaaccccaaacaggaaggatggcatactctacctcacagctctggttacttccgcaaactgcatcaggtgatactttttcaggagctccacagtgggcatgtgacccaatagcatttttactggaagcaaatagatcagaatcatccttttgttcttctgactagaacggtgacaatgctcaaaggcaaatgacaggtactcctcagctgcaaagaaggcagagccagcacgcatgagaccaacgcacctgcttcaggccccttcctgctccattttctaccactgtctcctgatttaaaaggcaaaagccccctccctttattatctcaaaaaatatcatcccagtttcatttctgtgatcaatgactttccttaagtaaaatccatacccccaaattcaacaggaactgcctgggaagtcctacttaacagaggaaaactgaagaaaataactttcacagagattctgatttgcctaaggtcagctggcaaaccattatgataacattttaaaagtctgaccctgctcagatgatttctacattcatgaaaaatataaagacatatttaaaaatgtacctccacaatacattttaatcacccataattaaacaatgaaaataacttagtaaaacaccatcctccagcttaacatataattagtgatcatatcttccattttaaatgaccacatgctttaaaaaattaacttattattactaacacacaacatattaattctgtcctgagagcaatattaaaaaacagatttgaatttaatagatttcaaaatacaaaagtaaatctatttgtcaagattaatcccacaaactgcacgacaggcctgcaaagagttcagcacatgctaacaaggaactctcagaacaggcaggcaggagctgagccttgtcctgaggctggaaagctgaagggtcaggggtttctggacaatgattccacattctccctaggtgaagagaagaggcttcactaaggctgagtttgggtcaagaattaggaaagtgagatgttcctgtttatgtaagttcttcctgaacagtgatattaagtcccaaatataagagaacagagatgctcagagctgcagaggccctcccttatgcagaatgggtcaccagaagcagcaggccctggggtctgggtcgaggcctagggaatccacactgagaccacacactgcctctgctcctaaactatgtggccacattggcacaaaaaacatccagtcttgcacagtgagcgtgaatgctgtggggccagcgtctcttccaaaccacaaagccatgacccacgaggagccctgtgggctgagaccaaagaacaaggattcactgagagtctgcaatatcccaccagctgccagtttgacttttgcaaactagcctctaaaaagtgtacctttgctactgcccaaggtaatctcaaattctcctggatgtacaaaaaatgcattttttctttttcttttttgagatggagtctcgctctgtcgccaagctggagtgcagtggcgcgatctcagctcactgcaagctccgcctcccgggttcacgtcattctcctgcctcagcctcctgagtagctgggactataggtgcatgccaccatgcccagctaatttttgtatttttagtagagacggggttttcaccatgttggccaggatggtctcgatctcctgacctcatgatccacccacctcggcctcccaaagtgctgggattccaggcgtgagccactgcgcccggccagccctgttgtctttcaaagaacctcggccccagtgatggctgatctcactcccactgtctcgtagaattacactccttcctggggatccctcttcctgcagccttgtccttggggagtacagggaagtacctgcagtgaccctgcccccatgaccttggccaggcaggatgattccagagcccatactgtggggatcctcactgaccagcccagccccatccgcaagccaggctgggcctgggcataacttcgctgggctctcccaagaccatcagcagtgcatccagccccctggggcctgggctgctgctggttcttcatcagtcccttggtctctagcctcggccagggctgctctgctctccgccctcctttgtgtatcaagtgtcgctcacagccccattcactggggagcctttcggatctatttggtctttctcatgtcccccactggtctgtaccccagggagcgggtgcttgtactgtgtgaatccagtgttcacattcacacttaatgacttccttggcaccaatcatgtatttcaccgtttgcactttttgtatttcaataaaaatgttgatgcaaaaaaaaaaaaaaa

SEQ ID NO: 28381 - DNA, 5357 bp, Homo Sapiens
atacacaagcttacagactcaggactttaaagagaagcacagattgccacgaaaacaaatgaacacagagaccagtagcagcagagggagatctgctgtgaggcttcccttagttctgttgtctgatttctgtggataatgagttcactgcatatgttaggtcacaacatgatatcgtgtagtcgtaggtacagaacttttgttatggtagcctttcttcgtcaggtgatacaattgggattttctttctcacatgcacctcagtaaaattttcagcaacagagattggctcaggatggaatttgttcagtttcagttctgcagcctgtccttttctggggagactcattaattgaatgttgcctttcgatctcactgagtcacttgaaatcgctcagattgacccctattccgggatccagcctggtccagtgcagacctgcattgactctgactacatgctgagttggcctctgaaccagttcctgtaccattcccttagtctgatggacttgccagctccaaatactcagaacgtgcctcttgtggtcctaggatcaagtccagggtccttagaatcaagtaatgaaacaggtccttagtaatcctgtgctgtagggatccactgttagttcctggtactccccagcatctgtgcattagcttgatggaaaggaagctgtgttatgcctgtcttcaagtttttgcttctgctgtttccatagctgagaatgtttttcctcttcactactctgctacttctccttccatcctcaatactgaatagcagaaagtgccgcttaagaacacaggaaggtcaccatagctttagtttctccttagctgccaattagttctttggtcctaaagttattaacttttctgagtcttgatagaaatgcggagacttaaaaatatttgggggagacatttctccttttctcactaaacaacagaatgaaaaccttttctaacaggtttagaaaaccaaagtcagaaaaattgtgaggaaatagaataggttttttaaattgaaataatttccaagttccaggtggatctgtaaaatagggacaagatcataactttcaaaaggcagcacgctaagtcaggtgattcctttcccccatatgccttttctgtggtttgaataggtcagagatgccatctttacatttccaaatcaaattcctcttccttcttgaaggtttttgggatttccctaacttgtatagatctactttcccattactccttttgagttcataacccacggttttgctggttgacagtgatttgtcttgttccttgcttgtaattttattaggaccatggagccaaagtggctggtttgaatctcagctcttcagtagctaagctctcaggcaaataatttaatcttcttgtgcctcagtttcctcatctgtgaaattataattttaatagaatctactttaaacattcatagaaatcaaattcgtacacatgtcaagtgcctagaatagaacctggcacctggtattaagcccttggacttcaactgctactgttcttcgggttgtgacatcctcgaacagagatgttctttggatagaaatataaggcttacttgatgtttgattgtccttgccatttaaatatgttatagaacctggcacataggtgctcaataaatgtataataaaactttattttgctaaggtgtttattaacaagatggcatgttgcttattaaacagttgtgatttttttttttcagtaaacgatggtcatccccctgcagtttgccttccatttcagagatctgtttattacactttctcccttaatattgtcatttgtcaatttctgctcacacctgagaggtgtccagtgtgcactttgcccatctcgcctatgcataggctccatctagtggccagaagggaaattcagcatattaggtgactgaattaatagtgccccaaggaggaagatagcgatcccaacccactctctggcttgcttcctggggactgattgcaagaaaatgtggatactacagacttctgtagaaatcactgggctacagttttggattaaggttactctactgtgtcagtgcgagctgtcctgagagaattagggtcttcctaagtgatgcagacaggcgcactgcaactccatggcagagctgttaacacctagtgtgtcttttacagttagagttttaagataattttacaggactttaataaatttaaagctccaaaatatttgagattagagattaaaaaaacactactgatttcatttggaaaaatacagcaagatttaccttccattgctctatttaaacaggtagtaacactttcattctcttctctctcccctttggctattctatgtggttaagatgctcgccagccagaaatactcacagagaataagaataaatacatccagtgttgtgttaggtcccacaccgtctatatttcgctagctaattttatgtattttgtttcatgttttattgatattttcagaatctttcttgctgagattacacaaaatatatagctggttattcagttttacgtgtcaaaagccttaaacctgtttccccatgattgccttttattatttttaattcggaaatctttgtttggctgtctgagagagaacttcagcctcccttcctcccagacattttgaacagttcaggctgtactcattcgtgtctctttgtcttggcaggtggaagcccctctgcttggaatagcaaacaatactaccagcttgccctctggcaagctcctttaagagttggctgtaatttcaccctctctctggccttgattctgcatgcagaatgattgcactgacttgagctcctgtggtctcttgctatacctcctatttgggcatctcccccatattgctttcccccaccattggggaggggaatggtaccttggttatctttgaattcccaggaggtggcccagtgcctggtgcataggaggagctgaagaaacggaagacttcttaaagggatactcgccattcactttgaagcacttctttgtacaacaaatttattttcatctgatcattgcacctctgctagccaaaacattttatcacaccagttactgctgcatggaacttgaaagcaataaaattatctttaaaatcattgtttgattaggctttttgcacattgaggtgaataaaaaaaattagaactcctggaagggtaagaggaatggttggttcttaagagcaaaaaaaatcccttacatattggttctcttatttgtgctaagttaaatacatgggaggctactggtgtttatgaaataaccctgagcctttttggggaggtagtagtggatgtctgatggaagagatagaagactggtcccaggggttcttagtggcaccttcctctcaggtcatcactgtgcttttgcacattgcagttatatttgactacatttgattatggcagatttacttagaagggcactggaaaaaagcctcccaaattacaactgacacaggaaatgactttattttcttctattttttttctttgcttttctcccccaatcaacatacatttttaaacctgtcatctcacatgacctgccggtagaattgatatgtttaatttctgtagaaaataactggaaatatttcacaagctccagtagcttcctgttgtagggacccttaggactttggaatgagaagttttctattgagttgtcatatttggaaggataaaggtgccctcttttccctcgatccacatagtagactcctgtgtgcgggcatttgtttggtgtctcacgttgatgcaaatgcagccattgcagagtgagccccgctctgttactggatctccatttgctcaaaagagagcagtgtccccctccaaatctgcatgtctgaaagcattcatgcaggttcattgcatgggtctttgcattttacttagacttagcaaaaatcaggtatagtctttcctgaaaacaaaagtgaccattgtttttaatcaactgcagggtgtttggagttgtgaaatatttagggtcccgagtccattccagattcaacattgggaaagaatgagaaagctgaagcctggggcaggctctgtctgcagaaaccatgggctatcaccccctccccttagcagcattgtaaacaaacgtcatttgtaaggagcatgtcccaactgagcttgtaattataggggcaagatttgtgtggtggtaggggcatggagctggagactgggggcttccttattggttcatttatcctggcccttctcttttctctcaagtctcagctcttttaagattcagaaaataatgcaaaatgcctaagatttctgaaattcctggcttcagagacttgactacataaaagagccaggattttcaggctggccatttcaggatcagccatttcccacttcctgattcatagcttccaggatttgtaatgcctgtagacttttttctctcttgcttaaaagtggccattgaaagaaaaaataaatagcaaaatccccatcccagaagttctacttcctgttgttgtactattgagctctgaaaaacagctttgtaagtttaagctcttgtttggactatttcagtggaattcttgagatctttttgtttggacaggcaagtatgaaggcgataagtcgaaagaactacagcttactcagcacagaaatgcagaggctcaaatttaagttcttccttagctttatggtgtgtatattaatataatccaagcaatagtgagttgcttagccagggtgcacagacattttccacaatgccagttgtttccctcataatgtttaatgtttatttttaaaggacatatttgggcacacgtttcatttttgcctgtaaaagaattgggaatatttatgattcttgcaacaaaggagaaggatccaaagtaaccaagaaaatgatggactggcagccttcacattttcccacaactcttttcatgaaataaaatgtagataaggctgggtgccatggctcacgcctgtaatcccagcactttgggaggccgaggcgggcggatcacctgtggtcgggagtttgagaccagcctggcgagcacggcaaaaccccgtctctacgaaaaatacaatacaaaaattagccgcgtgtggtggtgtgcgcctgtagtcccagctactcgggaggctgaggtgggagaatcacttgaacctgggaggcagaggttgcagcgagacaagatggcgccattgcactccagcctgagtgacagagcaagactccatctcaaaaaaaaaaaaaaaaaaaaaaaaa

SEQ ID NO: 28382 - DNA, 4980 bp, Homo Sapiens
ggggccgccggtggccgttaggctacctgaggccgttccttctggtctctctctcctgggccgcggagagaccgtctccctgccgttacagcaggccccatcccagcgcccagccgtacttggggaaaggccggttgcgattccggggctttcccgccagagctgggtcttctctggggagagctgttttcaccgggaagctcggctttctgtggtaccggcttcatctcccgccttccttgagacccgagtgatatttcttgactacttctgcgtctcacgtaaacatttctccaactctcctactctgtggtatctccctgagatgtgatatcgctagtgccaccatcagaaagaaacgtctggaccctcctgctcaggttatgaaaatccccttaactgccacaatttgcttacctggctcatcgcctcctggactttgtatctttgctaaagtcagtgatgtgaaaagacttgaaatggatgatattgctgataggatgaggatggatgctggagaagtgactttagtgaaccacaactccgtattcaaaacccacctcctgccacaaacaggttttccagaggaccagctttcgctttctgaccagcagattttatcttccaggcaaggacatttggaccgatcttttacatgttccacaagaagtgcagcttataatccaagctattactcgggcccaggcctgggagtgcttgcaagatatagttggggtaaaatgttgacttttggtggacaccacggagtcacattgatgcagataaggcacatggctgtggcaggattcagctccttcatcaattttcagataatccttcctcagacagttttcttggctcaggcgatttaagaacctttggccagagtgcaaatggccaatggagaaattctaccccatcgtcaagctcatctttacaaaaatcaagaaacagccgaagtctttacctcgaaacccgaaagacctcaagtggattatcaaacagttttgcgggaaagtcaaaccatcactgccatgtatctgcatatgaaaaatcttttcctattaaacctgttccaagtccatcttggagtggttcatgtcgtcgaggtcttttgagccccaagaaaactcagaggcgacatgttagtacagcagaagagacagttcaagaagaagaaagagagatttacagacagctgctacagatggtcacagggaaacagtttactatagccaaacccaccacacattttcctttacacctgtctcgatgtcttagttccagtaaaaatactttgaaagactcactgtttaaaaatggaaactcttgtgcatctcagatcattggctctgatacttcatcatctggatctgccagcattttaactaaccaggaacagctgtcccacagtgtatattccctatcttcttataccccagatgttgcatttggatccaaagattctggtactcttcatcatccccatcatcaccactctgttccacatcagccagataacttagcagcttcaaatacacaatctgaaggatcagactctgtgattttactgaaagtgaaagattcccagactccaactcccagttctactttcttccaggcagagctgtggatcaaagaattaactagtgtttatgattctcgagcacgagaaagattgcgccagattgaagaacagaaggcattggccttacagcttcaaaaccagagattgcaggagcgggaacattcagtacatgattcagtagaactacatcttcgtgtacctcttgaaaaggagattcctgttactgttgtccaagaaacacaaaaaaaaggtcataaattaactgatagtgaagatgaatttcctgaaattacagaggaaatggagaaagaaataaagaatgtatttcgtaatgggaatcaggatgaagttctcagtgaagcatttcgcctgaccattacacgcaaagatattcaaactctaaaccatctgaattggctcaatgatgagatcatcaatttctacatgaatatgctgatggagcgaagtaaagagaagggcttgccaagtgtgcatgcatttaatacctttttcttcactaaattaaaaacggctggttatcaggcagtgaaacgttggacaaagaaagtagatgtattttctgttgacattcttttggtgcccattcacctgggagtacactggtgtctagctgttgtggactttagaaagaagaatattacctattacgactccatgggtgggataaacaatgaagcctgcagaatactcttgcaatacctaaagcaagaaagcattgacaagaaaaggaaagagtttgacaccaatggctggcagcttttcagcaagaaaagccaggagattcctcagcagatgaatggaagtgactgtgggatgtttgcctgcaaatatgctgactgtattaccaaagacagaccaatcaacttcacacagcaacacatgccatacttccggaagcggatggtctgggagatcctccaccgaaaactcttgtgaagactgtctcacttagcagaccttgaccatgtgggggaccagctctttgttgtctacagccagagaccttggaaacagctgctcccagccctctgctgttgtaacacccttgatcctggaccaggccctggcgagatgcattcacaagcacatctgcctttccttttgtatctcagatactatttttgcaaagaaactttggtgctgtgaaaggggtgagggacatccctaagctgaagagagagactgcttttcacttcttcagttctgccatcttgttttcaaagggctccagcctcactcagtccctaattatgggactgagaaaagcttggaaagaatcttggtttcatataaattcttgttgttaggccttactaagaagtaggaaagggcatgggcaaaaggtagggataaaaaccaccagcatatacatggacatacacacacacccacgcacacaaacacacacacacacacaattttcacgatgtatggtcaggaatgtgactgtaaactggactttggggcccaggcataagtcccttcctccaggacctttcctatttatatgtccctatacaaaatccatctgcttttatacgtagctgttttatcatctgtagcttcatcctatccggaggcacagcacatgagccctggacaggtcccaaagttccaagcagtcctttccgtaaaagcaggggtttgcatgtgctaccaacacatgatacggggaagacccacccagggagcggtttcagtggcgcaacaaagcaccacttttactgttgcctacttctgaccaagaagaaaaaggaccttagtatttagcataaaattccagcgctggatgaatgcagatctagtttggtctgtggctagtttaaatatgtttctaaccacagagaatttcatatatatatacatatatatatacacatacatatatatatatatatatatgtatgtataaaatttcacagggatatgcttttttttttaaagactgaatgtgttcaccatttagcctgtagatttatttccattttccaaattccagcacacagagatcccagcccctatgagtagggtgtttgtggactacctaatggaatatttttgaggcctggatgaactttgccatatgggtagaggttacagagggaggtgatattttcagctaaaaaaaaaaacgggtggagtttggactgatcaacttgagatttaaaaactgctattccttttgttctttctagcatctctccccaccctctgagagctcctcaggcttagatagtgaagtgatcaaatgccagtgtcattttgtacttaagttccaaagtaggaacattttatacttttttctgtattgtaataggtagttttgtatgaaatcttttctcctctcccgttgtaccgcattctttccagcattgtgctttttccctgggcttatttgaaaattttactgttttatacaagctcgtttagtacatttttctatgttttaccacaagttacaatttgaaaagaaaactattttttttaaatattccattgttaactgaatgttactgtttccactccagcaactacatgtcctcccttcaactgcctgccttttggggaaagaccaccttttgtgtgtttgttttttctctctctttctttccctttctctttctatctctctttatttttctttctttttctttgtttttgagttttctataggaaataaatagctttctatatatgagttgctggggaccttcacattctcttttagaaagctgtggcatgcagtctcattgcaggactcctggaatattgtctggttcttggtatttactgtatgtaagcaacaacttgaaaggtggcaatatggtgtcaatttggactatgaatcaaaagacctttttcaggttctttcactattgtctgggggactcagaacaagattgttctctgtatttattgtttgtccatttaggtaacatctgtcttaccttcctcacagactttgtacagaccaaagcaacaaatatttattgccatgtatagcagaaaatgaaacatgcaacaaaagcactttgaaaaatatataaggaattgttgagcctgtctgaatttgggccccctttctgactaatgcagttttgcacaaggtagaagttagtgaccctgagaccatcttaccaccctggacctggtccaaatacagacttacacagtggaccattctttcctgagctagccaacaagagcaggagtagtatctggaaactttcccctttgtttaggggtaggctttgatgaccaggaaaaaaaaaaaggtatttctgcattttatggcccaaaggcatgttattaatatcttatgtaatttactttaaactaaataagacttttttctcctgtgtaaaaaaaaa

SEQ ID NO: 28383 - DNA, 7447 bp, Homo Sapiens
gatgccagtgtcagcttctctccgaaaactgggtaatacgaaatggtctttattggttgtgaacactcgagctgagaaacattttaggatctttgtgtcttttgtgatgattttgtttctgaagaggaagctgtctaaaatattcaagtgtgcaaccaaggatttagatgaagccagcaaacaaaggaatcatgtaatcaggacctgagcgaatgtgcttactcacggcgttagttacacaggtgatttccttaagaaaaaatgcagagagaacttgtttatgcaagaggagatggccctggggcccctcgccccggatctactgctcatccaccccatgcgattccaaattccccaccgtctactccagtgccccattccatgcccccctccccgtccagaattccttatgggggcacccgctccatggttgttcctggcaatgccaccatccccagggacagaatctccagcctgccagtctccagacccatctctccaagcccaagcgccattttagaaagaagagatgtcaagcctgatgaagacatgagtggcaaaaacattgcaatgtacagaaatgagggtttctatgctgatccttacctttatcacgagggacggatgagcatagcctcatcccatggtggacacccactggatgtccccgaccacatcattgcatatcaccgcaccgccatccggtcagcgagtgcttattgtaacccctcaatgcaagcggaaatgcatatggaacaatcactgtacagacagaaatcaaggaaatatccggatagccatttgcctacactgggctccaaaacaccccctgcctctcctcacagagtcagtgacctgaggatgatagacatgcacgctcactataatgcccacggcccccctcacaccatgcagccagaccgggcctctccgagccgccaggcctttaaaaaggagccaggcaccttggtgtatatagaaaagccacggagcgctgcaggattatccagccttgtagacctcggccctcctctaatggagaagcaagtttttgcctacagcacggcgacaatacccaaagacagagagaccagcgagaaaatgatgaaaaccacagccaacaggaaccacacagatagtgcaggaacgccccatgtgtctggtgggaagatgctcagtgctctggagtccacggtgcctcccagccagcctccacctgtgggcacctcggccatccacatgagcctgcttgagatgaggcggagcgtggcggaactcaggctccagctccagcagatgcggcagctccagctgcagaaccaggagttgctgagggcaatgatgaagaaggccgagctggaaatcagtggcaaagtgatggaaacaatgaagagactggaggatcccgtgcagcgacagcgcgtcctagtggagcaagagagacaaaaatatcttcatgaggaagagaagatcgtcaagaagttgtgcgagttggaagactttgttgaagacttgaagaaggactccacggcagccagccgattggttactctgaaagacgtggaagacggggctttcctcctgcgtcaagtgggagaggctgtagctaccctgaaaggagaatttccaaccttacaaaacaagatgcgagccatcctgcgcatagaagtggaggccgtgcggtttctgaagggggagccacacaagctggacagtctcctgaagcgtgtgcgcagcatgacagacgtcctgaccatgctgcggagacatgtcactgatgggctcctgaaaggcacggacgcagcccaagccgcacagtacatggctatggaaaaggccacagccgcagaagtcctgaagagtcaggaggaggcagcccacacctccggccagcccttccacagcacaggtgcccctggcgatgcgaagtcggaagtggtgcctttgtccggcatgatggttcgccacgcgcagagctcccctgtggtcatccagccctcccagcactccgtggccctgctgaaccctgctcagaacttgcctcacgtggccagctccccagccgtcccccaggaagcaacctccactctgcagatgtcgcaggctccgcagtccccacagatacccatgaatgggtctgccatgcagagcttgttcattgaagaaatccacagtgtgagtgccaagaacagggcagtgtctatcgagaaagcagaaaagaaatgggaggaaaaaaggcaaaatctggatcactataatgggaaagagtttgagaagctcctagaagaagctcaggccaatatcatgaagtcaataccaaatctggagatgccgccagccacaggcccactgccaaggggggatgccccagtggacaaggtggaactttcagaagattctccaaattcggaacaggacttggaaaagctggggggaaagtcgccccctcctcctccgccacctcctcgtcgaagctacctgccaggatcgggactcaccaccacgaggtcaggcgatgtggtctacaccggcagaaaggagaacatcaccgctaaggcaagcagtgaagatgctggaccaagcccacagaccagagctacaaaatatccagcagaggagcctgcttcagcctggaccccatccccaccgcctgtcaccacctcctcctcaaaggatgaggaggaagaagaagaagaaggagacaaaataatggcagaactccaggcattccagaagtgttcctttatggatgtaaattcaaacagtcatgctgagccatcccgggctgacagtcacgttaaagacactaggtcgggcgccacagtgccacccaaggagaagaagaatttggaatttttccatgaagatgtacggaaatctgatgttgaatatgaaaatggcccccaaatggaattccaaaaggttaccacaggggctgtaagacctagtgaccctcctaagtgggaaagaggaatggagaatagtatttctgatgcatcaagaacatcagaatataaaactgagatcataatgaaggaaaattccatatccaatatgagttaactcagagacagtagaaactattcccaggaaactgtgcctaaggccagtttcggtttctctggcattagtccattagaagatgaaataaacaaagggtctaaaatctcaggcctgcaatactctatacctgacaccgagaaccagacgctgaattacggaaagacaaaggagatggaaaagcaaaatacggataagtgtcacgtttcctctcacactagactaacagaatcaagcgtgcatgattttaaaacagaagatcaagaggttatcacgacagattttggccaagttgttctaagacccaaggaggcaaggcatgctaacgtgaaccctaatgaggatggagaatcaagttcaagttctcccactgaagaaaatgcagccactgacaatattgccttcatgattaccgaaaccactgtccaggttctttccagtggggaggtgcatgatattgttagccaaaagggagaagacatacagacggttaatatcgatgccagaaaagagatgaccccccgacaagaagggactgacaatgaggatccagtcgtgtgcctggacaagaaaccagtgatcatcattttcgatgagcccatggacatccggtctgcctataagagactttcaactatctttgaggaatgtgatgaggaattagagagaatgatgatggaggaaaagatagaggaggaggaagaggaggaaaatggggattctgtagtccagaataataacacttcccagatgtctcataagaaggtggccccaggcaatcttagaaccggacaacaggtggaaacaaagtcacagccacactccctggccacagagaccagaaacccaggaggacaggaaatgaacagaacggagctgaacaagttcagccacgtggattctccaaattcggaatgcaagggtgaggacgcgaccgatgaccagtttgaaagccccaagaaaaagtttaaattcaaattccctaagaagcaactcgccgctctcactcaagccattcgcaccggaactaaaacagggaagaagactttgcaagtggtagtctatgaagaagaggaagaggatggcaccctgaaacagcacaaagaagccaagcgcttcgaaatcgctaggtctcaacctgaagacacccctgaaaacacagtgaggaggcaagagcagcccagcatcgagagtacatctccgatttcaagaactgatgaaattagaaaaaacacctacagaacattggatagcctggagcagaccattaaacagctcgaaaatacaatcagtgaaatgagtcccaaagccctagttgatacctcatgttcttccaacagagattctgttgcaagttcatcccacatagcccaagaggcctctccccgacccttgctagttccggatgaaggtcccactgccctagagccccctacgtcgataccttcagcttcacgtaagggctccagcggggccccacagacgagcaggatgcctgtccccatgagtgccaagaacagacccggaaccctggacaaacccggcaagcagtccaaactgcaggatccccgccaatatcgtcaggtagttttaccttaaacccacttttggatggacgctatttcagttaagcaagtcactgacttagtttataccaaatattgtgctttctttgtaagataacggtttacatagacatcctggatctgggggcatgaagaaagtctaaataaacctttgttacacttttttaccacgcttttgcatgcttgcaataaaacatcttttactttgtgactccaaactccaaattttaactgttaacacacggtgccagaccaggtggcttttctttggtgaatgtagtgtttcatctgaacacctcgggaagcagagacaaaccaacctgtggttgaactgcccttaacgtcaccactactaacgtctatgttgactgtattgtgttagaagcacattaacactccgtcacaatgcccgacccccaccccagtaattatccagacgcatggcccacctggcacacaggaaatggtagagctggaatgatgggactcctctcacaaatgtattcttcctttcctcctttcccgtccatcctttgctatgtacatggggggtttctaccaggtccagtagagcacaacaagacttagctcaggccttgaactgtgtttggttggttttctttgattgaattattctcagaagggctgtgttgccaggccctgtgggttgatcatgtgaccgcctttctgacaaaatgtctcccgccatctttatttgcaggctaatggaagtgctaagaaatctggtggggactttaagcctacttccccctccttacctgcttctaagattccagccctttctcccagctctgggaaaagcagttctctgccctcttctagtggtgacagctctaacctccctaatccacctgctactaaaccatcgattgcttctaaccctctcagcccccaaacaggaccacctgctcactctgcctccctcatcccttctgtctctaatggctctttgaagtttcagagcctcactcatacaggtaaaggtcaccatctttcattctcaccgcagagtcaaaatggccgagcaccccctcctttgtcattttcctcctcccctccttctcctgcctcctccgtctcactgaatcaaggtgccaagggcaccaggaccatccatactcccagcctcaccagctacaaggcacagaatggaagttcaagcaaagccaccccatccacagcaaaagaaacctcttaaaggtcaaatcctattaggcacaagtcggagttacatttaaaaaaaattaacagtctacaacaactgttttcacaagagaatgtaacatattgctgtatcgtttgaggcttaatgctaaatatgtgctaaatactggattaatagatttcagtaaagctcgttcgttttgtttggttttctttttacctagttgctatagtgtctacagtctatactcaatacctataaaatgcagtaagcatgtgttacagaaagaggttctggtgggagagaaaggtgcgtgtgagacaggagaattgtcttaagcatataaaacatgtatgattccagaattttagtatgttttgtataaaactatttttcattacggagactagaagtgaacagagaattacacaagtgtgactatacaaattgtaaaacagatactataatatttccttttattttagtgttatttagctttattacagatttctatttttgtcaaaacttcatggttcctttcaagatcttttttgccaaaacattttgatactatagcattgtacatttgaaagtagtgttctagactataaaaccaatgaacttctacatgagccctacagacaggcatgtgtagaaggcaatttatcaaacctattgcactgccatgaaaagtgtgtataataatttgctagcccaagcaagctagttttctttgcttgcttcttttctttcttttttccttcctttttttttttttttttcttttttaacatgttgagattctctagttgttttctttggcgtatctaaccccttcttttgttttctgagacctggtaacccacgctcttgcattgtggattttaaaatgtatactctgtacggttctgtaaaccgaaaaacttttgtaaatatataaatatacatagacataaaaatactgtatgtgacagcacatagagtagttttcccacaccaaagttaatttttatgcatgctttaaaagtatatatcgggaccggcagaaatggaagtatccatacatttttaaaaagcaacaagtttgcacagctagagtgtttttgtaaataaatgtatttgtataacacagtcatgtaatatacagaactataagcagagactttgcaaaactaaataaagggctgcatgcttattattttttgtaccttgtcactataactacttcctagtcaaagaacgaaatgtaactgttaccgagttaaatgtttttccgctttgagggatgtaaccacatccactcagaggacactacttttctgaaagctctggggtgactaatgatgagttcctaataaattaattgcaagtgtggtgccttggatgtggcctgttggctcgctttcttctctgtggcttatcaaggtgtagatgacagaaagcaaacctggatacagagtttccaccctcagttcctggaggggctcttattattttctctctttttaaaaaacttccagtagaagtaaagtggaaataaaatgtctttatcaaaaaaaaaaaaaaaaaaaaaaaaaaaaaaaaaaaaaaaaaaaaaaaaaaaaaaaaaaaaaaa

SEQ ID NO: 28384 - DNA, 3183 bp, Homo Sapiens
gagtgaaagggtgaaaataaactgcaaagagggatgctaatgtgttgctggaagacaggcatccctgaaagtgactggggattgaaacagcagccgaatcgatgtccaccgtaaagaaaatgcgggggctgctgagaagtcgattactatcctctctactcctgaaggcacctctgcggcttgtaagtctattctggagattatgcataaggaagctcaagatataaaattcacagaagagatccccttgaagattttagctcataataactttgttggacgtcttattggtaaagaaggaagaaatcttaaaaaaattgagcaagacacagacactaaaatcacgatatctcccttcaagcacatttaattcctggattaaatctgaacgccttgggtctgttcccacccacttcagggatgccacctcccacctcagggcccccttcagccatgactcctccctacccgcagtttgagcaatcagaaacggagactgttcatctgtttatcccagctctatcagtcggtgccatcatcggcaagcagggccagcacatcaagcagctttctcgctttgctggagcttcaattaagattgctccagcggaagcaccagatgctaaagtgaggatggtgattatcactggaccaccagaggctcagttcaaggctcagggaagaatttatggaaaaattaaagaagaaaactttgttagtcctaaagaagaggtgaaacttgaagctcatatcagagtgccatcctttgctgctggcagagttattggaaaaggaggcaaaacggtgaatgaacttcagaatttgtcaagtgcagaagttgttgtccctcgtgaccagacacctgatgagaatgaccaagtggttgtcaaaataactggtcacttctatgcttgccaggttgcccagagaaaaattcaggaaattctgactcaggtaaagcagcaccaacaacagaaggctctgcaaagtggaccacctcagtcaagacggaagtaaaggctcaggaaacagcccaccacagaggcagatgccaaaccaaagacagattgcttaaccaacagatgggcgctgaccccctatccagaatcacatgcacaagtttttacctagccagttgtttctgaggaccaggcaacttttgaactcctgtctctgtgagaatgtatactttatgctctctgaaatgtatgacacccagctttaaaacaaacaaacaaacaaacaaaaaaagggtgggggagggagggaaagagaagagctctgcacttccctttgttgtagtctcacagtataacagatattctaattcttcttaatattcccccataatgccagaaattggcttaatgatgctttcactaaattcatcaaatagattgctcctaaatccaattgttaaaattggatcagaataattatcacaggaacttaaatgttaagccattagcatagaaaaactgttctcagttttatttttacctaacactaacatgagtaacctaagggaagtgctgaatggtgttggcaggggtattaaacgtgcatttttactcaactacctcaggtattcagtaatacaatgaaaagcaaaattgttccttttttttgaaaattttatatactttataatgatagaagtccaaccgttttttaaaaaataaatttaaaatttaacagcaatcagctaacaggcaaattaagatttttacttctggctggtgacagtaaagctggaaaattaatttcagggttttttgaggcttttgacacagttattagttaaatcaaatgttcaaaaatacggagcagtgcctagtatctggagagcagcactaccatttattctttcatttatagttgggaaagtttttgacggtactaacaaagtggtcgcaggagattttggaacggctggtttaaatggcttcaggagacttcagttttttgtttagctacatgattgaatgcataataaatgctttgtgcttctgactatcaatacctaaagaaagtgcatcagtgaagagatgcaagactttcaactgactggcaaaaagcaagctttagcttgtcttataggatgcttagtttgccactacacttcagaccaatgggacagtcatagatggtgtgacagtgtttaaacgcaacaaaaggctacatttccatggggccagcactgtcatgagcctcactaagctattttgaagatttttaagcactgataaattaaaaaaaaaaattagactccaccttaagtagtaaagtataacaggatttctgtatactgtgcaatcagttctttgaaaaaaaagtcaaaagatagagaatacaagaaaagtttttgggatataatttgaatgactgtgaaaacatatgacctttgataacgaactcatttgctcactccttgacagcaaagcccagtacgtacaattgtgttgggtgtgggtggtctccaaggccacgctgctctctgaattgattttttgagttttgtttgtaagatgatcacagtcatgttacactgatctaaaggacatatatataaccctttaaaaaaaaaatcactgcctcattcttatttcaagatgaatttctatacagactagatgtttttctgaagatcaattagacattttgaaaatgatttaaagtgttttccttaatgttctctgaaaacaagtttcttttgtagttttaaccaaaaaagtgccctttttgtcactggattctcctagcattcatgatttttttttcatacaatgaattaaaattgctaaaatcatggactggctttctggttggatttcaggtaagatgtgtttaaggccagagcttttctcagtatttgatttttttccccaatatttgattttttaaaaatatacacataggtgctgcatttatatctgctggtttaaattctgtcatatttcacttctagccttttagtatggcaaatcatattttacttttacttaagcatttgtaatttggagtatctggtactagctaagaaataattctataattgagttttgtactcaccatatatggatcattcctcatgtataatgtgccccaaatgcagcttcattttccagataccttgacgcagaataaattttttcatcatttaaaaaaaaaaaaaaaaaaaaa

SEQ ID NO: 28385 - DNA, 2210 bp, Homo Sapiens
ggcccccgtccccagctggggaggaattgccagcccctccggctggaggcggtggcgccggaggccggagtccgggataaatctcggggtgttgactttaagatgaagaccatagaggtagacggcatcaaagtgcggatacagatctgggacactgcagggcaggagagataccagaccatcacaaagcagtactatcggcgggcccaggggatatttttggtctatgacattagcagcgagcgctcttaccagcacatcatgaagtgggtcagtgacgtggatgaggtaggagatgccacctcactgccggggtgtggagagggtgcctcaccggggaaggcaaggcgagggccagatgggaaggcaaatgcttccaggaagctttgccttccacagccctggatgaagacctctgggtgagtaagacatggggaagaaaccgaagctgccatgccctcactctctataccctgccaggcctccacggctgtgtctttcccggaaatgaattagttccaagtcttccctgtgagcagcttctttcctgaaatcttgggaccaggtggagttgcaagattgggatctagtcctggctctgcacaatagctgtggagccttgggaagccatttgaatcctctgggtccccagttcctgtagaatgagggctggacttacatccaatgtcctttccagctctgataccagtggtctaacccaaggaagcaccagtcttagccagagtgtcttctaccctaagctctccccgtgatacccttgagtacgcaccagaaggcgtccagaagatccttattgggaataaggctgatgaggagcagaagcggcaggtgggaagagagcaagggcagcagctggcgaaggagtatggcatggacttctatgaaacaagtgcctgcaccaacctcaacattaaagagtcattcacgcgtctgacagagctggtgctgcaggcccataggaaggagctggaaggcctccggatgcgtgccagcaatgagttggcactggcagagctggaggaggaggagggcaaacccgagggcccagcgaactcttcgaaaacctgctggtgctgagtcctgtgtggggcaccccacacgacacccctcttccctcaggaggcccgtgggcagacaggggagccggggctttgccctgctgctgtcctctcgtgtgatgaccctattgagtatcagtagccactactccccctgcctggccctgagagcggctctgctgtcatctcaagcagcccctgtccccagcccgtccaccctggagtggtcttcttcagcctgtttccccagccacaggcctgctatgacccccacgatgtgccgcaagcactgtctcaccatcccgcacccaccagacaacagccagggctggagtccaggccactttcagctgctcctttctccgtgcatcgtgtctcttctctgctttttctctcttcccccacttctctttctctgacccctcccctccggtgcgtttcgtatcaaagctcctcaaaccccgccccccgtgtgtcctgctgtgtgcagctcgctctttccttccttcctaagctatccaaggggatggacccaggctcgtggggaggttccacccttggatccaggaagaaccctccaccctgcctcgtgggtgggccaaaggctacagggtgcttcttcctcttcccccacccccactgtccctcatgtgccatgggcctgcctccccagtgacctgcgaaagtggagcatcgaggtaggagggaaacggcaaccagggagtcctcgagcctggggctgccctacctctacccattccccgaccagagctttgcccttgcttggctgcccgcctgcctctttggggaactgagctcagaggcaggtgcttcagagaaggaaacaaaatgaggggtggcagggataaaaagtcacctccattctctacctcccatgcagcatgaacacaatttctctccacctggctcccaaatttaaagatgtggaccaaggcctgtgggtactccaggggcaaggagagccctggggtcagtgacactgtcaggccaaccatgcactccacaaaggggagcatttggaaatgaaggactagctcctatgtatcaggttaagagcaagggagagctggccagggacagcagtttgcacagcagaggggaatgtagcaa

SEQ ID NO: 28386 - DNA, 2563 bp, Homo Sapiens
gaccgggagagacaccggaagcgggagaagtctgagaacatggtgaaagccggaacttgctgtgccacatgcaaggagttctaccagatgaagcagaccgtgctgcagctgaagcaaaagattgctctgctccccaacaatgcagctgacctgggcaagtatatcactggtgacaaggtgctggcctcaaacacctaccttccaggacctcctggcctgcctgggggccagggccctcccgggtccaccaggggcaccaggaagagatggttctaagggggagagaggagcgcctgggcccagagggtctccaggaccccctggttctttcgacttcctgctacttatgctggctgacatccgcaatgacatcactgagctgcaggaaaaggtgttcgggcaccggactcactcttcagcagaggagttccctttacctcaggaatttcccagctacccagaagccatggacctgggctctggagatgaccatccaagaagaactgagacaagagacttgagagcccccagagacttctacccatagcacatcccaacaccgtcacgccaaaggaagagaaagatcaactcacctgcagttaaaccatctaaagagaagaaagaccactggagacctagaaaacatacatttttctcttctcttctcctgacgtctctccactcctcttcttccaaatacgatgctattttcagagtcccctcctaggcctgcagacatgagggagtgaatgattgatttacctgcttctcactaagagtccattggggtggtttgcattgtaacttttcttttacatcctatttttccaggaactttggatttaagtactctcacagtgtcttaaatcataaattcttgaagttaaatttggcagagtatcaaaagggggaaaatgacaaagtgagctctaagaaaatgtgaggctacttctaagatgtgtgttcacaatagaccataactcctctagtatcaaaattggggctcttcagttaaaaaggggtggggaggacaaacgtgtcgatgtgctttggtggagaatttttttccttgtgcttctagtagactttaaatattgtatccctttgtcaaaccttgtttcccaaattcaattaaagagaggagagaattgaatggcgtttagagaagatagaaaagaatcacagtcatatatttactgttatatagattgccacattctaaaattcaaatacggtgcttaaggtttcatgccatgcttatctgtaagtatcctatttagggaagaagattaaactctcttttcaaaaaaacaaagtgaaatgcctggattcacattaaaacaatgggctctcgtttgctagaatattttaaagctgtttaatcaacagtggagtctgctctataaatatagattatttgttcaataaactggctgagcttagagagaggtgcagaattcctggttctgagcaggtgcccagaaggtaccattaggtgccatgatccaggctgaaccaatatacagtggggctgaagtctgcaaggaggttgctggcttgggctgacctcactaatgccatcagcagcggtaggtaaattttttctccttgggtattacaagtttttgtctggagccaaccaagcttgccaccaacatattgagagtaatacactattgaaagttatcttggatggggagaaaaaaaaatagtggttttccttgtttgcaaaaacttccttcctattctcattttttcttaattttctttaatttagtccaagttccagttcttttaggccttctctttgatttattttcccctgcatgtgagaagcagttcagaaaaaggtctatatctccacctcctagtgagttagagtgttttctcagagcacctctgggtggcaaagggaagcatgttcctgccaaggtttgctgtggattcagaagcaccaggagcaagagaccagaaggatgatctgctcctttgtaacgttgttgagggccctcttgtttccaatgagcagcttataggttactcacagtccactttctcactggacacacaaagtggctctttatctacctttgcgggagattttcactctcctgcaaatgatcgttctcacactcatattagctcatgttggaatttcccatcctgccatgtcctttcccatttctttttggcttttttgcctccaccttttagcccacatcatttaactccactactgtgaaagcttgcttaaagaaaatccctcttggccgggtgtggtagcccacgcctctaatcccagcactttgggaggctgaggcggggagatcacaaggtcaggagatcgagaccagcctgaccaacatggtgaaaccctgtctctactaaaaatacaaaaattagctgggcgtgttggcacacacctgtaatcccagctactcaggaggctgaggcaggagaattactttaacctgcggggggagcctagattgcgctactgcactccagcctaggcaacagagggagactctgtctcattaaaaaaaaaaaaaaaaaaaaaaca

SEQ ID NO: 28387 - DNA, 2685 bp, Homo Sapiens
gttgctgagccgaggcgccgaccccctcctcagcatgctggaggcccacggcatgggctcctccctccacgaggacatgaactgcttcagccactcagctgcccacggccacaggaacgtcctgaggaagctcctgacgcagccacagcaggctaaagcggacgtgctgtccctggaggagatcctggccgagggtgtggaggaaagtgatgcgtcgagccagggcagtggcagcgaggggcccgtgcggctgagccggacccgcaccaaggccctacaggaggccatgtactacagcgctgagcacggctacgtggacatcaccatggagctgagggcactgggagtcccctggaagctgcacatctggatcgagtctctgaggacctcgttctcgcagtcgcggtactcggtggtgcagagcctcctgcgggacttcagctccatcagagaggaggagtacaacgaggagctggtgaccgagggcttgcagctcatgttcgacatcctcaagaccagcaaaaacgactccgtcatccagcaactggctaccatcttcacccactgctatggcagcagtcccatccccagcatcccagagatccggaagaccctgccggccaggctagatccacactttttgaacaataaggagatgtcagatgtgaccttcctggtggaaggaaagctgttttatgcacataaagtcctgctggtgacagcttctaacaggttcaagacactaatgaccaataaatcagaacaggatggggacagcagcaagaccatcgagatcagcgacatgaagtaccacatttttcagatgatgatgcagtatctgtactacggaggaacagaatccatggagatccccaccactgacatcctggagctgctgtcagctgccagcctgttccagctggatgccctgcagaggcactgcgagatcctgtgctcccagaccctcagcatggagagtgccgtgaacacctacaaatatgccaagatccacaatgccccagaactggccctgttctgtgagggcttcttcctcaagcacatgaaggccctactggagcaggatgccttccggcagctcatctacggccgcagcagcaaagtgcagggcctggatccactgcaggacctgcagaacaccctggcagagcgcgtgcactctgtctacatcacctcccgggtgtgaggcagggggcggaggctgccgaggccagggcctgtggaggtgccagggcccaccatgtcggggtatggttgtaggccctcttggagccaggttcacggggctgtttcctcctcctcccccagatgtcccccctgtcaccgggcagctcaccctcatctcctctgccctagagctgtttgttcaatcactgatgggcaaaggggagatgtagctaactggtggccctcctccccatctcagtttgcaactcaagggcagccatgcactccccctgggtgtcgctctcccctcctgcaggtcagcagctgatcctgatccacctccgcccaggccctccaagctctactcacccctagggcctcagtaaactcagaccatcccaactggggctcctgggggtacaggaatccttatgaatgtatagaatgcatactgcctaggcccccagtcgtctgcagtaattcaaaagctggtatttttcttcctaaatgtcacatagcaaaggctgcccaaatccccaaacttgttcttcaaaggtttgacaggcttaatgtgggcatccagtggcctgtggacccccccctgccaccacgactgctgccacccggagttcccccattgtctttggtgcctgggcttccagagtccctcccatcaggactaccagcttgctcagttagcagcagagggcagttccccagcttgatggtttctgagctaagtctggcatggaggggcaaggggtaggggatggggtgctgtgtaggaatggcctcagctcttgttttgctgctggttttaggggccaaagtaaatgggtggattctggaacctcaggcctagactaggttgcctttgtgggggcgatgaagcagagtcccctggtcaagtctctcggctcctttaatgtaggattgagagctgggcaaacaggtcccactggggactgtgactcttggagattaaaggacagggcattgatggaaggtaagggccaggagaagaggcctttctgctgtgtcccctcacggccttgccctcgaattctgcaggccctgggctcccctgacacctgtcatatttatggaccagacactggggcagcatcaggcacagtctgtctgggtgcaacttcttcagctgtctggccgcaccttaaaaactatttattcaccaaaagccccaggcatttcagaaggtggcactcaggtcaccctgaaaagcccccaggggcttgcaattctggaaaatattttgactagctgcttggctggatgtacaaagaaataggcattattttattgctgtaatattgtatgatactttaactgtacaataatgttgtcacttactgtaaatgtactatggttttattaacaataaacactcattaacaatgaaaaaaaaaaaaaaaaaaaaaaaaaaaaaaaaaaaaaaaaaaaaaaaaaaaaaaaaaaaaaaaaaaaaaaaaaaaaaaaaaa

SEQ ID NO: 28388 - DNA, 4062 bp, Homo Sapiens
gatcgcgccatttcactccagcctgggcgagagggcaagactccatctcaaaaaaaaaaaaaaatagtttgttgacatatgttctagaatatttcctagaattagggatagaaagttggttcttgtttggatcaacagctcttggtccaatgattctagaggggatatctagattcccaattcagcctcgggtactgaagttgtgaggaggcaaagagatattttttttttttctggaaaaccagtgtgggagtcaatccagccacaaaaccacatctggttatctcattgaagccacacacacatttctcggagagattgttactcctgaacccaagaaggcagccacccactcaaagatgggctcacaagaagatctgcaaggttccttgcacctgagtacacatttacttctcagtgacccttctcccaggccatttgcatttgggtcatatgttcattttgtcttgtggttttgaactctgtaaggaaggagagaaagagagagcgtgagtgtaggggatgagtgtgtgtattgattcttagaggatgcagtagacattgttctgaattgctcagaaccttccaagcatctattagtcatatacttggtccctgacacttcttggtatacaaattgttttataatgcagctgaagctcctctggcaccacagactgtagggcatcagaggctggaacttctgtagaatggtctgacaattccggggaagggtgcatctggccacaaggtggcgctccagccctcacggtctgacttcctcctacctcctcaagtgggtgcgaaatgtctagttgaaactgtctaacccccaaaggaagatggttttctcagaaagtgagacataacagaacagacctctttccttcaaaaatctgcagtaaaagaatcccttattttactgaagtacatgtggtatcaaagttatggatgaaagagtgactcaaggagacagacatgaaagaatcttccatgcttctcacatagacttctatttccaaactcacttcaaattttcaacgtttttctgatttcaaaaatagcaactgcttattgaagaaaactcggaaaattatgaaaaagaaaatacaaatcacacgtagttcaatctctcagagatagctactgttaagatttgacagattgtcttgtctttttccagtatatataagtatctatatatgtatatactgtatatacttatatatatttattgtattaaatatatacatatgtatatgtatatataagtatgtgtatatatgtatatatttaatacaattattaaattgtattattgtattaaatgtatacatatatacacacatatatatacatatgcatatatttaacacagttaaaataacactaaatgtaccattttgtttctggccttttcagttaatgttatgagaatttttctattttgttaaacttctccaaaaacattaaactgcattatgttctgagagtagatgtaccacaattaattctaccatttctgtattgttggccatgtaggttgttcttaattttctcattattatgaatgcatgtgacaatcattgttttgcctaagttgtttgtgtctgtcaccttttttaaaggccaagtaaaattgcaaagtcagagtttatctctgagggctaaagacagattatactggatccaatagaaatgatttttagctaattcagtagggggaattatggatctagttagtgttagaaaggattcaaggagtggattttatggaaggtgacagaaggcagctcagttggtgtgggatgggctccatttctgcttgggcctggccttggcaaaggctggggcaattggaggtaaaatacagacctctaaccaagaaagggagcgaggatggatgggccatcagccaggtgagaaggagagcctggtgccagagaggggggatcttgatgccgcatggaggcccaggtgggtggacggtttcagagggctggtgggggaatacgaagaggaagtataggcaagagcactgtgaggtgctattcacatgaaggctggtacagatctacagtaccttacccaaaaggcttggggccagaaacaattcagctttaggaatctttcggcttttagataggttattgtctacatatataacatcaccagcacgggctggagcaggaacctgtaatcaaacacatctgtatctctgcaggcaaatatttgaatgtttccactaaatggtatgattaaagaccataaatagcttcacatagttagatcaggtttgccactaatttagttcaaaaaggtcagtttgctgccaaatggcttatgggggaaaaaaaactttagagtctcttggattttggagttaggctaaagaattgtggacctggctgggtgctgtggctcacacctgtaaccccagcactttgggaggcagaggcgggcagatcacctgaggtcaggagtttgagaccaggctggccaacatggcgaaaccccatctctaccaaaaatacacaaaattagtcgggcgtggtggcgggtgcctgtaatcccagctactcaggaggctgaggcaggagaattacttgaactcggagggcagaggttgcagtgagccgagatcgcaccactgcactccagtctgagtgacagagtgagacactgtcttaaaaaaaaaaaaaaagaattatggacctgtgtcatcattaaggtgaataatgtcatttcaaactattttaagtatgggctataacattttctgtcttcttatttgttcttaaaagattaccccggaagctttcgagaagctgggattccctgcagcaaaggaaatagccaatatgtgtcgtttctatgaaatgaagccagaccgagatgtcaatctcacccaccaactaaatcccaaagtcaaaagcttcagccagtttatctcagagaaccagggagccttcaagggcatgtagaaaatcagctgttcagataggcctctgcaccacacagcctctttcctctctgatccttttcctctttacggcacaacattcatgttgacagaacatgctggaatgcaattgtttgcaacaccgaaggatttcctgcggtcgcctcttcagtaggaagcactgcattggtgataggacacggtaatttgattcacatttaacttgctagttagtgataagggtggtacaactgtttggtaaaatgagaagcctcggaacttggagcttctctcctaccactaatgggagggcagattatactgggatttctcctgggtgagtaatttcaagccctaatgctgaaattcccctaggcagctccagttttctcaactgcattgcaaaattcccagtgaacttttaagtacttttaacttaaaaaaatgaacatctttgtagagaattttctggggaacatggtgctcaatgaacaagcacaagcattggaaatgctaaaattcagttttgcctcaagattggaagtttattttctgactcattcatgaagtcatctattgagccaccattcaattattcatctattaattccttgatccttcatttatccattctgcaaacttttcttgagcaccagcacgggtggccatttgtggacttctcttcattcctatgtgttttcttatcaaagtgatccactctcgaaaggctcctttccagtctgtggttgggttcaagtcatgccagggccagggggcccatctcctcgtttagctctaggcaaaatccaggggatctgcagtggggagcgggggcaggaagctggagggaaggcctgtgaagggtagggatgtggaaagacaaggtgacagaaggacccaataggacctttctatatctctggcttagcattttctacatcatattgtaatcgtcttatttgctagttttcttccttactgtgagtgactaacagtcatctttatcccagtgcctggtacataataagtgatcaataaatgttgattgactaaatgagtaaaaaaaaaaaaaaaaaaagaaaaaaaaaaaaaaaaaaaca

SEQ ID NO: 28389 - DNA, 4838 bp, Homo Sapiens
ccgggaattcggccacggccgacatgtttttttttttttttttttaaaatgagcaccctctttgatatcatttattaaaagctacttatgtcccatacaaactgctatatttggcatttattgaaactaccaataaactccaatatcattctgatttagaaaacttcaacatttctggtatgtggaagagttccaaacagtttgaccttgcaatgtcaatgctctgtgaacgacagcagtggcttctaggggagctgctgagcagctgtcatgtttcccaacagaacagggtgcaacattcttctgctcaccatgtttatttaatggcacactctaactctcagggcatgcagtctgctgaaaacatcaaccattatcattgatcgctctgtacccttcactatacagtttaaaaattttaaacctattttactctcttaacaataaacaaatgaaacacattattttattctatttgggtcaaattaattttattatgctccatgatgaattgccaccagtgcaacatcctattcactatacatttcaaaaaaagaattcacatactaaacaaaatttcagttgtctgaaaatgaaatgattgaaagtctttatgaatctcatacatacaatatgtggctagctgaaattgtctatcacgtagcatttagatataaaaagcctcatgctagtttgttaaatgcaagggctaccagacgaccatttagctggagaatatacggaaggctttcagacaacgcacaggtatagtgctgctcacagtgcaggatggtagaggactgaaacatgcaaccttacaccttacttggtaaagcagatttagtcttcatgcctggactgaactccacagctgctgtgtttcaaccaacagtaatttagactttttgtaacaacaaccaatgtctttttcttctttaagaaaaaaagaataaattaattacctttggcaaattatatatccattttacatgtttaaaattgtgctttgaactcgaagaatgggtactctctgctgagagaagttcctgataaatatatattataccaaagtcagctggaagatctagaatttcttggccacaagttaagagagatcttaaattggcattaccctgaagacatttctaggaaatttaaaatgttttttatattgtcaaaaagaaaaaattttttcaattaacattacttaaaataattataatgttccatttaacttttgtacaaactcctgattttattggttagtagttgtccagcctcatctgcaccagattgactgagctcaagccacaataaaaatgatagtaagtagaaaaaggtttctagcagcagagggcactgttgttgcaagaaacaaaaagtctagaatctttcccatgtgcttaaattactcttgcaagaaagataacattctttgaataacttaagtattttactgcaccacttactgctttcagcaacaaaaccttttaaattatttcttatgataactagatgcatgatcactagagattatgtaataaatggttaaaattcaagccacatcttgcaggtccagcctgtcaagatctgccaatacgagattttggttggtacaattctagatagcgtaatttttagttggatattgtgactatagtaatgaaatacatttggaactacattatgcatattgctcaatgtgagaaaaatatgtttgtatttaaatcagataattttctacctaaaatttaaagtaggtaggtatgataattagcattataaatatgaaacaaccacctttaggcagattagtgtagtgtagagaggcaaagaaaccctaattttaacacaccatttagtatgcataacaaatgtgcaggttgtaaagttttatcttaaaaaaaaaaaaatctatcattcagttatctgttccaagaactctgacattgggaccaccaatcttttaagaaaaatgtaactcttcacatgctatttgacaaaaaccctcaaaagttatccaaatcaatgcatgttcggttccgtgttttagcgcacacctttgccaactagattacatttttatggttggtatttctgaacacctcaatccacacaaagtgcaaaataaaaatgctaaaattctacagtattttagtactattctgatttgtatagtttttttaaccaaatattggagttaccataatattacctcagttcatgtagaatgaaaactactccctaaatccctgaaactccaacttaaattttgtttcagagtaataccaaaaaaattttcaaaaattttgctaaaaagagcctgtcacatttgctacagcataaaaataaccccagtcaataacaagtatttaagggctccttatgatcccagtctgcaaataccactgctataccaataacaggcagtattactgtcccggccgtacggccggggcagtagctgcaccactagaaagatggcggagcaagagcaaagaaaaatccctttggttccagaaaatctcctgaaaaagaggaaggcttatcaagccctcaaagccacccaggcaaagcaggcacttttggcaaagaaggagcagaagaaaggaaaagggctcaggtttaagcgactggaatcattcctacatgattcctggcggcagaaacgtgacaaggtgcgtctcagacgactagaagtgaaacctcatgccttggaattgccagataaacattccttggcctttgttgtacgcatcgaaaggattgacggcgtgagtttactggtgcagagaaccattgcaagacttcgcctaaagaaaatttttagtggtgtctttgtaaaagtcaccccccagaatctaaaaatgctgcgtatagtggaaccttatgtgacctggggatttccaaatctgaagtctgtccgagaactcattttgaaacgtggacaagccaaggtcaagaataagaccatccctctgacagacaatacagtgattgaggagcacctggggaagtttggcgtcatttgcttggaagacctcattcatgaaattgccttcccagggaagcatttccaggagatctcatggttcttgtgccctttccacctctcagtggcccgtcatgctaccaaaaatagagtgggcttcctcaaggagatgggcacacctggctatcggggtgaacgcatcaatcagctcatccgtcagctgaactagacccaggtgccaaactgcggtaaattttttatcagtgaagtggaagcatgtgttttgttttggaaatttttatcaagtatcttcagagaagattatttcctgctttatcttcagaaactggaaagggtcaaagaaaagacagtagctggccggtcgtggtggctcgtgcctgtggtcccaaagtgctgggattgcaggcgtgagcaactgcgcccagctcttgtgtaccttatgtgaggaagtcctgctcaatcaggatcggtcacgcaggccctgatcttgctactctggttccatgtcctatggaagaccaaagtttaccaagatagatttttcccttcatagtggcagatggtgttaacccctgcaccatctgtaactcagaaatccccaccatttcttcccctgggcttcagaatagaattgcctggtttctctgatgatcagcatggttccttaaaacccaaatcagcaaggaatgaacaattttgtttggcatggatgaaattagcactgtttggctcgttaggccccaggcaggcaggcaccttaattttttccttgcatattctagtcttcagaagcattgccttttgtcctactggtagtgacatagaccaataacagggcatctggggattttaatcctgaaaacagtgagtctgatactgcttgtgtttttcatcagtgtccaccccaagtgggtcttcctgctattctcttcacttagttgcccctcacttgccatctgagcaattggcaaggatgtgccaggcctaggttaaacttggaaacatgcttgaccattctattccctggtcctttaagatcagtttggctgcaattttggctccttggaccctcaagcatagctggtaaatcaagttagagatgtaactgccttaaaacatgccagcttaggctgggcacggtggctcacgcctgtaatctcaacacttcaggaggctgaggcaggcggatcgcttgaggtcaggagttcgggactggcctgaccaacatggagaaattctgtccctactgaaaatgcaaaattggccggatgtggtggtgcatgcctgtaatcccagctacttgggaggctgaggcaagagaattgcttgaacccagggaggcggaggttgcggtgagccgagatcacaccattgcgctccaccttgggcaacaaaagcaaaactctgtctcaaaaaaaaaaaaaaaaaagtgccagcgtatgaggtaattagattggttctctccagaggtaacctgccaagaagagatgctatagatgttactcctatactgtaaaacattgtgaaatcagattactttaaaatgatgtattacaaagttatgcaaaaaagcagttgtgactatggaagcccaaggcttatatcccagctctgtcttacactaaatatgggtacagtgtttccactctgtccataaaatgggagctaatattctccaacctgtgtgcctgacatgatggttaaagggattaaacaaaacaatagtttgtaatttattctgtcagagcaaactgctggtaaataaaagggactaagttgacgaaaaataaattttaaaaaacctaaaaaaaaaaaaaaaaaaaca

SEQ ID NO: 28390 - DNA, 4898 bp, Homo Sapiens
cattgaaggaaataatatgtggtatggtatcttttgtccctgtagtacgatgctagtacaatagtctctccttatctgtcggggcggggggatacattcttagacccccggtggatgcctggaaccacagacactaacaaaccctgtacatactgtgtattttcctatacagatggttcccaacttatgatggttcgagtttacaatagtgcaaaattgataatgcactcagtagaaaccattctcttaagtgtggggcagttaagcatttttgacttacaatattttcaccttacaatgggtttacttatttttatttttttgagatggagtttcactcttgtcacccaggctgtagtgcagtggtgcgatctcagctcactgcaacctctgcctcccgggttcaagtgattctcctgcctcagccttccaagtagctaggattacaggcgcctgccaccatacccggctaatttttgtatttttagtagagatggggtttcaccgtgttggccaggctggtctcaaactcctgacctcactgccttccttggtcttccaaagtactgggattagaggcatgagccaccgtgcctggtctttacaatgggtttaatcgggatatattaccccatcggaagtcgaggagcatctgtacatatatacataccgctgataatgtttaatgtataaattaggcacagtaagagatttaacaacaaagccagagcatggtggctcatgcctataatcccatcacttccggaggccaaggctagaagatcacttaaacccaggagttcaggaccagctggcaaacatggtaagactccatctctatttaaaaaaaaaaaaaaattacccatgcaagacggtgggtgcacctgtggtcccagctacttgggaggctgaggtgggaagatcacttgagcccaggagttcaagaccagcctgataaacatggtaagattccatctctataagaatacacacacacacacacacacacacacacacacaaaattacccaggcaaggtggtgggcacacctgtagttctagctacctgggaggctgaggtgggaagatcgcttgaaccctggagttcaaggctgcagcgagctaggatcacgccactacactccagcctgggtgacagagcaagaccccatatcaaaaagaaagaaaaataaaaaagattaacaccaactaataataaaatagagcaattacaacaatatactgtggttaaaagttaacatggatatggtctctcccatgcttgctctttctctcactgtctcaaaatatcttattgtactgcaccataggcagttgagactgcagaaagtgaaagcatggataaggagggactactcttcagtcatgatctctgtctacagcagtttatattcttgtagataacatagggacaaacatagggaaagttaatcaaaattaatcaaagcttggttcaagggtttctttgtccacagagtattctcagacgttaccagctaggtgacttttccttttcccccaacgactgggaaagtctgagaatactttgtggagaaagagggccttgaactaagttttgagagtagaatttggacagttcaacaggcagctatgggcacccttgatagaatggaaaagtagggacctggacatgaacttaggaaggtggaggattcaatcgttcaaggacaagtcacatgtggcatgtcttttcttttacttgtttgctcagtctgaattagtatatacatagtaattagaattgaaatttttttctttttttttgagacggagtcttgctctgttgtccaggctggagtgcagtggtgtgatctcggctcactgcaagctctgcctcccgagtttaccacattctcctgcctcagcctctgtagcagctgggactacaggtgcccgccgctacgcctggctaatttttttgtatatttagtagagacggggtttcaccgtgttggccaggatggtctcgatctcctgacctcgttgatccgcccgcctgggcctcccaaagtgctgggattacaggcgtgagccaccatgcctggcctagaattgaaaattttgaaatagatttggcatatattttataggcacagggaggaaaattttgatgacctctgtgtagtgaagggcgctatataaaatggcttaatgaataataaagtagatcaaatgtttagcattttcagtttatatttttatcttgtgtgagctgtttctggataatttccgtttttagtatgtcactgacttcttatgtcactaagatatctgacagaagctaaggtaatgctgttgaatctccaatgtggacagaaatcttagacaacctttcatgctattacaactttgaaggttagacttttaaggtttgacagactagaataccccttccacttgtctggttttggctcttataggcatcacgcacagattataatctatactttggctgtttgttgttgtcaatggattttttgtgttgcagcatgaaaagcttgccattgccatcttaattggaagtagatgtttttgctaaaatatgctctttatatggattgctttattttaatatagaatttttaattacaattttataaaaatacaaaaatgaaaattataggggcttctgcttcttaggaaatgaggtgcatgtgaaaagatttttatcactataataaaaatagacttttctaaactggccattcaccgtatcagctatttttgtaacatttctgtctgtttatttttcagcttttttaatccaactcaaatgaactaaaaacagaagatattttaaaatgaagtaatataaagattgaccttgtctcactctactcccctccttgcttctctgctcatctagcacctgtctgctctcacccttcccatgttctcgccattgttggtgcaagatttctacagcttctatcatctggatcagccttgttacctaggtttcctcaatcatctctttcttcagatctcatcctagttgtgtttcttaattggccttttattttgttttggcttttgttttgggcttgcaactaggtgctttaattttttaccataccgtgttgctcactagcctttttttttttttactttctactgtttcatatttaattttgtattacattttgaggcataacatcacaataaaattaaattgttataaaatgttttagatttaactagttgaatagttttaatccattctaaactttaaattttatttcctaggaactatagaattcttttggaaaacaaatatagcagttgcatcaagttcttttatgtttgtgctagtttaatatattgattacatttcagttgaggggtgttggttttcttttcctcgttggaatgttagccccaaagtccttttgatgattgattggggcatgtcctctgcttttgcccaagtgagctcaaaaccagttgaaggacttatggactgaatattaggttgggttaacatattaatatagaagatcaatggactctttactgaataaatattttttacacctaatttttatgtacctaaattttggtttgtctgaggtgtaatataaagacttaagaatgaataaaagagctttacgtttgggatgacaatccatgttggaatgttgaatttcttcttttttacagaaaatacacattggcaagttgagagttatcaacctgtgaaacagtatgcagatttgtgtcttctgtatcacatctgctagaagtttaatttttaatatttgtttttgttttcttttgcttaatctaatagctttgtgttttgtgtttcccaagtaatacaatgatcaataatgctctcagtgtttatcagcacaaaatttacttgtgatagagataatgccagttccccttctagtggctcttaaaacctgaatttcttactcttatccacattcttttatatgaaactgcctttttatcatcttgctaccttgtgagctttctaacatggtgtcttttgaccaaaggggagttcttttaaggtactagaagtgagttttcttagggtgggaaaaacatttctaggattgtgtgattgggatttcagtggaaagctttcaggtctctcatgaatgatgttgtcccagctatgttatattttagaccagacatgtactgatgacctttatgagttttgctggtatagatactgccatttagaatagaatcaatgtaaaatacgaaaattaaatatataaatgtacacagaaatctttctacacaaacatacattcagtattttgcaagtaggtttctttcaaggcatttttgccctaagaatacattatctaatgataaactgtaagttgtcagtacatttctcaattagaacatagttttcaaactctcctgcagagaatttgttttctagatttgttggtagagaacaaatttttattcttcacatttttatgctgccacatatatagcaaccagaatgttttttataatcctccagtagaggatttttctaatcattgacagaaacaaggtttattcatttcatttttaatagtactcttaaagtaaccaggatctttttcttaaaccagaaaaaattagtcacttttaatctgttttcattgcatgtcagtgtattgagggggaaagtctggaaatttgctatattgggcatgaaggacatgagtttaacatacgcttctaattccagattcttttgtgatcgacatttgatttctaactatctaaaaatagtatgtcaaatatgttttactcatatagcatcattttttaaattaacttctctaaactttcaaccttgtttttaaaaattgctaaaaaaaaaaaaaaaaaaca

SEQ ID NO: 28391 - DNA, 3170 bp, Homo Sapiens
ggccatcaaaaagtttgtactaaacaatcacctgggaagggtggccgacttcccaatgcagattcctgggccccatccccaaattgggttattaggatctcctccagatagctcagcattccagctttggctgacaagcctcactcagctgactctcttttagttgcactattaaacgtcttccatgcaggctttatagggaaggacaaggcaaagaacaaagcagtcaacaataaggaaaccaagccctcacaggaaagaaagcctgaatcaagaaaacaaagtttgaaacaaggcatatttatatttaaaaatgaataagattctaaagtggcttccatatccttccctaattatatgtaccattatgattagaaccacaaaatgagcacacataaacacacactggtagcctatcagaaaagaaagccagattctgcactggtccttgatattgttacagaaccacgatatgctaaatgctctcagctcaggtgaaaacttttgttttcatatactacagcatccttcctccctacctgtgggtggtatgggatgagtgatctttatgctgatgtttggaaccgtctgttatgtttttgccaaaagcagaaattttaccaccctgaagaatacagtatgaaataagaaagccttcctttttgtgatcttcattcatggacttttcatagctgttctgtaatctactaaagcattggtctctctccatgggatgtgtgggcatggtgtatgtatcttaaaagggatctgcctgagagagagcctgtagctaaggcctgccagctctgcttcctccccttccccctcgcaatcctccctcattgatctatcttcctgtggtgcactgccccctagagtgtaagaacctcagggccactgaacaaaggaaaatgtcagcgatagtaaaagtaaatggtgctaatgactggctggcaaagccatggtaaatcaggtggatttcagttctctgctttcaacagactaaaggagaatctaatcaagttgtttgttagttgatagatcatcattaataattcttgatgatagagcactgtgatctttgtcaaaatgccaaaggaatccaaagaactgtaaaaacattgttaacgtaattctattccatcgaatttatgtgcttacatctatacagaaacaaggaatacagctgaggttgaaccccatctcagctgtaaatcacattcatgtattcttggataaatgaactaattaggataaagaacattctaataaaaaaacttttaatcatccaagaattaataccgttttcattatataccaataattaattacgataatattggttctggactgagataacaaacaaacacttaaagcaagagctaaaaaaaaaatttccatttatattttttgttgacaagaagtaatggggtgaatgattaaaagatgtcgggcataatagattacattatgataggattcttggctgaaaagtggtatggaaatacagaaggagaaaagccaatttgaaatgtttaactactaaagaactagctcatttatttttataaatgaatgaagggtgtcaaattgttgtgatatttaaattgtactggatatgtttaaaatagtgatgtaacagtttttattttaaaataccaatatttacacgacaccagcaaatacatactttgtcaactatttaacttcccatgaaaaattttagataccaacttagataaaattttagatatcaacttagatgggtgagggtatacatgatttttcaaaatacttttgggggcacatgagcagaatactttgtggactactgctttaaaacacgatttctccaagtacagttgagggacaacttacagaatcacctgggaagggcagatgactttttaaaaatgcatattcctgggccccatccccaaatttgggttattaggtttggggtagaccccaaataagttttcaacatgtaccccaggtggctctcatgcaaaccatttaggaagcactacttaaaaaaataaataaaaactagcattttccggtattgtagccgtggctgaagagggaaacaacctcacatatgtttctggactgaggttagaactgaaataaaagctaaacaggagccggagctcacaaaatagcagcacctgtggaggagcctagacataggaaaaggtcaccagggcaggaatgcactttcctggaattcctagcacggtcaaagaagagaaatggaagggcctaggcaggctaagcccaccgtgggctctccactgtggttgcactttggaagaaaacagaagaaagtccttttccgtcttgaaccagcctgaggaaagtccgtgtttaggagggccaaccgtcacaccaaaataaaacatgcgctaatggaagccgattgcaaagcaggtgacagagcacactttgggaagcactgctggagtgggggcagaggggtacttgccatgaaaatgccctggggaccctctgacgacactgttgggatggctgaggcacctgttcccttttggtcccaccggtggcctaaagtgtggtctcagagtgcttgtcttctgctgctcactgggtggggcttgtgagcatctgttctctcttcctaggatcacagaagaactgcagcttcctggggagcagtttcacctccacaggcatcgcttcatactcctcactgtcaatgctaaaagagccccctgctccctggggagaagagaatattcagaacagctcaaacacatcagtggcctactggagttggaggtctcacagcagcaccagaagaagttcattatggaaaacaacatcctctcttgaggagctatcctaatgttcttttacaaaaaaaaattcagtgcctactacgatgggcacagtgctggttctggaaacatcctaattctaccatccatgaaaaaggatttattttctttttttggcccctatctcctcccagagtattttgggatttgaacaacatggttataattttcaaatatgtattaaaaggcaagggtcctgccatgtcttaaggaactcatatacatagtctttctatattatgctaatccttctcaaataaaaataaagacagctaattctcttatgacaaaaaaaaaaaaaaaaaaaca

SEQ ID NO: 28392 - DNA, 2654 bp, Homo Sapiens
tgtctgatgatgctggtgacaccttagccactggagacaaagcagaagttactgaaaacggagtccctgaaataacagaaagcccacccacttccccttcatcagcctctcggggtatgctgtctgccatcaccaatgtggttcaaaacacaggtaaaagtgtcttaactggaggccttgatgcgttggaattcatcggcaagaaaaccatgaatgtccttgcagaaagtgacccgggctttaagcggaccaagacgctcatggagagaactgtttccttgtctcagatgttaagggaagctaaggagaaggagaagcagagactggcacagcagctcacgatggagagaaccgcgcactacgggatgctgtttgatgaatatcaaggcttgtcacacctggaagccctggaaattctgtccaatgaaagcgaaagcaaggttcagtcatttttagcatcacttgatggagagaagctggaactcttaaaaaatgacctaatttccattaaagacatctttgcagccaaagaattagagaatgaagaaaatcaagaagaacaaggcttagaagaaaagggagaagaatttgctcgcatgcttacagagcttctctttgaattacatgtggcggccacacctgacaaactcaataaggccatgaagagggctcatgactgggtggaagaggatcaaaccgtggtgtcagtagatgtggcaaaagtgtccgaagaagaaacaaagaaggaagaaaaggaagagaaatctcaagaccctcaagaagacaaaaaggaggaaaagaaaactaagaccatagaggaagtatacatgtcgtccattgaaagtctggcggaggtaacagcgcgctgtattgagcagcttcataaagtagcagaattaattcttcatggacaagaagaggaaaaaccagctcaggaccaagcaaaagttctaataaaattaactactgcaatgtgcaatgaagtggcctctttatcaaagaagtttacgaattctttaaccactgttgggagcaacaagaaggccgaggtccttaaccccatgatcagtagtgtattgttagagggctgcaacagtacaacgtacatacaggatgccttccagctgctgctgcctgttctgcaggtctcacatatccagaccagttgtttgaaagcacagccgtgacctggccagactccatctagttaaaggagacagctggccgccttgcctcaatatgtaccatttaaggggatgttctctgtgcgcctggccacagacatccatttgaggacactacaagcaattttgcacagacaatattgagaatgcaaatttagagagagttatcatttctctcaatgtgtataattgtttttacaaacaattgtgttttctttatgttaatttaaacttacacagcttatattgaaaatttcctttcatctgaaatttatttacaaatattcgtgttcattttcctggttaagcatgctatatttagaaactcatggggagaccttagacttttgtttaatcctttatgtttcaacctttaaatgttccattcttatagtattactttaaatcaattctaaaactgaactttgttttgttacataaatgtcgcaggcaaaaataacactacttatagattttacctattatggtaaaaaataggaacatattgtcattctttttttttttttttttgagacggagtctcactctgtcgccaggctggagtgcgttggcacaatctcggctcactgcaacctccgcctcctgggttcgatcgattctcctgcctcagcctcctgagtagctgggactacaggtgtgtgccaccacgcccagccaattttttttgtatttttagtggagacagggtttcaccatgttggccgggatggtctcgatctcctgacctcgtgatctgcccgcctcagcctcccaaagtgctgggattacaggcttgagccaccgcgcccggccggtcattcattcttgcaacaagcatttattgagcacctactgtgtgctcacagtaaagaaacgtgatcttatcccagtagaggtagatattctgaaaaagaataattcttaaactgcttaaaacaggggtccccacccccaggccacagaccagtaccagtccgtggcactggttaggaaccaggccacacagcagggggtgagcggtgggtgagtgagcacagcttcatctgtatttacagctgctccccagagcttgctttactgcctgagctctgcctcccgtcaggtcagcagcagcattagagtctcatgggagtgcgaaccctgttgtgaactgcacatgcgagggatctaggttgtgcactccttatgagaatctaatgcctgatgaatctaatgcctcatgatctgaggttgaatagcttcgtgccgaaaccatcccccacccccatcccgctaccccgagtccgtgaaaaaattgtcttccatgaaaccggtccctggtaccagaaaggttggggaccactggcttaaaataccaataaatttttgaaccttaaaaaaaaaaaaaaaaaaaaaaaaaaaaaaaaaaaaaaaaaaaaaaaaaaaaaaaaaaaaaaaaaaaaaaaaaaaaaaaaaaaaaaaaaaaaaaaa

SEQ ID NO: 28393 - DNA, 4759 bp, Homo Sapiens
attgaccatgttcatgaaataaaatctcctgatgatcctctcagtacttctgaggaaaaacttgtatccttgccagttgagtactcatctgatgacaaaatctttcaaacagaaacaaaacaatatatggaccagcccaaagtttatcagtcggaagccaagacgatgttacagaatgtatctgctgaagtatgtgttccagtaactctggttccggttcagatgcctgacactccgagtgacctagtgcgtcatactaccacactcccaccatcttctcatgagattctgtcaccacagccacagtcaactgattatccacgagcagcggatttagcttttctggaaaaatatactcttactcctcagcctgcaaatatagttcacccagttcgacctgaacaaatgctagatcctagagaacaatcttatcttggaacattactgggccttgatagcactactggtgttcaaaatatttctacgaatgagcatcattcatgagtaaatctaaacattccacagatttttggatggttatatgctaatggtagagatgatagcttttaaatttgtggggctgctattttcttgttttctctagtttctcaagtcctcagaacagtttcaaatcaagaaaactatgtgtctctgtttactgaacatgaatatttggacaaaatttctggtataatatttgaagtgcacatttttgtgatttttaaagattatttagtgctaacttttaatggtttcttaaattttttgcaattattagctgctgatattatggaagtattttttttaatcatcagtggaaatttttattcttctttagtctcattcctctccttcttcttcctagcccttcttacaaacaagtttgaggaccatgtagcctttaagaaggaattaagagtacactgataattgcaactgtttcttatcctaagattcaatattacgttatacaaatttttaaaattgaaattaggaatttgaatttacaagaatgccttggatatttctgtgttgtctttccattcatacataattttaggttatcattatcctttggacttttgatatactcaaagccagaaagcttaactaatgtaagattagctattatttgtaggactgaaataataatccagataattggtttttgcctatacttcaattgttatgaataagaaaggcaaacataggtctgggcattaaattatacaaactgaaaatgtgttacaagaaaaatatgagagttttaactagatgtttttcaaggtaagttcaccttttgtactttactatttatttcagaaatgttgacaatacaacatagcatatgtcttcatctcactaagaaaagagcagttgtaactcaatgaaatttaattaaacatgctacttttgatttcatttacttggctgatagaaactctgggaaacagaacctagatattttgtgttcaattgttagaaaaggtgccaaacagattatgaaatttgtgcctaatttaacttaacattgtttaattaaatggaaccactacttatatacagatttacatgcaatccagatctttaattttgccttcacaaaagcctaatgtctgtaattaacctttaatttttatttctgtatgagacaaaagttgaggacttggtgaaaggaaatagcagttacagcaaaacctcagtgattacaattgaggaaaaagtcaaaattataaaatacctttaaagacatgcactttccatattttcaagtcaattttaactaaaaactaagataatgtttcctagtagagttgcttgaagattagactagacagggttgatttattattagcatgtcatttgtacataaactagtagaaaatagcagttttaaaagttttctatttcagttttgtttacactcctaattgctttaagcactttttttgtgtgtgtaaactgtaaagtctagcccagcccttgtgaaaaaaaaaaatcacaaataaaacagtgaagttttaatgaataaagtttaatcaattagtaatggcggaaactgtcgctgaagcacttaagaaataaaggtactttacagcaacattcgccatactagcggaggtaaaacaaaagaaatattgaaaactgaggcagttaaccaaagtagctcatataaataataaaaccaatctgagtttagcctcatttgtcaaggtttggttgtaattgtcttaagactagtggacatacttactatgttctcctttttaaagtattcttatttctttgtgtggaaatgttatatctggggtacttacatgattgaggttgactatatgaggtactgttagtctgttagtctttcaaattgacttttaaaaatacatatctttatgattttcatcataaagactggcaatattataactaaaaatcttactataatgaaagaaatcatacataaaaatgtagcctgccttacatataagctaatgtagaaaagtttagacttataaaaaggcagatagtatatatatatttatatacatgtatgtatatggtatattatacatttggtggcagaaaaaggagatactgcattttcacattgaaaagaatactttgatttttgaaggtatttactttagggttcttttaataataatgtccgtcctaatgctttaaatatatgatttaattgtaggaattggtttacacagaacttttttggaatacatctcttagtaaagtgaaatataataatataattgtatttagttactattgtagataacttaaacttgagtagtgatttactgttttataaaatgctttcatatatgttatctcatttgaacctcataaccagccctgaaatagtaaaaacaagctatattcccactttataaagaatttgaggttaagataaaaggactcatttaagctcacatggtcagtaggtggcagagctactagtagggaaagaagaaagctagcattaatgaatgcttactatgtgccaggtactacatcctgtcatttaatcttaacctagtctgggagatgcgtaatataattctggtgaagtaatagtttcagtggatgattgaaacaacaacaacaaaaacaaaatgaaactaatctgctgcctctaatttccaaaaatgtaagaaattttacaattgtgaaaacctcatggatttgggcaaactgaatgtatataggcttttgacaaaagttggcacaaaaagtataaaaggaggcctattcttttcagttgaccttttgtaatatttgatttagagtattttggacaaatgctctataactctaatccatttattttgtaactgtacttaaaattttgaatcttgcaactaagtttagcctcattcagaatttttttattttgtgagcataatttattgttttaaattaattttttagcagatagcagttagcacttaatctgtaaattgaataatttatcaagtgcaggaatgtgttaatctaatgggttttgacttaaatgcaccaaagatttttagtaggtattaaatagtttaaaagactttaaattctttcttgcttgaataactatttgtccaaagaagcacagttgaagtcctagaataatggatttttttaaaaaaaaaaagttgttagtttgaatactgagattgattattgtgtttatatgtataaaaataggagcaaaagaaaatactctgggaatagtcatactgacaaaccaattataagtgagaatactgttttccttagtttaattaatacaatgttatgttttttagagaacactactaaatgctaaataagcctattttttacactacactatcaaaataatttttgccttcgaatttttttaagtcaagttgaggttatttttgtaagaaacccaacctattttttttgcagcctaaaatcccatttaaggttaggggttggtccttatgccagcaagatttaaccaactgtaaagatagtagtctttgcatacatttaagtaattaaggcatttattgctgggagaataggagtagcaaaaatatggttttaaattggtgctttattaggtgacttccttttaggcgatggcaggtcatgaaataggtacactaataattttctatcaaccttaaaaagtgtcaaagcatctttgtagggtgactctaaactgctaattaagggttaataagtaattatcattggttgcttttcaatataattgcaaacaaattaaaaacacagttaaactaatatgtttataagcttgagttttcttcctaccatatcactctcatatatcagtgatgaaatgtcagattttgagcagtagctctttgacagtgtccttttatacccagtcttttctgcattgaatgctttgtgccttttcgatgtgttgtagttgcttagagttgattctgctggctagattgtactgattaatagatttttatttttatttttttttggttatgggtgttatgattgtgttgcctgctggttgggcaacttttttttttttaggttgctttatgtttatataggcaaattggcactaagtgttagtgtgaatatttgtttttatgatttatatatcattttaaaaatctctgttgtggcctttatagttactgtgaagccactcttgggcctgtctctatatgcttattagaggaatctgacaagtaaaataaaatgagtagtgtgtctaaaaaaaaaaaaaaataaa

SEQ ID NO: 28394 - DNA, 5277 bp, Homo Sapiens
tagcttccttgtcgtgtggcctcagtccttcgccgtccctcgccgtccttcgccatcgcacgccaccgcaccccatctctcgaaatctgcagacatcttgatttttcccacgctgtctgtcaggtctccgccgccactcgacgccagggcgccgggtgagtccacagcagggcgcatggtcggctccactctcaccatcgggggaaactgaggccccggggaaggcggccagagaggtcaggccctgtccttggtgcagtgtctcgtcctctttgccggagtgagccccccaggattcgcgtgtcctcgggaaagacactggcaggccttgtgggctgtgctgcacctcggacggcttcgcaccagccagcgccctctctctcctgcagcactctgatctgcaccccctgaggggcttccactgtccgcggggtgagaatgcccctgggagtgtcacatgactgccgccccatgtgtgtgagaggctgcttcccattgcttgctcttccactgaggcccacagggacatgtgacaccctcttttcctcgaactctgcgactccactgtgtgaatcacggtggggcttacagagctccccttgggctctgagtcatcctagtgtggattggcatagtttgttgaagtgggaggagtactgcattttggaggcaggcaattagctagtggttttctctggacttggtggcgatccttgttatgaagtgatttatggattttttttttttttttttttttgaggcagggtctcattctgtcacccaggctggagtgcagtggtgcaatgatggctcactgcagcctcgacctgggctcaagtgatcctccacctcagcttcctgagtagctgggaccacaggtacgtgctgctgcacccagctaattttttagaaattttttgtagaggcggagtctcaccatgttgcttgggctcgttttgaattcctgggctcaagcaatccttccaccttggcttcccaaagtgctgggattatggatagtaagtccaggcctggccgacgtgtggatagtatcacacaatccctgacttcctaatccagtgaattctcaacatttcacccagagttgatcttccatctcattctcttatgagggaagcatttgagtagtggttctcaaactgtggtcccagaaccaggtaccatcagtattacttgggaacttgtaagaagtgcaagttcttagccctgtcccaacctactacatcagaagttttggatctggagccagcaatctggcttaacatggtctccaggtgattcgtattcatgctaaagtttgggaaatcaaaccatgttagaaatctttgggaatcagaagcagctgctgcaattctaggctgcaaatctggtcactgacttgtttccaggtctcttagtttgggcccttcctaagctgctgtcagtgcctcccctctcaactcactcactgccctattttgtccctgtattcgaaagtgatcgtgggctgcctttgccctggtcattgatagtgcagggagaggaatcaatgaaagcgcttccccgtgtttgaagggtccactcctatcccttccaaactctggagctttcgtacatgcctttattctcaccagtgatgttacctcctggtacctggttgtcgtgccagacccctgtttacctcattagggatggcaccaggttcaacaggccggagaagagacctggagccagtgaaggaaacagggtttatctggggaacttgagggcagtcagcagtctagtggtggggggctggatgggggcacctcatccacttgtaaaatgcatgcagattatatagcaccttcccccagtaacctccacatggcaaccctcatttcctaagaagctattgttacatgcatctaccatacactggtgctgtatggttcattgagtgtcccttgtgcctagcatgggactcagaggctcctgtcaaaggacagtgaagcagggacctgccacactgagtttatgtctctgagctagttttggagccacagtagtggttaccccttcctagagctccccccagaagctctctctgcctccccatcacactccttcccacctctcagcactggtcacactgtctgggaattgttggtttgcttctcctgcccactgtgctgtgagcttcctcagggcagtgcctctgtcttgtttcacatggtgcctggtaactgacatgtagcacctggacaaacagtaaatgagaagacacattgttgtaaggtgacaaggcttatcccattgagcagtgctggggttaaaaatgtcctagaacaagccagctgttacagtccaccttcagtcctggctgtgaggagcgtccatggtctaccagaggtggattttccttctggccttagattaaggtggcaagggctagagtagtaatcgggggagacaatatgctataggtatagtcagatgtatgaatgcagctcttacacactagatggtaggtgcggggctctcccaccccacctgttcattacccatcccaggtctgtgctgatcactgccaggcatggcctgctccaaaagccttcttgccttggcatcctttttttcttttttttttaatttttttttttttgagacccagtcttgctctgttgcccaggctggagtgcagtggtgcaaacacggctcactgcagcctctgcctcctgggttcagtgattctcatgcctcagcctccgagtagctgggattaaagatgtgcatcaccacgcccagttaatttttgtatttttagtagagatggggtttcaccatgttggccaggctggtctcgaagtcctggccttatgtgatacaaataattgggacagcctcccaaagtgctgggattacaagcgtgagccaccacacccaacctgtttttaaaatgtttattgtctatatttgagtttacaacatgatgttatagaataatgggacagatatagatagcacagtggttactatggtgaagccgatgagcatgtctgttatctcacatagtcaccgtttttagtgtgtgtgaggagcagctgaaacctgcttcacagaaatcccttatgttgtgcgtgagccctctagacttactcatcctgtatatctgctacttggtgtcctttggcctacatctccctatttccttcagctcctgcccatggtaattaccattttattctctatctttgtatgcttgaccttttttttttttttttaacattgcacacataagtgagatatgcactgtttgtctgtgtctagcttatttcatttaacataatatcctccaggtccatccatgttgtggcaaatgacaggatctttctctatctttttcttttttttggttgagacagggtctccctctgtcacccaggctgaagttaagcccaggagacagaggttgcagtgaactgtgtttgctcactgcaacctctgtctcctgggcttaagtgaccctcccacctcatttccctgagtagctgggactgcaggtgcatgccactatgcctggttaatttttgtatgttttgtatagatggggtttcgcgatgttgcccaggctggtctccaactcctgggcttaaaccatccttctgctttcgcttccaaaagtgctgggattacaggcatggactgccatgcctagcccagggtcttcttttttttttttgagatggagttttgctcttgttgcccaggctggagtgcagtggtgcgatctcagctcactgcaacctccacctcccaggttcaagtgattctcctgcctcagcctcccgagtagctggggttacaggtgcatgccaccacgcctggataattttttgtatttctagtagagatggggtttcaccatgttggtcagtctggtcttgaactcctgacctcaagtgatccacccacctcggccccccaaagtactgggattacaggtgtgagccaccgcgcctggccaagggtcttctttttaagggtgaataatgttttgttgtgtgtgcgtgtgtgtgtgtgcgtatgccacattttctttttccattcatctgttgatggagacttagattgtttccgtatcttggcgattgggagtaatgccgcagtgaatattggagtgcagatgtctttatgaggtgtgatttgatctccattgagtatgtgtccagaagagggatagctgggtctatgtaatgtatactgataagcagcacagagtgggcacataggatagcatagatgccatttttctcacagatagtttgccgacctcttcctagagttacgtttttcttgttcctgagacaataatgtggctgtaagtactaatagagacagtggcatttgtgggttgcttatgatctgccagcccctgcgttaagtgttctctgtgtctgtttcagatgggtctgctgtgtgcagaggctccatgggatgtgttgtcttcatagtagcagggcgctggaccatgggtccgcaaggtgggatttttggactgttgtctggaatatgtttctttgcatcctgcagagtcatgtgctgttcctggggcttggatgatgtaggggaagcaaggtgaaagtggtatcccgtggttccacgttctgtcctgctgtggggctgtccctcacatgctttcagtggctgttgcagaggaagagcctccggaaatctgcgtgggtaaagtgagctccccggaggagatggccctggagactaaatacttgtatgctttcttaccctcttaggtctcagccttagatccaaggacagtccaaggaagtcctaagaccatggagttggtgatctgggatctgggtttgctgatatttctcaccgtgaatctcttggtggtgtttgtgggcagagaatggagagtgaggctaccacatgaagcgtcaccagagctgctccctgctgcctgctcagagcaccccggatccactgttcaatctgcacaagattcggggtccagacatgggagacttcagctgcctcagaggaccgtggacagggaaggccagcctcgcatccctctgtccatgcctggaatgactttaataaccaagagttttatttttgaatttgtagctgtcgttcactttttacccacccattcaataaaccttacagaattgcaaaaaaaaaaaaaaaaaaaaaaaaaaaaaaaaaaaaaaaaaaaaaaaaaaaaaaaaaaaaaaaaaaaaaaaaaaaaagaaaaaaaaaaaaaaaaaa

SEQ ID NO: 28395 - DNA, 3727 bp, Homo Sapiens
acaatttccaagaatgatgcctttcaggtcctagggcctctggcctctaggtaaccagtttaaattggttcagggtgataactacttagcactgccctggtgattacccagagatatctatgaaaaccagtggcttccatcaaacctttgccaactcaggttcacagcagctttgggcagttatggcagtatggcattagctgagaggtgtctgccacttctgggtcaatggaataataaattaagtacaggcaggaatttggttgggagcatcttgtatgatctccgtatgatgtgatattgatggagatagtggtcctcattcttgggggttgccattcccacattcccccttcaacaaacagtgtaacaggtccttcccagatttagggtacttttattgatggatatgttttccttttattcacataaccccttgaaaccctgtcttgtcctcctgttacttgcttctgctgtacaagatgtagcaccttttctcctctttgaacatggtctagtgacacggtagcaccagttgcaggaaggagccagacttgttctcagagcactgtgttcacacttttcagcaaaaatagctatggttgtaacatatgtattcccttcctctgatttgaaggcaaaaatctacagtgtttcttcacttcttttctgatctggggcatgaaaaaagcaagattgaaatttgaactatgagtctcctgcatggcaacaaaatgtgtgtcaccatcaggccaacaggccagcccttgaatggggatttattactgttgtatctatgttgcatgataaacattcatcaccttcctcctgtagtcctgcctcgtactccccttcccctatgattgaaaagtaaacaaaacccacatttcctatcctggttagaagaaaattaatgttctgacagttgtgatcgcctggagtacttttagacttttagcattcgttttttacctgtttgtggatgtgtgtttgtatgtgcatacgtatgagataggcacatgcatcttctgtatggacaaaggtggggtacctacaggagagcaaaggttaattttgtgcttttagtaaaaacatttaaatacaaagttctttattgggtggaattatatttgatgcaaatatttgatcacttaaaacttttaaaacttctaggtaatttgccacgctttttgactgctcaccaataccctgtaaaaatacgtaattcttcctgtttgtgtaataagatattcatatttgtagttgcattaataatagttatttcttagtccatcagatgttcccgtgtgcctcttttatgccaaattgattgtcatatttcatgttgggaccaagtagtttgcccatggcaaacctaaatttatgacctgctgaggcctctcagaaaactgagcatactagcaagacagctcttcttgaaaaaaaaaatatgtatacacaaatatatacgtatatctatatatacgtatgtatatacacacatgtatattcttccttgattgtgtagctgtccaaaataataacatatatagagggagctgtattcctttatacaaatctgatggctcctgcagcactttttccttctgaaaatatttacattttgctaacctagtttgttactttaaaaatcagttttgatgaaaggagggaaaagcagatggacttgaaaaagatccaagctcctattagaaaaggtatgaaaatctttatagtaaaattttttataaactaaagttgtaccttttaatatgtagtaaactctcatttatttggggttcgctcttggatctcatccatccattgtgttctctttaatgctgcctgccttttgaggcattcactgccctagacaatgccaccagagatagtgggggaaatgccagatgaaaccaactcttgctctcactagttgtcagcttctctggataagtgaccacagaagcaggagtcctcctgcttgggcatcattgggccagttccttctctttaaatcagatttgtaatggctcccaaattccatcacatcacatttaaattgcagacagtgttttgcacatcatgtatctgttttgtcccataatatgctttttactccctgatcccagtttctgctgttgactcttccattcagttttatttattgtgtgttctcacagtgacaccatttgtccttttctgcaacaacctttccagctacttttgccaaattctatttgtcttctccttcaaaacattctcctttgcagttcctcttcatctgtgtagctgctcttttgtctcttaacttaccattcctatagtactttatgcatctctgcttagttctattagttttttggccttgctcttctccttgattttaaaattccttctatagctagagcttttctttctttcattctctcttcctgcagtgttttgcatacatcagaagctaggtacataagttaaatgattgagagttggctgtatttagatttatcactttttaatagggtgagcttgagagttttctttctttctggtttttttttttttttttttttttttttgactaatttcacatgctctaaaaaccttcaaaggtgattatttttctcctggaaactccaggtccattctgtttaaatccctaagaatgtcagaattaaaataacagggctatcccgtaattggaaatatttcttttttcaggatgctatagtcaatttagtaagtgaccaccaaattgttatttgcactaacaaagctcaaaacacgataagtttactcctccatctcagtaataaaaattaagctgtaatcaaccttctaggtttctcttgtcttaaaatgggtattcaaaaatggggatctgtggtgtatgtatggaaacacatactccttaatttacctgttgttggaaactggagaaatgattgtcgggcaaccgtttattttttattgtattttatttggttgagggatttttttataaacagttttacttgtgtcatattttaaaattactaactgccatcacctgctggggtcctttgttaggtcattttcagtgactaatagggataatccaggtaactttgaagagatgagcagggagtgaccaggcagtttttctgcctttagctttgacagttcttaattaagatcattgaagaccagctttctcataaatttctctttttgaaaaaaagaaagcatttgtactaagctcctctgtaagacaacatcttaaatcttaaaagtgttgttatcatgactggtgagagaagaaaacattttgtttttattaaatggagcattatttacaaaaagccattgttgagaattagatcccacatcgtataaatatctattaaccattctaaataaagagaactccagtgttgctatgtgcaagatcctctcttggagcttttttgcatagcaattaaaggtgtgctatttgtcagtagccatttttttgcagtgatttgaagaccaaagttgttttacagctgtgttaccgttaaaggtttttttttttatatgtattaaatcaatttatcactgtttaaagctttgaatatctgcaatctttgccaaggtacttttttatttaaaaaaaaacataactttgtaaatattaccctgtaatattatatatacttaataaaacattttaagctaaaaaaaaaaaaaaaagaaaaaaaaaaaaaaaaaa

SEQ ID NO: 28396 - DNA, 4136 bp, Homo Sapiens
aggaacaggtaccaaggttgggtggaagaagctatatggctggagccagcttcaagggcttgaggagccaccgacaccacttccagaatggctgctatgctgcctctactggattcaggttgcagtcgggaggcggggcaggaggcggggcttgggcgggtatcactccacccctttcacgattgcagaccggccttaggacctggcgcagcacggaatgaggcttcgaggccggctaggggaggccgtcgctcatatccgacgtcaccagttcgcgccggcggtagacgaggacgccaacagcagcggagaaacgtttctctttcctctcagtttgcgcacaccatggcggcccctgcccagcagactactcagcctggcggcgggaagcgcaaaggcaaggctcagtatgtgctggccaagcgcgctcggcgctgcgacgctggcgggccccgtcagctagagcccgggctacagggcatcctcatcacctgcaatatgaacgagcgcaagtgcgtggaggaggcctacagcctcctcaacgaatacggcgacgacatgtatgggccagaaaagtttacagacaaggatcagcagccctctggaagtgagggagaggatgatgatgcggaggctgccttgaagaaagaagttggtgacattaaggcatctacagagatgaggttaagaagattccagtcagtggaaagtggagcaaataacgttgtcttcatcaggacacttgggatagagcctgagaaattggtgcatcatattctccaggatatgtacaaaaccaagaaaaagaagactcgagttattttgcgaatgttacccatctcaggcacatgcaaggcttttttagaagatatgaaaaaatatgcagaaacatttttggaaccctggtttaaagctccaaacaaagggacatttcagattgtgtacaaatctcgaaataacagtcatgtgaatagagaagaagttatcagagaattggcaggaatagtgtgcaccctcaattcagaaaataaagtggatctcaccaatccacagtacacagtggtagtagaaatcatcaaagctgtctgttgcctgagtgttgtgaaagattacatgttgtttagaaaatacaatctccaggaggtggtgaagagccctaaggatccgtcacagcttaactcaaagcagggaaatgggaaagaagctaaactggaatctgcggacaaatcagaccaaaacaacacagcagaaggaaaaaataaccagcaggtaccagagaatactgaggagctggggcagacaaaaccaacgtctaatccacaggtggtaaatgagggaggagccaaacctgaacttgcaagtcaagccacagaaggatccaagtcaaatgaaaatgacttctcataggaagtcatttggtgttggagctgacagtccagtgtcgcaattttggaaggcaagatgtgagagagacgagaaccattttaggcatagaactacagacatttctgaaaaggttggtgatgaagaacttcggtcttctgagtatacttcagtatactagtgcaacaagggacacaaagaaattctgtcttaataaagaaagctacttctcaagggtattatgtggactcagtccaagctctcctgtcccattgtgcattgtctgtgacatgcaacttacaaaactagcaattgtaacaataaatcacagccacttgacaagaaaggatattcattattttcaaatggcttttggactatcaaaaacagtaaggcttttgttcagaaatcacctttagtcaaaaggtttaagaagcaaattatttagtagcagaacttatctcaggaaaggaaaatatgcatggttggtgagaatctaataacattaaaatgctggggcaagatgcagtacaaagttgaagagactttattctcaataagttgatttactgatgatatgtcatatgatgcaaaaaaggttttgtgtcattaactgaaaagtagcagcttctctatccaggatgatgagtcaacaggtttcactaatatttgtcatgctgtagcatttgtaagatttgtaaatgatgaaattcaaagaaaactttttctattgctaggagcctgccagaacaaaggccaatatataatgttgtgacatcatatctgataaccagaggtctggtatctacactcctggtgccccatcagtggttgtctccataagtcattttgcgttattaaaaaaaaaaaaagaaatcctgatgttgacattatagcacactgctttctccacagagatgctgatatcaaaaacttgaagatacagtgaagttctgaataatgttacaaaactggttacctgtatcaaagacccatttatgcaaaaatgttaaaaaaaaaaaaaaacacccaaaacaaaaacctggacagacagcacataaacctcctgcaccatacagacatccagtggcttctcagaggaagcgttctctacaggatatttgaattgaaaggtgaattgccagagtacttacaataaaacagccagcttttgctgagtgctttggaaatgaaaaatgactacagaaagtagcctattttgcagacgtttttcatcacatgaacaaatggacaagtctctgaaaggttctggggaaaaaaatttttcttaaagcgacaagactcttagatctaaaaggaaactgacttgccaccttgccagaggaattcttgaaatgtttctgcagccacttggccttgaaaataaagggtgcaactctcaagtcttgttctaacccggctggaggaaccacaagacccaatgaaatagcattttctctccttttcccagcactagtatataacctatgaggaacccttgtctctgaatccgctcagcttgaaattttgtctctgaaggaagagaatgaactcagccctagtctgacagtcctagatttctgtgaaataagagtattcttcaacttagtgctcacactcacataccatgagggttctctgcaggggtttaggggtttcctgaatttgaaagttttttcaaggcctctttttgggtaaaacaattgaaaaggcagacaccaacaaagtctgcaaaattaactgtccagattaagaatattaaggagctgtaaaattagcttgtagaaatggacttatccttaagttttaaaaagttaggaaatcctaaaaatgttaggcttcctgcacaagtggctatgttcatttaatggctagtgaacatgggaatgtatttttatcctcctagctggtggttctgtttggtaaaccagactagaatgatttgagaggggcaaagagaataggcaggaccttccttctatagctttacatatttagaatgttaatacttaatgacattgaagttaccttgcaatgattgataagaggattattaatatcagttaggggaatagggaggataggattttggtgccttcttcagcagacttgctccaagacaaagattctattttgatagtgcaagacaaaaggactcggaagaaaattggccatatgcctacagagcatacaactctgtggaactaaattgtttttactttgtgaaagctgctattttacggaaagattttgattatacagtttgtttttaagttgtcttttatatttatttgtatttggtaagaatcggttgttacacaagctgttctttcccagttacaaaatcctgtgttcggttgtaacctgaactcattaaaagacttgttttcaggtttatcaactgtttattttcactgacatttgagcatgttattttataaatgacgagattccagggtaggaagtgctgtttattccccttttgttttttcttttaaaaaattacgtcagttaaaaaaataaaaaaactgcagtcttatggtttagaaaacttgtttagctccatagaggaaagaatgttaaactttgtattttaaaacatgattctctgaggttaaacttggttttcaaatgttatttttacttgtattttgcttttggtacggccagaaatcgagcttgttttttcatagttcctgatattttcagaaaaatcaaaataaatttgttccctaaaaaaaaaaaaaaaaaaa

SEQ ID NO: 28397 - DNA, 5795 bp, Homo Sapiens
cacacacacacacacacaccacacttgtgctttcaagacatcgaaacggaggctatttccctggggaaagaaatcctgcctggcgagatctccccattggttgtttacccggagaaatctacatgtttaagggggatggtgcatccataatcagtctgtccctataggacttgggtcttggcgacctttttgtgacctctcccgccagaggaggctgctgtcactttaaaaatttaaaagaggagcccgtctggcttccgatcagatcactctgggcggcgggagatagctccctttctccctcgccccgggttctttctggatggccgagcagatcctctttaaagagacagttcatgaaatagaaacccagcggctgagcttggagttgcgaaaggggacgatcccgtgagggtccaggacccgcgaaggcgctgcggaggatctgaaagggggatagagctcccctcgcctccccaggccccccaccttttcaaactctcctcctcctgcttgttttcccccattggaactgggaaggagaagtagaagttttagtgggtttcagataactttcattacacatcgggctgataagagcaagagaaagtgagaaaagagggaggtgatgtgaaccagaaggaatagctccgagctcatttaggaagggggaaaaagccaaaacacaccaaacccgggtcacccagacgaaagaagacttcatttcttgtattaaaaatacactgttggcggacaataaatccgaaacgcgtggtcctggagagcagatcctagagacggacaaagttgtcagagacccatttggaaatcgagacgcgaggcttttaaaaaattattattattatttttaaacatctcgaagtgttgctcgggatcgtttgaaaggattttcgtgcaggagcgttgggggctgctgattattttattttgtttattttgattcttctgtgattgcctattattgctgagttgaggccatagaaatctaaagatcttagacgaattttacaatgtgaagttctgcatagatgccagtcaaccagatgttggaagccggctcaagtacattagattcgctggctgttatgatcagcacaaccttgttgcatgccagataaatgatcagatattctatagagtagttgcagacattgcgccgggagaggagcttctgctgttcatgaagagcgaagactatccccatgaaactatggcgccggatatccacgaagaacggcgatatcgctgcgaagactgtgaccagctctttgaatctaaggctgaactagcagatcaccaaaagtttccatgcagtactcctcactcagcattttcaatggttgaagaggactttcagcaaaaactcgaaagcgagaatgatctccaagagatacacacgatccaggagtgtaaggaatgtgaccaagtttttcctgatttgcaaagcctggagaaacacatgctgtcacatactgaagagagggaatacaagtgtgatcagtgtcccaaggcatttaactggaagtccaatttaattcgccaccagatgtcacatgacagtggaaagcactatgaatgtgaaaactgtgccaaggttttcacggaccctagcaaccttcagcggcacattcgctctcagcatgtcggtgcccgggcccatgcatgcccggagtgtggcaaaacgtttgccacttcgtcgggccccaaacaacacaagcacatccacagcagtgtgaagccctttatctgtgaggtctgccataaatcctatactcagttttcaaacctttgccgtcataagcgcatgcatgctgattgcagaacccaaatcaagtgcaaagactgtggacaaatgttcagcactacgtcttccttaaataaacacaggaggttttgtgagggcaagaaccattttgcggcaggtggattttttggccaaggcatttcacttcctggaaccccagctatggataaaacgtccatggttaatatgagtcatgccaacccgggccttgctgactattttggcgccaataggcatcctgctggtcttacctttccaacagctcctggattttcttttagcttccctggtctgtttccttccggcttgtaccacaggcctcctttgatacctgctagttctcctgttaaaggactatcaagtactgaacagacaaacaaaagtcaaagtcccctcatgacacatcctcagatactgccagctacacaggatattttgaaggcactatctaaacacccatctgtaggggacaataagccagtggagctccagcccgagaggtcctctgaagagaggccctttgagaaaatcagtgaccagtcagagagtagtgaccttgatgatgtcagtacaccaagtggcagtgacctggaaacaacctcgggctctgatctggaaagtgacattgaaagtgataaagagaaatttaaagaaaatggtaaaatgttcaaagacaaagtaagccctcttcagaatctggcttcaataaataataagaaagaatacagcaatcattccattttctcaccatctttagaggagcagactgcggtgtcaggagctgtgaatgattctataaaggccattgcttctattgctgaaaaatactttggttcaacaggactggtggggctgcaagacaaaaaagttggagctttaccttacccttccatgtttcccctcccattttttccagcattctctcaatcaatgtacccatttcctgatagagacttgagatcgttacctttgaaaatggaaccccaatcaccaggtgaagtaaggaaactgcagaagggcagctctgagtccccctttgatctcaccactaagcgaaaggatgagaagcccttgactccagtcccctccaagcctccagtgacacctgccacaagccaagaccagcccctggatctaagtatgggcagtaggagtagagccagtgggacaaagctgactgagcctcgaaaaaaccacgtgtttgggggaaaaaaaggaagcaacgtcgaatcaagacctgcttcagatggttccttgcagcatgcaagacccactcctttctttatggaccctatttacagagtagagaaaagaaaactaactgacccacttgaagctttaaaagagaaatacttgaggccttctccaggattcttgtttcacccacaaatgtcagctattgaaaacatggcagaaaagctagagagcttcagtgccctgaaacctgaggccagtgagctcttacagtcagtgccctctatgttcaacttcagggcgcctcccaatgccctgccagagaaccttctgcggaagggaaaggagcgctatacctgcagatactgtggcaagatttttccaaggtctgcaaacctaacacggcacttgagaacccacacaggagagcagccttacagatgcaaatactgtgacagatcatttagcatatcttctaacttgcaaaggcatgttcgcaacatccacaataaagagaagccatttaagtgtcacttatgtgataggtgttttggtcaacaaaccaatttagacagacacctaaagaaacatgagaatgggaacatgtccggtacagcaacatcgtcgcctcattctgaactggaaagtacaggtgcgattctggatgacaaagaagatgcttacttcacagaaattcgaaatttcattgggaacagcaaccatggcagccaatctcccaggaatgtggaggagagaatgaatggcagtcattttaaagatgaaaaggctttggtgaccagtcaaaattcagacttgctggatgatgaagaagttgaagatgaggtgttgttagatgaggaggatgaagacaatgatattactggaaaaacaggaaaggaaccagtgacaagtaatttacatgaaggaaaccctgaggatgactatgaagaaaccagtgccctggagatgagttgcaagacatccccagtgaggtataaagaggaagaatataaaagtggactttctgctctagatcatataaggcacttcacagatagcctcaaaatgaggaaaatggaagataatcaatattctgaagctgagctgtcttcttttagtacttcccatgtgccagaggaacttaagcagccgttacacagaaagtccaaatcgcaggcatatgctatgatgccgtcactgtctgacaaggagtccctccattctacatcccacagttcttccaacgtgtggcacagtatggccagggctgcggcggaatccagtgctatccagtccataagccacgtatgacgttatcaaggttgaccagagtgggaccaagtccaacagtagcatggctctttcatataggactatttacaagactgctgagcagaatgccttataaacctgcagggtcactcatctaaagtctagtgaccttaaactgaatgatttaaaaaagaaaagaaagaaaaaagaaactatttattctcgatattttgttttgcacagcaaaggcagctgctgacttctggaagatcaatcaatgcgacttaaagtgattcagtgaaaacaaaaaacttggtgggctgaaggcatcttccagtttaccccaccttagagtatgggtgggtgagaagggcagttgagatggcagcattgatatgaatgaacactccatagaaactgaattctcttttgtacaagatcacctgacatgattgggaacagttgcttttaattacagatttaatttttttcttcgttaaagttttatgtaatttaaccctttgaagacagaagtagttggatgaaatgcacagtcaattattatagaaactgataacagggagtacttgttcccccttttgccttcttaagtacattgtttaaaactagggaaaaagggtatgtatatattgtaaactatggatgttaacactcaaagaggttaagtcagtgaagtaacctattcatcaccagtaccgctgtaccactaataaattgtttgccaaatccttgtaataacatcttaattttagacaatcatgtcactgtttttaatgtttatttttttgtgtgtgttgcgtgtatcatgtatttatttgttggcaaactattgtttgttgattaaaatagcactgttccagtcagccactactttatgacgtctgaggcacacccctttccgaatttcaaggaccaaggtgacccgacctgtgtatgagagtgccaaatggtgtttggcttttcttaacattcctttttgtttgtttgttttgttttccttcttaatgaactaaatacgaatagatgcaacttagtttttgtaatactgaaatcgattcgattgtataaacgattataatttctttcatggaagcatgattcttctgattaaaaactgtactccatattttatgctggttgtctgcaagcttgtgcgatgttatgttcatgttaatcctatttgtaaaatgaagtgttcccaaccttatgttaaaagagataagtaaataacagactgtattcagttattttgccctttattgaggaaccagatttgttttctttttgtttgtaatctcattttgaaataatcagcaagttgaggtactttcttcaaatgctttgtacaatataaactgttatgcctttcagtgcattactatgggaggagcaactaaaaaataaagacttacaaaaaggaaaaaaaaaaaaaaaaaaaaaaaaaaaaaaaaaaaaaaaaaaaagaaaaaaaaaaaaaaaaaaa

SEQ ID NO: 28398 - DNA, 3666 bp, Homo Sapiens
aggcaggatggttagggacctcctttctcagaactgaccgggaagggatggtggggaccaggccatttggggcctcacagatcagggctgatgagtttggctccatttatgcttgactcggtttatttgagggtgggagcactcctgtttctcagaattccctgtgcctaaccccaggcgtggcagataatactcgctcagtaaatgtttattgaacaaatgattgattgagagtgatggaacacacagaactgtgggtctgggagcaggagcgcgaggcctgtctctgaatgcagcctggacaatgtgcccttctcctcatccgccaggtgagaccagcaggagaaagccatctcagcagtggttggtggttgtatttacagttaaattttattttgagatgctcatagtttcacatgcagttgaaagaatacagagagatcctgtgtccccttctcccagctgccccctgggtaacatctggtgaaattcaacgcactctcagcaccaggatcggggcactgatactgccaggacacagaacatcaggacggctccgtccccgtgcaaatccgtcatgtcggccttttatagtcccacacacaccgctaatctgttctctatttttgtgattttgtatttcaagggtgttgtgtgcatggggtcatggagtgagtggccctttggggttggctgttttccttcagtgtgattccctagagcgttctcagtcccgccagtcaagtttcttccttttgctgctgagtggtattttgcggcctggctggcctgcagcttgtttaaccattcacctgttaaaagacacctgggctgcgtccagattttagttgttacaaataaatgttgctctcaacagtcctgagcaggtttttgttgaatataagttttcatttctctgatataaatgcccaagagtacaacttctgggtcatagggtagttacgtattcagctttattaaaaagtgcctgttttccagagtggccatacagtggtttttgtttgttcttttaaatgacttaacaatggaaggaaagacgcttctgcatggcctggcatagaaagcccatggagagccgccctgtgggtggggaagcgggtgacgggagccccactgcttaccagaaacccgagtgaaactgcgtctttccagtcccaagattctccttttttgctaaaggcatcagaagagatgaaagcatttctaccacccacatttcggggacactcctagcttttactttagagttgggagagaggtttggttttcattgtcatttaaatcctgttgggtttcagcagagcctgatctttagggccctgggtgcagctgttgtctggagatgcagatcactgtctgctgaaaagagccctcctgctggggttagggatctcctgattgaggcatggatccaagggcttctttctttgttctctgattccctgaggctcttccttgtgtgtgtggtgcgtgtgcactcgtgtgagcgcaccaggaactatgacagcaatcaacgggtatgactgggggtggggagcagaggcagcatggccaggaatctatactcgagctactaagaggaaggaagtcgcagcaaaaatagcctgggtggggtggtagaaaatattaaggggaaaatgagatgactggggtggcgttgaagaagagctgcttaaagagaaacagggacacacgctgggtaaggaatcgcatgctgttgaaactgacggtgtggaaggaaagtgaggtggcggcggctgggctgtggtagaggaagccgatcaccagtgagtgaaaagggaactagggtacccacgcgtttgtgttttttatttaaactttggctaagttttgctaggagcgttttgcctttttttctcagaccttctactcctgtcgttctcccctaagttctgggcatgtggcttcttctctacctaccagggtagcctgtcattgctttaaaggacaaaatgaaatccctgatgggcaaaatatgtcccccctcttcccccagcttttggtcggctttgctcacccaccaacagctaggagctggaaggctcagaagagctggggtgggcatgggagagacagaggaaccccggtggctggaaacacagttccttcccagggtctcttcagcttgctggttggacctcttagcctgcttatgaagcctgaattgacatcatgccaactggtctcctgctgataagtgattccttaacttcctcgggagcagcagaaacttgttttgaaaaaaatcagattctaaatctttacagctgtttacttctgcaagcacaatggccgtagtaaggaattcaagtcacagcgcagccgtggcagggaaggctctgcatggagtcacaggacaaagcctgtcctggaaacgtgctggaaggaagtcggcctcattctttacgacgggcagcagctccaaatgagaaaccaaggggcttggctctgggtcagtagcatctgcctggcatgcggtgccagctgtggagaccagtgaggtggcagcagctgcactgggctcctggggtgtgcgtggggacctcaggggtttaggagctgatatacttttggttctcatcatcttgtgtgttccttgcagacacagaatgttcagcttaacaaagaaatgacacttgccagcaaccggagcctggcagaaggaaaccttttgtaccagccccagctggacacgttgaaagcacgcttgacccagaaataccaggaactccaggttctctttgaagcctatcagataaagaagaccaaattaggtaactttttaagggtgatcattcgagaataaagagttgagagaaggacacattttcaagctattgccctaccaggaaagaaatattacggaaaaatttcaggttaagatagcgactctactgcaatgaacaaatagcttatgtatattatttatttatttttagagacagggtcttgctctgtcagactggagtgcagtggcgcaaccatggctcagcacgacctcctgggctcaggtgatcctcctgtctcagcctcctgagtggctgggaccacaggtgtgcactaccccaagcaggctagtttttcatttttttgcggagaggttgtcttgctatgttgcccaggctggtcttgaactcaagccatcctcctgcctttgcctcacaaagtgctgctattacagacatgagccactgtattggactagtttatgtatggaatatggagggcccccagacctgcggcctctctgcacttgcggttcgagagggcagggtgtatagcaggactgccccctcctcccagtggccctgactggtggcggtgactgctgaggtcagcccaggtccacacgcacctccagggtctgcagtgtgaagcaggttgcagaaacgtgggtacctcggggcagttaccagaaaaggggctggagattaggaggaagccagccagtttagcagtcaccagtttagaagaggagacttaaccactttttaaattcaagaccccaccttctctaaacagcatagaaaaagctttctgaattatgatattaaacagatgtcttatgacgtttgcccgtttgtcttatgctgtttgttaatggtaaaaaaaaaaaaaaaaaaa

SEQ ID NO: 28399 - DNA, 5604 bp, Homo Sapiens
gattactcgccatttcaaaatgctgccgaggccctaggatctgtgactgccacccctccccccacccgggctcggcgggggagcgactcatggagctgccgtaagttttaccaacagactgcagtttcttcactaccaaaatgacatcattttccacctctgctcagtgttcaacatctgacagtgcttgcaggatctctcctggacaaatcaatcaggtacgaccaaaactgccgcttttgaagattttgcatgcagcaggtgcgcaaggtgaaatgttcactgttaaagaggtcatgcactatttaggtcagtacataatggtgaagcaactttatgatcagcaggagcagcatatggtatattgtggtggagatcttttgggagaactactgggacgtcagagcttctccgtgaaagacccaagccctctctatgatatgctaagaaagaatcttgtcactttagccactgctactacaggatcacagtatggatattccaagtcaagaccaactgaagcaaagtgcagaggaaagttccacttccagaaaaagaactacagaagacgatatccccacactgcctacctcagagcataaatgcatacattctagagaagatgaagacttaattgaaaatttagcccaagatgaaacatctaggctggaccttggatttgaggagtgggatgtagctggcctgccttggtggtttttaggaaacttgagaagcaactatacacctagaagtaatggctcaactgatttacagacaaatcaggatgtgggtactgccattgtttcagatactacagatgacttgtggtttttgaatgagtcagtatcagagcagttaggtgttggaataaaagttgaagctgctgatactgaacaaacaagtgaagaagtagggaaagtaagtgacaaaaaggtgattgaagtggaaaaaaatgatgacctggaggactctaagtccttaagtgatgataccgatgtagaggttacctctgaggatgagtggcagtgtactgaatgcaagaaatttaactctccaagcaagaggtactgttttcgttgttgggccttgaggaaggattggtattcagattgttcaaagttaacccattctctctccacgtctgatatcactgccatacctgaaaaggaaaatgaaggaaatgatgtccctgattgtcgaagaaccatttcggctcctgtcgttagacctaaagatgcgtatataaagaaagaaaactccaaactttttgatccctgcaactcagtggaattcttggatttggctcacagttctgaaagccaagagaccatctcaagcatgggagaacagttagataacctttctgaacagagaacagatacagaaaacatggaggattgccagaatctcttgaagccatgtagcttatgtgagaaaagaccacgagacgggaacattattcatggaaggacgggccatcttgtcacttgttttcactgtgccagaagactaaagaaggctggggcttcatgccctatttgcaagaaagagattcagctggttattaaggtttttatagcataatggtagtacgaacataaaaatgcatttattcagttcacttaccacattatttgaaaatcaatcctttatttaattttatttccaacctgtcagagaatgttcttaggcatcaaaatccaaggtagctgtaagaaaaatactggagctaacaatgaagaacagaagtaatctgattagtcaaattattaagtgccatggattactttatgcagcagtcaggtacatagttaggtgaacccaaaagaaaaactcttgaaaacaagagatttcttccatgcacatttacaatattgaggtataattaacatgataaagtgtttccttctaacgagttgtagaaatctgagtaaccacccaaaaaagcaatagaatgtttctgtcaccccaaaacactcccttctgcccctcttcagacagtccttcagctatttcatggctctcaccctagtttttttttttttgcacttttttttttccgggggtataggggaggtgtggggcgacagggtctgtcttgttctgtctcccaggctgaagtgcagtgcagtggtatgatcatggctcactgcagccttggtttcctgggcataagtggtcttcccacttcagcctcctgagtagctgagactatagactagcataaccacactggctaatttttgtggagatgaagtctcactatgttgcccaggctggtctcgaactcctgggctcagacaatcctcccgcctcagccttccaaattgctgggattatagtcatgaggcacctagtctggcccttttgcaagactttaatctgaaatctaaatttttaaaatttaagtacttacaaaggatatactatccaacatattgcatattatatatgtgctttaaagtttttttttttttgagagacggtctcactttgtcatccaagctggagtgcagtggtgcaaacacggcccacctcctgggctcaagtgatcctccagcctcagcttccctcacaggcattcactatcactcccagctaattaaaataatttgtagacggtgtctcgttatgttgcccaggctggtctcgaactcctgggtttaagtgattcccccgcctcagcctcccaaagtgttgggcttacagccttgagccactatgcttggctcaaagatatttttatgaaagccctgggactatagatttagctgattaaatttatggaaaaagtcctgtcatataaactggcaaagtccgttcttaatttaattagccaaatcagacttaacttccgtcagaacatgtcttggttttaattcagataaacacacaaacatacttctctggcacagccttcagaagcatcagtttttgttttgttttgttttgttttttgagacagggtcttgctctgttgcccaggctggagtgcactggcacaatcacagttcactgcagcctcgacctcccagatccaagcaatcctcccacctaagcctcccaagtagctgggtctataggcgcgtgccaccaccatgcccagctgaattttgtattttttgtacagacagcattttgccatgttgcccaggctggtcccaaacttctagcctcaagcaaccctcctgcctcagcctctcaaagtgctaggattgcagtcctgagctactgccccctaccctctttgcgtcttaggagtcatttagattttttttgatccttttgtttagtgcctctggagctgcttacaccaaggcaatacgccttgatatactggatggttgagaggcagcctcttttttttttttttttttttttttggaggatagggagtatggctgttgtgaaaagggaggtaaagagaaatggtagatctgaagaggcctcatcagagcacatattttaggacaacacatatggaaattggacatctttaagttggtttccatagagctatgcatgtatccttacccccatgggaaaatgttggtgtgttctcaagggtatgcatgtgtcattttgaagaccaaggccctagaattgtcaaacttaaggatcataaaaatcatgagggttgcttgttaaaaatgtccaaacgtgcagagactgatctttgagatctggaccaggaatttgcatttgaacaagtgttcctggaatctctatgcaagttttatacagaacatacttttggaatccttgccctagacaggggtgtccaatcttttggcttccctggtccacaatggaagaagaattgtcttggaccacacataaaatacactaacactaacaatagctgatgagctaaaaaaaaaaaaaaaaaaaatcgtggaccgggcgtagtggctcgcgcctggtctcgaactcctgacctcatgatccacacacctcggcctcccggggtcctgcgattgcaggcgtgagctaccgcacccagccaagttgtaatttttaataaaacttaagaagtaagcattttacttatgtttataggtatttgatcctaaatttgacacatcattgcccatgaaagaatcctcttaggctgctcagcctcactcttcctgcttgcccaccggggtttttcactgcttctgttagcactaagtacttagacgatcctaagatatgtgcttgagccgaatttcatctttacttgtaggaaactttaaactatttcttttcttttctttttttttttttttttttatttgagatggagttttgctcttgtcgcccaggctggagtgcagtggagtgatctcggctcactgcaacctctgcctcccgggttcaaatgattctcctgcctcagcctcccaagtagctgggattacaggtgtgcaccaccatgtctggctaattttgtatttttagtagagatggtttcaccatgttggtcaggctggtctcgaactcctgacctcaggtcatccacccacctcagcctcgcaaagtgctgagattacaggcatgagccacagcgcccagcttaaactattttcttggtctgtttttgattttcttttttccttgccactgcggtacagattttttttactcactgccactaaactaaagcaaggcatagtttatatgtgaagtgttcagagtttactgctataaggaaacttccaaatactgacattcaccttttagctgtagttattgggaccatgtgttctggttttctggagactgccaaattgctcccatttttctgcatcccacctggtttctttctgcatgtcccctttcactttcaaacctcttcatttggatgttaaattatatggtcacctagttataggtaagccttgttcgagttgatatcttgattgtgaggaaggatctgtgtcattggagcttgtttctgctgcaacgtgctgtagactatgaataatgaaatcacaccacattaccatcagatttcttgttttagttgtcaaattaatatttatgattgttatcttgggcgaaaagttcagagcagagatgacaaatcattagaacaacgatgaatttcagtattacggctaaaaagttcttctgtctgaatattaactcactctccttccagtgtacttcacagtaattggtatgcttttttatttaatgcttaaatcaaactttataaaaatcttagaccagatctttaatatggtatgccatttccccagtctaccaatggaatagtatgggtttctaatcctaggcttgtacaatggattggagttgagccatgccagcctccacactgccactaacttctgtaatgtaagattgagtcactgccaagcatttgaaatatgcagttgtgttttaattataatttatgtatagttagatgtatgtagtgcattgtgtggtattatttggtttgtaagaatttatttttaagggtcaaggtcatttgtaacattttgtgtgtgtcaattcaatgcaatgttggctgccttttgaagtctttgatatattggtgaatattcttctgatctataatacaaagctatgtaatgttaaaaaaaaaaaaaaaaa

SEQ ID NO: 28400 - DNA, 2396 bp, Homo Sapiens
ggttgagaaatgaggcaaggaatgtagtggctcaggagatcctccctccttggcctcccaaagtgttgggataacaaggataacaggagtgagccgccatgcctggctgagccagtaatttttactctcttaaaaactaggttattcctaatgattctgcctttgagttgaaattactgtgtgtgtgtgtgtgtgcgtgtgcacacgtgcatgcatccaagtctttttataaatgtgctgctccctgtttttagtttataagagaacattgctaatacttcttactgactttcttgtatttccttactagtttttccagaaaggaggagtcaaggaagcccttagtgaacgagaactcttcaatgctgtttcaggcttaaacatcacagcagataatgaagctgattttttagctgagatagaagctttggagaaaatgaatgaagatcacgttcagaagaatggaaggaaagctgcttcatttttgaaagatgatggagacccaccactactatatgatgaatagcactaatacccactgcttcagtgttaacacagcagtgattgtcagctgccaatagcaaatgaagttatgggtgacttgaaataccaaaacctgaggagtgggcaatggtgcttctgtgcttttcccccttgtaacccatgtgccagatgtgtggaatttttagctcagcattgagagaataaaatgtcactacctctcatcttatgaacaggataatataattctttaacagctataggttatctggctgaagtagacctaattttatgcgacttgtggtgtaaaatgtcttgatgataatttttaaaacttgggtaacacttccaaatatgggaggaaaggacagatgtgtttacaagggaggattttacaacatacttgctttattcacctccctgttttgtgttgcgtctttccttgaatattttattggcccagagttagcctttctcaattatgtttccagactgtggccgtgattctaaaggaaaatgtgtgctctttagtgggtagaacaaatggaaatttggtttcagaatggctgacagaaatcgacataagtcatgtaatttttgttgatatatcatgaaaatgaacagaattctttttccatacttatgtctaagaaaaggcatcataggtttctgaaagagataactatataacggctttttaactatccagtcaactttcagcttttctacatttaggtaaaatggttaggatataactcatggtgtggctaatctacatttatcaataaaatgtgaattatctgaaaggacagaatataagatttaaccatgtttgacgtattttaatttggttaatgaagcaaaattcagtttatatttcactagaactgtgtacttgattgattttcagagaaatatcacaaattagaaatattaaatctaaggatgaaaggtatatataaaacaatttgggggccaggcacgatggctcaaacctgtaatcccagcactttgggagaccaaggcgggtggatcacttgaggtcaggagttcaagaccagcctgggcaacatggcgaaaccctgtctctactaaaaatacaaaaattagccgggtgtggtggcacttctctgtaatctcagcttctcaggaggctgagacaggagaatcgcttgaacccgggaggcagaggttgcagtgagctgagatcatgccactgcactccggcctaggtgacagagggaaactccatctccaggaaaaaaaaaaaacccaatttggataccaaattaatcaactaatttgagctatctggccttactcttagtagtttttagtacgtgctggacaccacctttaaaaagcaatcactgtgctagaaaagtatattggctttgttaggattaaagttcattaacttcaatgtaatcatgcctcctattactgaagtcagattggaaccactaaagatccaaactttctgtctggtaatagaaagtaaaaatctagacatcatttacatttgagaaagctgtttttaacattattttaaaatgccaaatatgttctttctagaaaaatatttatttttgtttttgttggatagcttttaattacatttcagagaggtgtaattttgggtagatgctcattacatttttgaaaggtttatgattccaaaataaagatttatatgactggtgatactggctttacagaaatttcagagaactaatttttaaaatctttagcatttaaaactttttttgttttgttttctgacatattctgacaaagagcagcaaaccactgctgtgtggcattcttggagtgtgctgtgaatgtgctttttaagaaattaaaaagagatcattttaaaaaaaaaaaaaaaaaaa

SEQ ID NO: 28401 - DNA, 5642 bp, Homo Sapiens
aagcagtggggagctgtggcactcagactcccccttctcaccccgcccatgtggcacctggccatgcatgagaggggcatgtgggcacacctgcggagggggcgtccgggcgtgagtgagaaggctaacctgtcaggtggggttagaatgtgggggtgtcggtctggaggaaactgctctctcctcaccccttgtttgacccacagaaatgggataatttcctgaccctgtttaggacttccagaccagggcaagaggagcctcagagccttttgttagaaaatatgtgtcttctcagaacctgaagtgagaaggaagagccctgactccagctttggaaccaatccacgctgctgtgttcctctggggagtttgggatcatagcaacagggtggagggagaattcaactcttgctcacctgctgctctgggctgtgcgccactgatgccaaggcgttagccacgttggcaaggatggggactgcctcctgctcagcccctcgcagtctctgtcaggcttgttttttggggtgacgctagaaggttgtgtctcctccttccacagcctcagtgattcctaacccttttgacttcactttttgaaatgggatcacagagcaagttgttgaaaactaggcctggagtcctgtgaaaagcttttctcactgctggcagccaggccctgtagctgtggagctggaaatgaacttccaccaggctgtgtccttggggagggaagctgcaggagtgcggctggctactccaagaccctggcatgaggctgaggacaacttacaagggcttcaccgaagcagtggacctttattttgaccacctgatgtccagggtggtgccactccagtacaagcgtgggggacctatcattgccgtgcaggtggagaatgaatatggttcctataataaagaccccgcatacatgccctacgtcaagaaggcactggaggaccgtggcattgtggaactgctcctgacttcagacaacaaggatgggctgagcaaggggattgtccagggagtgctcctggaatccctacaggcctaagcagttgcctgctagcagcacccctggcctgcattgctgcagtagcattttcactgttgactccataatgtgttctcagcatatcagcctccgtgtgcctctgaaaatgtcgtccagattaccctatcctgctgaacgccaggcatctctgtcacactcagagtgaagcgcaggttctgggaatgacctcgaaaggcctctccacttggcctccaggacctagctgagctcacctcctgctccttccctttgctcacaccgtttcaccctctttactgttcctccaacatccagatccccagcctggggggctttgctcttcttccagagagctacatggctgttctccgaagttagcgaggctttctgtagcaccacacttgaaattgaacttcttccttcgtggggctcactcaatccttctccctgctttcttttcgccctctcaccttccagaccgagctgctggaagatctctctatatccctgcagcagcgcctagctggcacccagggagtgaaggtccatgaatggcgaggaaaaggcttttgtccccaggcagagtcagtcaaggacccagacctcgtgtctccggcatggggaggaccagcagtgatccccacggcttccacgcggtggcgccgtctccccacggctgcttccaaggcctgctccgggctccgcagggctgtggctgtgttgggagactcctggtgctggagcacgttttagcgcttggcggcctcccggtttcaggccttgcaaggaagcccgggagccgccactgcttttccctgtggccctcccacctccaggcacccacctgcgtgcccctgttgccacctgctgcccggaataacttcttttttttttttttaattaaaaaaattaaatggtctaaaagtgaaataatcgaaaatgttggtagagaaatacagtgttgcctactcttcgttacattctccagaaatgaccattttcaactctttgactttttctttggatattttccttcttatttccaaatactgtgaacatacagccctgcatcgtttgctttaaaagttctgcctattggccgggcagtggctcgggcctgtcatcccagcgctgtgggaggccgaggcgggcggatcatgaggtcaggagatcgagaccggcctgcccagcgtggcgaaaccctgtctctactgaaaatacaaaaaattagccgggtgtggtggcgggcacctgtggtcccagctactcgggagctgaggcgggagaatccgtgaacccgggtggcggagtttgcagtgagccgagattgcgccactgcactccagcctggacgacagagcaagactccgtctcaaaaaaaaaaaacaaaaaccaaaaaacattatccgagcgtggtggcgggtgcctgtaatcccagctacttgggaggctgaggcgggagaattgcttgaatgtgagaggcagaggttgcagtgagccccgatggtacccctgcactctagcctgggtgacaagagcaaaactccgttaaaaaaaaaaattctgcctattgacttcttgttccagtaggtgatgagtgttctttcctgccagcatggctgttcagccctgataggcgccagcgtgggcctcgcggatgtgtatgacaacggttcactgcaggcacctgccacgtgggtgatgccctgcacagtatctgtgaattctcagggtgccagccggctctgcagtgtgcttagttttcagtccttggccaccatcaacttgcagtcaacacacgagctgcagctactgaccacctttctcttcaacgtccaggaggccacatgtggcaggagaactggtgtgcaggcgaatttggccctcacctatgccccacctccaaagacctctaaggcagtgggggactcagcccaagatggtgatggagtactggacggggtggtttgactcgtggggaggccctcacaatatcttggattcttctgaggttttgaaaaccgtgtctgccattgtggacgccggctcctccatcaacctctacatgttccacggaggcaccaactttggcttcatgaatggagccatgcacttccatgactacaagtcagatgtcaccagctatgactatgatgctgtgctgacagaagccggcgattacacggccaagtacatgaagcttcgagacttcttcggctccatctcaggcatccctctccctcccccacctgaccttcttcccaagatgccgtatgagcccttaacgccagtcttgtacctgtctctgtgggacgccctcaagtacctgggggagccaatcaagtctgaaaagcccatcaacatggagaacctgccagtcaatgggggaaatggacagtccttcgggtacattctctatgagaccagcatcacctcgtctggcatcctcagtggccacgtgcatgatcgggggcaggtgtttgtgaacacagtatccataggattcttggactacaagacaacgaagattgctgtccccctgatccagggttacaccgtgctgaggatcttggtggagaatcgtgggcgagtcaactatggggagaatattgatgaccagcgcaaaggccggactgcagtggtgcaatctcggctcactgcatgctccacctcccgggttcatgccattctcctgcctcagcctcccgagtagctgggactacaggcgcccgccaccgtgcccaaatttagcccttcctttttaaaaaaaatctagctaaatgtgggtggtttcaggcttaattggaaatctctatctgaatgattcacccctgaaaaacttcagaatctatagcctggatatgaagaagagcttctttcagaggttcggcctggacaaatggagttccctcccagaaacacccacattacctgctttcttcttgggtagcttgtccatcagctccaccccttgtgacacctttctgaagctggagggctgggagaagggggttgtattcatcaatggccagaaccttggacgttactggaacattggaccccagaagacgctttacctcccaggtccctggttgagcagcggaatcaaccaggtcatcgtttttgaggagacgatggcgggccctgcattacagttcacggaaaccccccacctgggcaggaaccagtacattaagtgagcggtggcaccccctcctgctggtgccagtgggagactgccgcctcctcttgacctgaagcctggtggctgctgccccacccctcactgcaaaagcatctccttaagtagcaacctcagggactgggggctacagtctgcccctgtctcagctcaaaaccctaagcctgcagggaaaggtgggatggctctgggcctggctttgttgatgatggctttcctacagccctgctcttgtgccgaggctgtcgggctgtctctagggtgggagcagctaatcagatcgcccagcctttggccctcagaaaaagtgctgaaacgtgcccttgcaccggacgtcacagccctgcgagcatctgctggactcaggcgtgctctttgctggttcctgggaggcttggccacatccctcatggccccattttatccccgaaatcctgggtgtgtcaccagtgtagagggtggggaaggggtgtctcacctgagctgactttgttcttccttcacaaccttctgagccttctttgggattctggaaggaactcggcgtgagaaacatgtgacttcccctttcccttcccactcgctgcttcccacagggtgacaggctgggctggagaaacagaaatcctcaccctgcgtcttcccaagttagcaggtgtctctggtgttcagtgaggaggacatgtgagtcctggcagaagccatggcccatgtctgcacatccagggaggaggacagaaggcccagctcacatgtgagtcctggcagaagccatggcccatgtctgcacatccagggaggaggacagaaggcccagctcacatgtgagtcctggcagaagccatggcccatgtctgcacatccagggaggaggacagaaggcccagctcacatgtgagtcctggcagaagccatggcccatgtctgcacatccagggaggaggacagaaggcccagctcacatagctgtgtatgagctggttccgtcagaaagtgatggaatggaagggaaccttcctgcaaatcctcctgtaaggtggagaagccccttggatcacacttccacgcagacctgagcaggacacactgtggtttcctaagcccccgccccgtcagttgagcccgatggccttcctgctgatctgtaagcaggctgagcaacgcttgttccgcctggtggagagttcgttcttcttggacccggggagctgcatgtcagggtgttgctgcttcgctcaagggtcacttatcacggaggcctctgtggtcaccctacagagcactgaccctctccactgctacctctgtctccccgactcaccctcatcctccatacaacagattgcatctgaaataatatgcattcgttattgcctgtcaaaaaaaaaaaaaaaaaaa

SEQ ID NO: 28402 - DNA, 3758 bp, Homo Sapiens
acccactcgcatcagcctcctgagtacctgggactacaggcacatgctaccatgcccgactaatttttttgtttttgttttttgtaggggcgatctggccatgttgcctagactggtctcgaactcctggccacaagcaatcctcctgcctcagcatcccaaagtgctgggattacaggcatgaaccaccatacctagccagaaaatacttttttgttgttttttttttgagatggagtcttgctctgttgcccaggctggagggcagtggggtgatctcagctcactgcaacctctgcctcctgggttcaagctattctcctgtctcagccccccgagtggctgggattacaggtgcacaccaccatgcccagctaatttttgtgtttttagtagagatgaggttttgccatgttggtcaggctggtctcgaactcctgacctcaggtgatctgcctgctttggcctcccaaagtgctgagattacaggcgtgaaccaccacacccggccagaaaagacattttctaaagtgactttcttatcccctccttcccaccgtgctttttgtgtgactgttgtacatacctctgccagagaaatatgttgaaattgcatctggctaaatgaagtcttcgtgattgatactttggttagtttttattaatgtcttttctaccttgaaggtcaaatctttattttcatagtttaaaataccatcagattacttaacaagctttatactttgttcagtattacttttatgttcattctaatatttttattatcaatacttcagtcttccagaatcctagctgagaaggtaagtgttgactgtacaatcagtcctaaaatatagctatacagtaacattcatttttaatatggtgcttttaaggatttgatccattttctgtatttgaatgatataacctcagcactatttactttcacagaaatatgatcctcccaataagttgtgtatttcctgaaggtttttctgtgattacctgttatgtccttctctgcctggtgagcccttgtttttcttcttcagggtctaactcaatgacccctctttaatgaagccttccctggcccttcgctctgcccaactccagatttcaaccttcccacctgtgcttgtcatcactttgcacataactctgctttgaacacttgtcacattgtgaatagtttctgtgtctgtttcctggctatttgagctctcagcaggttagaactgtgtcatagccatcactgtaattctctcatgtagcagtattcctaacatatagtaagcaacgatgctttctttgagtgaatgaataattaaatactttgtttacaaccttagttatccccttctcttctaaccttcagtggctctccattgtttaccctgctggatcatattcacattccccagcgacctaccatataaggcccgttacagtcaaaccttaattactctccttcctgaaccctccacatcagcaagtctagtttctactcattgttctctgtctccctccactctaggttcacatcttcaaagtccttcaagacctagttcaaatagatactgtaatagtatctaacttttttgtggtagaaagaaagaaagcgcagagatcctactctgatgacagcaggaacaaaaaacacaacacaatctaattcattattttcttcaacccatcagagagttgaaatatcataaacaactagcctgaaatctaaggaaggaagggcatctccaaggttggacttgcttgcctgggacagatgatgctggacactagtgggaagaactgagttaaagatgtttggcggattgctgggtgttgaatgtgggcaggcaggagagtgcagagccccgcagggcatcggtcaggtggtgaattcataccccttgggggctcttctacatggacctcccctgatgctaattttgagaagattggccagagtcctgagagggcctcccactgagtgcggggctggggaggggagcagcaacccgaggatggaaaggcggaaaaccccagtcttccttagggcactggtgaaaaccattgagaatgaaaatttctgagagtattgttaagccatcccaatttaaaaacagcatgcttgctacaaacacagcttcaatgccccttcaccccagccaccaaactagctcctcagcaaacactctgcacccaccatgagcagaggaatctctcagagccttggaggtgaaggagagagaatgatggcccaaaacaaggttttggttgaaaaagttttaagatagagtggacttaagcatggtaatggatggagtgaggaaagccaaagaatagaattaaaagaaatcagggagtaaggaggataggttgtaaatcacatagcatgaattttcttccagaatgtttcatcagtgtagatgcttaggcgtgcaagtttaatttttgtttaaaatgggggaaaaaccctacatgaatagattcctggattaaatttagtatcagatttaatttttacagtcaagaacaattggattgtctgctcgtattttctggatcatgagatctattcacactgaaatgtctaacattttgctcattgtcaaaaaaagccttcaagtgctgacatgaagaattgtgctttatttcaaattgtgcacatcactgcagtagcagaggctcatcacacatgagagaagacatactggaagtaagattcatctcttctagttgatttgacataagcagtatcatccaactaaatatcagtgaatgcctgttttaatatttctccaatcttattcatagttacaaaatcaggacaatttatttcttctattaaatgccgtttattgaactaagcattatttcaaagaaaaaagaactagtcattgaaaagtaattccttttttagatacctcattaaacttaacaatggcatttaaacacttctgattattgaaaaattaaacatgcctaaattatttggtctcattctactcatagccaaaatttaaatatagcttatcaagtggtttctgaaaggtatagagtaaaaatgcattcttcctcagctctttttctgtaccaaaaagcgctatctaggaagcttagcacagaactgaaagtgaatcaataggaagatgttggttaaagaatatataattagttagattgaaagaatgagatcaaggaatctattgcacagcatggtgaatatcgttaatgataatatatttttgaaatatgctgagagtggatgttaggggttctcaccacaaaaatgacagctatgttaagtaatgcatttgttaataagctggatttaacattccacatgtatgtatacttcaacatcgtgctgtacacaataaatacatacaattttatcttttagtttctaaaagatttaaaatcaaaatgaattttaaaaagtagaattaggccgggcgtggtggctcacgcctgtaatcccaacactttgggaggccgaggcgggcagatcatgaggtcaggagatcgagaccatcctggctaacacggtgaaaccctgtctctactaaaaaaatacaaaaaaaattggcctagggcagtggcaggcgcctataatcccagctactcgggaggctgaggcaggagaatggtgggaacctgggaggtggagcttgcagtgagcagagatcaagccactgcactccagcctgggacacagagcgaggctccatctcaaaaaaaaaaaaaaaaaa

SEQ ID NO: 28403 - DNA, 3946 bp, Homo Sapiens
gggggcagctgggccgggggcgggggtcggctgcagatctcccgttgtgtgagagaaacgcaagcacggagctcccttgacctgctgcatcctcctcggcaattttttttttttaagtcaaaaagcttggatttcctgaaattgttgaactggatgcgcgcggagtctggggcggaggcgagcggcgggtgtgcgcgactcggggtgattcacgccggggaccccaaggaggtgttggctacgtttgtggttttaagaaagcctgagggcctgaaggcagcccctggagaagccctttccgagggcattcggaaccttctggtcctagaggtgaagctgaactgtcaccaggacttatgacccgcggcttcgctcccattctgcccgtcgagttccacaagatgggctccttccgcaggcctagaccgcgcttcatgagctcccccgtgctcagcgaccttccccgattccaagcaactcggcaggctctgcagctgagctccagctcagcctggaacagcgttcagactgctgtgatcaacgttttcaaagggggtggcttgcaaagcaacgagctctatgccctgaacgaaaacatcaggcggctgttgaagagtgaacttggatcattcattacagactattttcagaaccagcttcttgcaaaaggactgttctttgtggaggagaagatcaagctgtgtgaaggtgaaaatcgcattgaggttctggctgaagtctgggaccacttcttcactgagactctccctaccctgcaggcaatattttatccagttcagggccaggagctgactatccgccagatctccctgctgggcttccgagacctagtcttgctgaaggtgaagctgggtgacctgctgctgctggcccagtccaagctgccctcgtccattgtccagatgttgctcatcctgcagagtgttcacgagcccacaggcccaagtgagagttatttgcaactggaggagctggtgaagcaagtggtttctcctttcctcggcatcagcggggaccgtagcttctcaggccccacgtacacgctggccaggcggcactccagggtccggcccaaggtgactgtcctgaactatgcctccccgataaccgcagtcagccggccactgaatgagatggtcttgaccccactgacagagcaggagggggaagcctacctggagaagtgtggcagcgtgcggcggcacacggtggccaatgcccactcggacatccagctgctggccatggccaccatgatgcactcgggcctgggggaggaggccagcagtgagaacaagtgcctgctcctgccacccagcttccccccgccccaccggcagtgctccagtgagcccaacatcaccgacaaccctgacggactggaggagggggccaggggcagccaggagggctcggagctgaactgtgcttccctcagctgagtcgccacccctgggcctttccatctcctgttttgcaaccaggatgaggacccctccatctccgtggattactgaggggggctcttgctttatgcgatgctgccttatttcctttagggtactgtcctggtcaaaatgacctaaggggaaaccgttgttgtaaacctctttattttggtgactgtgaccacttctttgtagccaccaattgtagtgaccagttgcctaatggtcactttctgactccagccttgccagcctgactcagatcctcatctctgggcctttctccctccgatgttggactgcctgatgctcccaatgacatatccaatgctcctggcatttctggagcaggaggttgtcaggacaacacatataaccaccaaggatgtgttggcctttggagttcccctttaggttcctagtgatgtggaggtttatgggtgaaaaattagtggagagggaactcctctcccccattttgtgtagagtgaaaatagcctgaagcccctactcagcagggctctgggaatgtgccttccttattttagtttcagaattgctgggaaagttaccccactggtgggtgaggatctatcctcaacctacatccagatcctatgtgctgcttgcacagaggcctttggcttttgacccaggagggccgcgaggctggagctgccctgtctttcattgagccttagcatttccctctcaggcttcctctcaagctcaaggaactcacccccagataagaagctggtgcctcttgtctctctcatttcagaaacggactttctcatcatgctttcctatggtgggtatgaggggccagctgataccaaccaactggcctgtatctatctatctggatttgacttgaatttttaaaatgtgtatcgtttaaaaaaaaaaatgtttgcaaattttgcacataggatcttgcactgttcattttcagtggggtgagtcttcacactaaaaacacaagcagagctcctgggaaaagagactggaagtggttcaggataaagagatccatggtgggcagggctcttaggtcacagagctctagaagcagctggacttgaacccacaatggcttgtgtaaattcgtaaatttcatggtttctaggaaaagctgcattggggtggggagacccagtttgcctcataggcagaggattctccaggaagcatggaaaatggaatgtttccatgctttacagtgctgggagagaggggagatgtgggcaggaccttttggaaggatgtttattctctgtggttaaagaaatgctgagaatttctagcatgtgaagcacttgggggcagcaggccttggcacggtgctgcatccttctactgctccctccaggtctgggggcttttatccaccttgaatccctatcctcctctttgtagttgtcggtctcactgataacagctccagaaaaaaagacaaggctccccctctgacccttcctgttggtatttatgaaatctcaaagagatgagccaccttggcttccaatatggcaagagggtgctgggagaaggtgaagatcagtctaagctgccacggtgatgagaccttctcattatttaactcttgatggcatttcccttctgagtgaagatttgaaatatgattgattagaattgtgctcttgatggctgggaatttagaaattttattttaagagttatttcattttcatcctaagagtgatgggagagaaatgtccaaaagagatctgctgatctgctgagaatttcaaacaaacaaaaaaataatctctatgtatgtgttggataaagtctacagactgactaacatgcattagcaaatggagcatcagtaggtagcaacatgataatttatgtaactgatagcttctgtccttattagtacacttaacatttgagactagtatttattgatccaggcaaagtaattaattaatcatgcttgggcttactttttcagtttgtaaggttaagcatatgtgcatgcatgcgtgtgtatataaatgccttttccatatcttaaatgtccctgatgaggagagcagtcatcaattaaatatataagctcttaaaatgagaatggaagtgtcagtatagacccagtgtacttaagtgctgatgactgttagccagtttacaactttttaccatcgatgtacacatttgatatttgtgcagtaaatagactgtacctataaaaaattttattgatgtttatggtcatgttagctatcagagagctattggagtgagagctgaggtgtccttaaccactttttctctcctagattcattttcattatttatgctaggattttcttatggttgacatttgatgacaggaagcaatcatgactcttcaagtgagctcacagaaacctttcatgttgtctgtttccaaaatggattcaataaacaacattttgtccatgttaaaaaaaaaaaaaaaa

SEQ ID NO: 28404 - DNA, 3528 bp, Homo Sapiens
ggggggaggaggaaggccttcgtaaaggttgcatctccgtcccttcgctcccggggacccgcgggaaaaaaaaaaaatccaacacccaggccccgcggctagccccttcccacaggctctctccgctcgattttgtcaccgttatgtgggaagcgaatccagagatgtttcacaaagcagaagaattattttctaaaacaacaaacgatgaagtggatgacatggacacgtcagatacccagtggggctggttttacttggcagaatgtgggaagtggcacatgtttcagaaatgaagcaaatgaatctcaccactggaaagcagcgcttaataaaaagagcccccttttctatcagtgctttcagttacatctgtgaaaacgaggccatccctatgccaccacactgggagaatgtgaatactcaagtaccatatcagcttattcctctgcacaatcaaacacatgaatataatgaagttgctaatctctttgggaagacgatggatcgcaaccgaattaaaagaattcagagaattcaaaacctagatttgtgggagttcttttgcaggaaaaaggctcagctcaagaaaaaaagaggtgtgcctcagattaatgaacaaatgctgtttcatggtaccagcagtgaatttgtggaagcaatctgcattcataactttgattggagaataaatggtatacatggtgctgtctttggaaaaggaacctattttgctagagatgctgcttattccagtcgtttctgcaaagatgacataaagcatgggaacacattccaaattcatggtgtcagcttgcaacagcggcatctgtttagaacatataaatctatgtttcttgctcgagtgctaattggagattacataaacggagactccaaatacatgcgacctccttccaaagacgggagctatgtgaatttatatgacagctgtgtggatgatacctggaacccaaagatttttgtggtttttgatgccaaccaaatctatcctgagtacttgatagactttcattgatttcacttccaaatctcggtggtcaaggaagctttattcttttttgcaggaaggtttgctcttcagtcatctagccactaaatgttaattatctgatacttttgaaacagatatgaaaaaaagtggcctccatataaaaagacatactgacttcaaggttggtttttgttgttttgtttttgcctgtttcttgtagtcttgtttgttaaaagttgatatcattgatgttttaacacataggggtgaaagataccattcaaaatggaatcagctgagtctcaactaatgtggtcattgagatctttaaagtttacgtgtgtgttatcaggataaatgattttagtttaaatagacttattcgtataaatgttgaaaaaaaatacagacataaatgtgtccctttagaggaattgatcctttgtaaattgaattcaggtagtagtatcatccaccaatccatctgttgctttgttggtcttctgaaggggggatttaaaactctgaaacagtctgagcaccttgagagaaatcagaaacaagacaattatttgcagtgctgtcaaacaagccagaaggagaaaatcaaggtagaatgccccactttccagttgccttaggatagcaggctgcagcctcagacttgatcctgtcattctcctctgtctcccacatctgaattgataattgctgcaaaatgtcattagcctacacttcatccatcagggctcttggattcttacaccacgacttgctgtgcaaggtgtttattgcatcttcaaagtgaaactttaaattattattcaaacatttattttccttttgttttaaaaagagtccctacaatgatcacttctaagatttttttttaccttcccctctgcagcacacacagctattcaacaatgatttctaaaattcatatttcaaatttgtatctctccattttgaaacattatagaaagcatgggatgcttgagacaaatctggtttctcctttgaagtagctgttgacaacctactctcttgaaaagttagatataattcttaatcatgtttagtggaaatttgtttacctgttccatctgttttgctgtttcattgtaaggaagatgagaagtgttggaacagcttccctcccctaaaggtattctagcagaggcgagacagcaacttggcgggcatgttgcataggagttaagtaccagatggggaattgcccatgtgatggtgaagagtgtctcacattgattttcttccttttctcctcttctctcctccttctcttctctcctctttctcttctcttctttctcttctcttctgtcttcctcttcctcttctcttcctctcctcttcctctttctctctcttcctttttctcttcctctttctctttctctttctctttctcttctcttctctctctcttccttccttctttctttccttccttccttccttccttccttctttccctccctccctccctccctcctccctttttctttttctttctttttttttggtttggcagagtcttgctctgttgcccaggctgcagtgcagtggtgtgatctcggctcactgcaacctccacctcccgggttcaagcagttctcttgcctcagcttctccagttactgggactacaggtgcataccaccatgcccggctaatttttgtatttttagtagaggcggggttttgtcatgttggccaggctgatctcaaactcctgacctcaggtgatccgcctgcctcagccttccaaagtgctgagattacaggcatgagccgctgtacccggcctgattttctatgattctgcctttaaaagacagcacgtataccaagcctttttcagaaagcttttctcttaactccttctaatgctgaattttctctctattatcctcacccaattttggctgagagttagtgtacacaatttaacttcttagaaaaattccagtgtctatgcttatattgctcacttgaatcatttgaattagaaagggatctacaaataataaaagcaaagagtgcagacagattagggatagtaattcttaaagtgccatctatcccagatttccgttatagaccagcatatgtgtaattgtgcagtgggaggtaagtagtacccaggacattgcatgtacaatactttgaaacaaagtggcaacaaagatttcctggctcaggtatgcaccccagctgctggtttagatgaagtgctgagaatatttagaaaaagcgctttaaaaagcatctagagattatcatgaaaataattggagacaaagtcactaggctgctttgtgagaggcagcataccatggctctaaacccgttcacaaaaaacaatgttagagacattaggaattcaggttttgaaaatctttttttctatttatttgtaatttacataccaaaaaaccacattaaaatagtcctcccttcaaaaaaaaaaaaaaaaaaaaaaaaaa

SEQ ID NO: 28405 - DNA, 2869 bp, Homo Sapiens
ggcagccgcggtggctgggcgcggagtgtgcgtggcctgagccgtgcgggtgactgcttcagggcttctccgcgactggaccgggcgccgctcgaaagcacgccctccattcgcactgcttgttgggctcatcatgaagcgcttgggctccgtgcagcggaaaatgccgtgtgtgtttgtgacggaggtgaaagaggagccttcctccaaaagggagcatcagccatttaaagttttggcaactgaaactgtaagtcacaaggcattagatgcagatatatacagtgcaattccaacagaaaaagtggatggaacatgttgttatgttactacctataaagatcagccatacctttgggctcgactagatagaaaacccaacaaacaagctgaaaaaagatttaaaaattttctacattcaaaagaaaacccaaaagaatttttttggaacgttgaggaggacttcaaaccagctccggagtgctggataccagcaaaggagacagaacaaataaatgggaacccagtgcctgatgaaaatggacacattcctggttgggtaccagtagagaaaaacaacaaacagtattgctggcattcctctgtagttaattatgaatttgaaattgccctggtactaaaacatcatcctgatgattctggacttttggaaattagtgcagtgccactttcagatctcttagaacaaacactggaactcataggaacaaatatcaatggaaacccatatgggttagggagcaagaaacatccattacatcttcttataccacatggagcatttcaaataagaaatctaccttcattgaagcacaatgatctcctgtcctggtttgaagattgcaaagagggtaaaattgaaggaatagtgtggcattgcagtgatggctgtttaataaaggtccatcgccatcatcttggcttatgctggccaattccagatacttacatgaattcaagaccagttattatcaacatgaacctgaacaaatgtgactccgcctttgatattaagtgtttgtttaatcattttttaaaaatagataatcagaaatttgttagactcaaagatataatatttgatgtataaaatgcaaataaaattagtttatcattatattctaatcttgaatattctaccatatttaaaaatatctcaaggtttctgttcattatgaaacatcaatatgttttctaccatttgtgaagaaatgaattttccagtttcaagtacctattcaaaattttattaaaaaccagcaaattaattttaatctctagccataaaaacataagtaatagtaagctcctaagcttggacaaaggctggattctcttcactataactgagtggtaatttaaagacaacaatttaatgtcactaattttcaaaattaaatagtttaagctcaatttaattttgctagatatttaacaaaacatacggctcaacctcataacctatatgtgtgtatgtctacatctgtgtatatatcataggatttgagaatcttaacacatgtataaataagtatatataaactccaattttaaatcttaaaattgctgaatttaccctcatattctttaaaaaacttaaagcattatgaatgtagagaaattcaccagagctcactgcctatttgatggctgtaacaagtcttcaagtatatacttttataataagttgaaaatttcatataattttatttattaagaattccaatctaagtataaaggtacaaggtagtgagaaggaaatactacagttcggagaactgcttatttccaagtatatttaacttataaagttaataaatagttaaatgaaacaaagtttataggtgacctttagtaaatggggaaattaacaggactttcttcttcatcttcaaactcttcagaagcagcaacagggctagttaattcaactcccaattgttctgaaagtttttttaccttctcttctaagagaatattcttcttcacttcttccttgtaattatacttaagatcttcaatttcttcaaaaaatgaaggatcaaaattttccagttcttttttcagcttctttatttcctcctaatggaaacattatctttaaaagttgcatataggaaatatacatattttacgtttgaacaaggagatttaattgtaaatatgaaagccaaagtattcctgaatggtcaaatacagcaataaaggcagaggaattaagatttttctttgttccattgtacagtgtaaataactaagttgttaactgtcaagtccagttatgtattctgtaagttgtgttctagtctttgactaaaatttatcatctcttataatgggacttaatctttctctaaaagcatataagagcttgtcaatagagcaatcaatcaaaaagattttgtgattcataacattgaagttagtctggttaagagttttggtttagacttcatttatattttccttactaatatctaatatttaatgaataatgatcaattttttataaagttattaatatgatcagggaaacctttgggacttctgacaggcatctggtgaagagacaattcaagccttagtgactatttagaatagccagtgatcactagctaattctcatatccatgcctttttgtcctgtttacagtcttaaaagaggtaaaacagcaaatatttttttaagggaactataaccttaggattcctgaaaagaatttcaaaaaaaaaataaagacactgttgccaatgtgacccaaaacttaagaacatactaatggcatatatttgttacaattaaaaaataaatttactacttaatcctaaaaaaaaaaaaaaaaaaaaa

SEQ ID NO: 28406 - DNA, 2989 bp, Homo Sapiens
tgggcaccagatggttccatggcagtatctggaaatcaagctggggaactaatcttgtggcaggaagctaaggctgtggccacagcacaggctccaggccacattggtgctctgatctggtcctcggcacacaccttttttgtcctcagtgctgatgagaaaatcagcgagtggcaagtgaaactgcggaagggttcggcacccggaaatttgagtcttcacctgaaccgaattctacaggaggacttaggggtgctgacaagtctggattgggctcctgatggtcactttctcatcttggccaaagcagatttgaagttactttgcatgaagccaggggatgctccatctgaaatctggagcagctatacagaaaatcctatgatattgtccacccacaaggagtatggcatatttgtcctgcagcccaaggatcctggagttctttctttcttgaggcaaaaggaatcaggagagtttgaagagaggctgaactttgatataaacttagagaatcctagtaggaccctaatatcgataactcaagccaaacctgaatctgctctgatgggatcctatggaacctggccaaatgcagcccagaaggagaatggaccacaggtaacatgtggcagaaaaaaagcaaacactccagaaacccaaactccagggacagacccatctacctgcagggaatctgatgccagcatggatagtgatgccagcatggatagtgagccaacaccacatctaaagacacggcagcgtagaaagattcactcgggctctgtcacagccctccatgtgctacctgagttgctggtgacagcttcgaaggacagagatgttaagctatgggagagacccagtatgcagctgctgggcctgttccgatgcgaagggtcagtgagctgcctggaaccttggctgggcgctaactccaccctgcagcttgccgtgggagacgtgcagggcaatgtgtactttctgaattgggaatgaagatgtgccactcgggaataatgataccccttgtgctagagatgcaaagcctgaagacactggtagcttttaataattataaaattaataatttcttgataattataaaaatgaagtgtcaaaaaatctcaagtgtaggcctgcctgtgttctcatgtggatttagaacaggaggatattctatgtgtatgtatatgtacattctaatgtgtgtctcttcttattcaacattaatccttactagaaccacaagaaagtgaatgaaatctttagtaggtactcttttgaaactaggttttagaattcttgcatcactcgcgggccctaggaccctaggatgccattcttgccaggaggaggaatgagagtgatgttggccaacattcaatttgaacagagcatggaagacctttcagttcatcgggaaagaatgagggagggagaataagtcagtcatgcatcagggcatttagaaagagctatgtttctgtcacagagacagcccttttctcagaactacccagaggaggcgtgagccattgtgcccggcccataaaagaactttattatatttctaaaattcaatcatatggaagaatctgttgagcaggttagcctttgcttgactttcctcctctgttactccagccttagctggggtgttttgtaggattttcagagcatgggagacagacaactggagcttcctcctgcccttggcccatgcttttgggggagcagagggcaaaggattgaaaccactgactttagtttcctcaggccctttctttctgagggttaaagaagaaggaaatgtcttctgtggccaagaattcaaggacttgtaggagataagtgaaggctattacagggattttgtcctggtttggtaggtttctcttggagaaataccactacaccctggtctagaaatgagttttgaagacttggggagttaaagggcactgagttttgctctcaccgtaccctgattccaggttttacatggagaaataacctgagggactttatttctatccaatgccctggtttccatcctgaccagaggatgatgacatccgctgataggccatgcttctgtcttctcttatgtgcctcatgccaagcctcgaaatataccttctggaccatcatttccacatctaccttgtgactagaagtcctagttatggtattttgaaatttatgatccataatccttgccagaaatcctgcagcgaaccatggcatggcatcatcctagtcattgatttcaatcttttgccttttgctcccctagaatcttgggccaattgcaggagggggctctgtttgtctctcttccatgctctgaggattatataggagcatcccagctaaggctggagtgaaggggttggggagagttgagcaaaggctaacttgaccaataggctcaatagattcagtcttgttggccaggcccacttgaagggttttttgtttcatcttggagaaggacagtgaggtcatggtataattgttatgagtaaagtcaagaacagcttctaggtaaaagtaattatgtacccaaaaggagttgaagggaaaatcaatttaggtttacattaaacatccttcaagttcttatctttaaatggagtttcagtgtctcccaaaggctggatgagttttacagttataaccactggattgtgagaccataggacatttgaacaatcttttcttctacccatctagaaaagcatcttttttatataccaaatttttacacatatatccacatctgtttttgaaatctagagcagaggtactcaaagtttggttcatggactagtgccagttcacaaattgttaatgttttataatgagataagtacggaagttgagagtaaccatttagaaactgtgtaggaatttaaaaagtaatatctgacaaatttaataataaaaatggaggcttgtaagaaaaaaaaaaaaaaaaaaa

SEQ ID NO: 28407 - DNA, 3696 bp, Homo Sapiens
agagtaagcgttattgttcatgtaaagccctgaaatagtttgcctttatcgaaagctctagggtattttcgcaattattttgttgtgttaaaaatatggagaactaccttctaccccaggtggtcctcagcagagcttctgtgtggagcagaaagttttctcctgggatatttttgcctattttaagccctgtcttatgcttatttctgttggtcatttctcccagcatttctcaaaggaaagatagtaacgtattgcttctattttagggattaaagaatgataaatgtatggggtttttaattcattttatattttaaattgaagctaccaagattcataagccatttgttcatctaattggatcacattgtgttcaagtttcttttcactgtttttgttttttaaaatacaatcttaaatagttaccctttctctcctcaccatcattagaaaacacaagtaagcaaaaaaaaaaaagattaaaaaaggaaacaattctataattccctcacaaccagtgttaatacctcactgcgtatcttttacatgttcttttctctgtgtgtgcacacatggcatctatcatctgtttgaacaaaaatgagatcataataggttttccatttatttcacttaacagtattttatgaacatctttgcatgccattggattcatttctctctctctgttttttgagtcgtcgtcttgctgtgtcctccaggctggagttcagtggcacaatgcgatcatagctcactgcagctttgaactcttggcctcaagccatcctcacacctcagcctcccaagtagctgggactacaagtgtgcaccactatgcctggctaagtttttctattttttctgtagagacagggtctcattatattgcccaggctggtctcgaactcttggcctcaggtgatcctcccgcctcaacctcccaaagtgttaggattacaggcgtgagtcactgcatctggccaattggatacattcctgcagccaaattttaaattcttcctattgtgctatagtatggatgtgccttaatgtatttgacccaccccttattattgggcttattattgaacttatttccagcttaagtgatagaaacagtgctgtacatcctcctagctaaatctgtgtatacacccttagtgatttccttagcttcaactcttagaagtggaatttctgggtcaaagggcatgcattcttttaaagatatttgatgtttattgccaaatcttctctagaacactatttccactaagaaaatcagcaggcccattccttgcatcccctgcccctgccatttaaaaatgtccaaagattgttccctcactgtggagtttttcatatttgtgtcccatccgtgactcagaattaatattccagcctcatctgtataacacctggatgttatatagtgacttttttttaacctcatttgaagacatatcccagttgtgtttcttatacttcactggatacaaaaatgcttagcagataatttctgggggtgtcattcttgagtttatcagacaccgtgaagtgtgttgctttttgtgtgttaggtgcttgctatatttttctggctattaatgtctgacgatgaggccagtattttaggtgttgtgagtgcaagtacagaatttgagtcagctctaacatttgtcaggtaaagcaataacactgccaattaaaactttattgtaagatgcatcctgatttcatagatgttacagtgtggaaacatgtctcagaatcagtggatatgttattctctcatctacttttctggtcacatggttggtttgctcttgagatgagaacagagacacactggtcagtttgacataagttttggtggacagtgagccaagtatatccttggaaagaattttataattacagttgaatcaacaatgcttcaatgccttttttttcttttttttggaaatagggtctctgtccgtcacccaggatgtggagtgcagtagcatgatcatagcttactataacctcaacctcctgggctcaagccatcctcccacctcaacctcctgagtagctgggaccacagagctgtgttgccacaccctgctaattttttttttttttgagacaaagtttcacccttgtcacccaggatggagtgcaatggcaccatcttggctcactgcaacctccacctcccgggttcaagtgattctcctgcctcaagcctccggaggagctgggattacaggcgcctgccaccatgcccggctaattggtctatttttagtagagatggggtttcatcatgttggccaggctaatctcgaactcctgacctcaggtgatccgtctgcctcagcctcctaaagttctgggattacaggcgtgagccaccactcctggttcaccctgctaatttttaaatttttgtgtagagatggggtcgcactgcatttcccagacttttctctaactcctggcctcaagcaatcctcctgccttggcgtcccaaagtgttgagacttacaggcatgagctaccatggtttgccccacaatgccttttattaggtacagaccatggtgtatatcgccttgtgaaaatgattcttttcctccctcttcaaattgaggatgctgccttgaagctccagcatgttgcagccccttaagtatttctcaggatgaaggagagaccattcagggcaattgcatcttccctggaggggctgttttcactgtgatgcccgcaacataccaagagcggaatcctgtctgaggagtgcagctccggtctcaccatgtgggcagggcaatcaccattaaccccagcccacaggccttcttaattgttaacagacattctgagaagtgcatgccctccacaaagcctacacacatgtgttcgagtgtgactctaggaaatgagcagatgtaatggaaacctcagtattgactcatcccgattgttatatatgagtggaatttgcatctcatttagtgtttatttcagtagattccagttgaggtcatggagtgctaaatttatatgcatcatagcacctttctcaaaggaattgggagctcttttgcaaaacaaaagatgtcttcttttcccttagcccttggttttgtttggcagatggtgtaggtgaagagaacattagttgtggaagaggtatgtatgactcccttgggtacagtcattgatatttgttaaagacagcctgagagtctgttgtcttggcctttctgggggatgaagaagttgttactgagaagcagttttcctgccttcttggaaagacctcagtcaacacaggaaacaatgggagaataacatttgatcctacctaaatggacaacattgtgtaatatgggcggagagggcttagaaattcagaaagagatcagtgtggaccagaataaaaggctttgagaaagaaaggtggaccttgaggaactggtaatatttaaatagaaatgggtactggcttaggagagtttcaccatcataaaagtttggggcctggcatggtggcccatgtctgcaattccggcactttgggaggtggaggctgggaggccgaggtgggaggattgcttgagtctagaaattcgagaccagcctggggaacatgatgagacactgcctctataaaaagtaaaaaaaaaaaaaaaaaaa

SEQ ID NO: 28408 - DNA, 6608 bp, Homo Sapiens
gagtgtggaggcgggagcccgggcggccggcttgaactccgtgcacgcgggcctggagctgcgcccctgcgtcttttcccgacttctgatccgcagaggggcactcggagccccagcctgggtcgcagtgccttcggtctgcgggcctcagtttctcggtggcgtctggactctcgccctcagagggaggcccgtcccacggtctgtggctacggatcccaggaccctcttcgcgggcgattcgcgtagcctcagattgcctcggatgatggcctgcgactgacagtctctcagctcttctcagctctcctgaggctgcagctgtcagctccctgatcctcagcacttgcctggaccagtgcgggtctgccacgccctgttcagccatccctgtcctgttgtgtcgtgcaagccacatctgtccacacccccaccacccaccagtgctggctctcctctcttctcccctgtgctcccagcatgcctcgtggccggtgccgtcagcagggccctcgcattcccatctgggcagccgccaattatgccaacgcacatccatggcagcagatggacaaggcgtctcctggggtggcatacaccccccttgtggatccctggattgagcggccctgctgtggggacaccgtgtgtgtgcgaacgaccatggagcagaagagcacagctagtggcacttgtggcggtaaacctgcagaaaggggtcccctagctgggcacatgcccagctcccgaccccacagggtggacttctgctgggtaccaggctcagacccaggcacctttgatggctccccgtggctactggaccgcttcttggcccagctgggcgattacatgtccttccactttgagcactatcaggacaacatcagccgtgtctgcgagatcctcaggcgcctaacaggccgagcccaggcctgggcagccccctaccttgatggggacctgcccctgcctgacgattacgagctcttctgccaggatctcaaggaagttgttcaagacccgaacagttttgctgagtaccatgctgtggttacctgtcccctgcccctggcctccagccagctgccagtggtccctcagctgcctgtggtgaggcaatacttagctaggttcttagagggcctggcactcgacatgggtactgcccccaggtctttaccagccgccatggccacccctgctgtgtctgggtccaactctgtatctagaagtgctctgttcgagcagcagctgaccaaggagagcacccctgggcccaaggagcccccagtcctgcccagttctacatgtagctccaagcctggtcctgtggaaccagcctcttcccagccagaggaggcagcccccacacctgtccctagactgtcggagtcagctaatcctcctgcccagagaccagacccagctcatccaggaggtccaaaaccccagaaaacagaggaggaggttttggagacagagggagaccaggaggtgtccttaggtaccccacaggaggtggtggaggccccggagaccccaggagagccaccactttctcctgggttctgaacacagcccaggtgggaacaatgctgcccctcatgatgaagtggcctgtgtggcttgagcgccccatagtccccagtcagagcagagtggtgtccccagatgacttcagaccccatagctgggcaagatgcgcttgttttggactctgcgctgagcagaaccagctcccccaactccagcagagcttgacctccgccctgtgccctttccctgctgctggctctctgctgcatccctgcccgtcttctgggagtgccgtctcacccaggcctgctcccacgagggggtcgttttgtagatcaactctcagcagatagttgcatcatctttgtcacctccacccccataaaacaccccccttggtgtcttccacactggctgggactgaactgggtctgccacgtctgccctgttgggacctcgttcctgtatggggtttctgtgtctgtccccctagccccaccctctctgctccctgtgacttctgtcccagctggaatgtgaggaaggctgcctggaggaagtggccactttgattctgggggatgagtgggatagcatcttggcaaagaatgatgtttcctgtgggattaccagcagttctgggcagctggaaggtttggatgcaggaaggtgggatgcaagccccttgccaggctcagctgcaggcattcgccctttgtgtgttaacactgtagctctaatcgtgcctggtgttctgaagcaggctcctcttccctgctgctgtgctgccatcccctgctcactccgcactcgcatgcattgcggattcagcacttaagccctagtgtgtaaatgacttggatctccctcctggcagactgtgaccctcagcacaggggctctgtcttagtcagctctgtggcctggtacacaattggtgctcattaaacacgtgttggattactggctgaggtggtgcagtggctgcctaccagcaagtctttgtttcccattctgtcaggagcagaggcctggccatgagcattccaggtcagcattgcagctgtggtttctggcaggggctttgagggtccaagggtctgatcaaagaagctgggtggggctgagtagggggtgggtggctctgcaggtagagaactgacttccgagagctgtaggtgaagtgaggaccaggcagcagtccagagctgtgaggccccaggcccagaggaatggaatgaagaaagacctgttccacacaaggaggggttttctagtggaagctgagcttggaagctcctggagccaagtttaccacaggataggcaggtacagccgcccagtgtgtgcagtgtgtgcccactctggtgcttggacaagaagttcaagtccctttcaggtttacaattgtgaaaacaacaaaacaacaccttcctggaaagtaggaagaaaaagcagaaatgtgaattggaaatacagccaactattttaggaaaaactaattagcaagcatctgattaaacttattcagaaactggccgggagcagtgtctcacacctgtaatcccagcactctgggaggccaaggtgggtggatcacctgaggtcaggagttcaagaccagcctgaccagcatggagaaatccatctctcctaaaaatacaaaattagccaagtgtggtggtgcatgcctgtaatctcagctacttgggaggctgaggcagaagaattgcttgaacccaggaggcagagggtgtggtgagccgagatcacgccattgcactccagcctggacaacaagagtgaaactccatcccaaaaaaaaaaaacaacaaaaaacaaaaaccttatttagaaaaatataaattgttgggattattttatggtaactatcactagaaaaggctctgggttcagatggttttatgtgtgagttatttcagggcacagataccttgtaggtaaaacaactggaaaccttggaaataggtgggaagctatttttagaaagcaggtatagccctggtagcaaagcaagtgagctggcagaagaaacccattttcagtcttgattctggtcagatgtgagaagtccctggatgtcctggcccagccccatgcttctgtgccaggtcacagctgccctccgtccgatgactcaggccccatccccccttttgtgggttgggtcagactgctccctgatgcctacctccagtgcactgtggcctggctcacctgtgggtctggcagtagaacccagagttgctctctaggatggacagcctagtcacccagctgacctttaccctgtcccacaggcttctggacaggccaccttccccatctccctttagtggacctgaagtggatactccagcctgggattgctgccttctcttttgaaccctgtcctattggggctttggggcttttgtgcccttgggacccaggcagctcctgggggtgtgtgagttatggtctgccgtgtgtctgagggccagtcatgcagcatccacctaggcaggcttgagagtccttgggagagtccaggtgacctggtttttaattaaaacgcgtcctgtttattgtggttgggctctgcccagaaaggaaggtagggccttgaagtggtgatgtccaggtttcctgcacaggtagggtggaggcaacgatggactctggcatggccttccagacaggcagtgcacacagctcctttcagagtggctttgttgccagctgctgcagcacctgctttcagacagatgatgaccaagctgctttcctgctgggggaaggaggcattccccctgggttgtttttctcttctggcccccacacactggcagacccgaaggcagggtgctcaggagctgcagagcctggcagggtttgctggacatgctcagggacgggccatggtgctggctctgctttctaatcatggtgtcagtccttcacttcccttggaaatacccagagattttatttcctgaagataggacatgatgggtgctgtgagatggtatttaaagtacctgtctgcaaggaaaactttaaaataggaagtactaaggataaggtcctatgggatattggaatattttataaagccacaatagttaaagcacttagatgtggacagatgagcagagaatagaggactttgaaacgggccaaataaatatggaaatttagtacaggctagaggtgtttccaattaacgagtaaaatggattattcagtaaaagcagttggccctctggaaaatagtaaagccatgtatgtgcctcactctttatgccagtacatattccagattaaagatttcaatgttacaattatgaaagtactagaggaaaatatgggtgaatttttttttttttttttgcctatgattccaggattttaaaagttttagatgcccagagttgtggaggtatggagaagtggaccttctcatactgttggtgggaatacacaataatataatttgaccacgtaacaattctaggcacatgcatgctgtgactacttgctaggtgcatgaaggctcttgccaggggtggtcatggttcggtaccactacatgggggtttagagcagggactggaggttggccttgcctcctcccctccccgcatgagctgagggtccttacctgacctttttgagctgtgaccagagtttttcctcatggggtggttagaagggttgaatgagaatgatgcccatgcagtgccttggctggggtctgggccctctaacacccacctcatgggtgtcactgttttttgaacagcagaactggaaaagcccaaagatccagcaataaaggagcaaggcaaataaagctgttaccctgcaggatcagtcagcatgagccagattgtgctgcagtaacaaagatctccaacagcgcagcggctacagttggcactgcttatttcttgcttgcacctgtgggccaccgtggctggggcctgtcagacctgtgctgacgacagcctacctggacatatttctccatgctcactgaggcaggggaaaggccacagcaggccacaagtaatgtgtgtcaccccacttccatttctgtggccaaaggaagccacagagccacacctgagttccataggacggcagcagctgatcatcctatgggctggggtgctcagtatggagaagtacaagcagccacccagcgtggggctggttggtgctgctgaggatgggaggatgggaggggcctgcatccatcccagggcaacatacctgtttgtctgctggggctgcctgacaaaggaccgcaggctaggggacttaaacaacagacatttcctcatgattctggagctagaagcctgagatcaaggtgtgggcagggttggtttctcctgaggcctcgctccttggcctgcagatagccatcttcttgccgtgtccctgtctgtgtctgtgtcctaatctctcataagctcactagtctattggatcagggcccaccctcatgacctcatttaaccctgaattacctctttaaagaccctgtcttcaaatgtaagtactaggggttaggacttgaacataaaaatattgaagggacatagttctgcccacagcggtgcccgcgataggcttctctggttttgtctttgctgttcctggcagcgctatattgggcaggcttctgtggtctccacatgcctgtgtgcagagtcccccaggccctgggttctggggcccatactgaggagtggggatggccaagccttggctgttgagtaggcagtgcccagttgtgctgtatgggatgctgtttctcacttaagaaatctttccctacctggggggtacaaaggcattatcctgtattcccaggttgtaactttctgcctttgacattcaaccttgagtccacctgtaagtgtaactgcggcagaagggaggggtctgctgtcatccttgatagcctgtgatgagcagagcccctctgccgaccgcgatgcacatgtaatatgagcaagaaataaatttttgatgtgcgaaaaaaaaaaaaaaaaaaa

SEQ ID NO: 28409 - DNA, 9162 bp, Homo Sapiens
gagagtcggggctgagaccagccctggccagggcagttaccaggacggtctccggaggccgggattcgcggagggtccaccagcaggaagaaaccccaggaggaagaaacctcagacagatcgccggggaggcagcgcgggatcccaacctcaggcgtgcgcggacggtgtgcgggtgagtctccccaaaagtggcgcccttgtgatgtcgaggacaggtctccctgtgtgcccgtgggctgctgtctcaccggtggctcgtagtcgcggagaccagaacccggcagcttcaggggctgcctgggggtgggtgttacctgctgtatgtctgtgtccattatgggggtgtgtgtgtgtgtgtgtctgtgtgtctgcgtgtgtgtgcgcgcgcgcgcgtgcgtgcgtgtctgtgtgcccactaccgtctctctcttaagtctctctctctctctctctccctctctcccttctcgctctttccgtcgccctctctttctgtctctgtccgtctgtgtgtgcgtgcgccttgggacacatgttccctgtgcgccggaggctgggtttcttgcacgtcggcctttcttctggtcagcctctccctgcgtctctgcctgggtgttgtggccggttggcaatcgttttcccggcggttccggcttgggggtctgtgaaggcctgggcaacgtgggcatctgcgtcggagccgcaggggttttcattccctccccatccggagcagcctctttgctaggctagatccagacgaccgctccccaaccaaggacaacggcctcccaggcgctcattgtccacccgcaggagggtgcccgcagaccttccagaagatgcttctcacgcctcttgccctgccctctgccctcatggagaaatctagccacagctcgacgcagggacggagaaggaagccggcaaggggatggggcaagcctctctctcactcaaaggcagtatagaagtccaccacagaggcatatccagtatggtgcccaccacctcatcttggggctgggtgaagggcaagtggcactgcaggaaatagtagccttgttctctgtcctcaatttgttccaagattgcggcccacaccagtgcttgggcttgtgagaatggagggctctccaacagttcagaaacaagcagtctgccgcagaggtgagaagggcaaaagacacccccacctatgcttttccatggaacatcaagtccctcagagtataatgtctgctgggttcttgcttccttatttttctgtgttcaaatttcttcttgtggtgctctagcacacttccgtctatatagatattggaattaacgattatttatccataactttgctttctctttctgagaataactagagtcaaatatctatagtcagtcatattgaagaaaaacctcagaaatatacttcttagtaactcaacacccaagagcaaatcataatggaaattataaaatatttttaattaaaaaatgtatactacattataaaatgtgtcattttagaggaaaatgtagaaccttaaattcttattttatgaggacaacaaattaatttttaaaatgttttgaatttattggtagaagttagaaatatcaacagaaataaaaggaaataataaatacatgcatagtgattaagaatacagggaaagaaaagtcaagaaatatggccaaaagtttgttagttgttgtaggagccatacaataacaaaactctggagaaatggcttgataaaattaagagaagaaacaagtatgccatctcaggaatcaaaataggaaataattatacatcaggtgtcaagaattttttttgttttttggaaaggatctgttggtaattattttaggtttttgggctatatggtttgttgcaactaatcaattctattgttgtggcataaattgacagtatgtcaatgaatgagcatgacagtgttccagtaatactttatttataaatactgtctggcttatttgccacagtttattgagttttgttataaataatacaaatatcaagaaggtaaattagtatagtatgaaaacgtttaattcaataaatttggaaatatatgtaaaatgtgtacaattacttgaaacatgcatttttccaaaagtaacctaaagtgaaaagaaaaatctgaattgtgctacaacaaatgcatgtaatcagtagtcagaaatcatatcataaagataatttcaagccatgatgactttactggcaagttgtttcaaacatgaaacaaaacaataattccaatcttacatacaattctttctgagcatgaaacaggaaagaacatactctattttattttattatgctattatgactctgatattataacctgacaaggatagtaaagggaaagtaaattaaacaccaatgtaatttatgaaaatattgaaggaaaacttaaaaaagttccatgcagaaataagcaatgcattaaaatgtaagacatcacagccaatgtttattctaagaaaccctgggaagcaataatggcctcatgtaaaggtatcaattaatatgatacaccacaacaaataacttaacaatattataagcatatttaattttattttcttaaaaagtcatacattttaacaacccgaaattaaaagagaatctagtttaactgataacatttgttttcaaaagttctattgaaattataacacttaacaatggaatgttcaaatatttcctttgtgattgggaacaaaataaacatagatggtacaagcaattttatttatccttttgcaggtcttagacactgggataggattgtaaatattaaaaaaataagaattatgaaagagaaaacagattactatgttaccgatgacactaagtacacagaaaattcaaaatgattctaagatacattatactaatgaatatgagcttttagcaagatgctttgacacaaacgtattatgcaatattgaaatgcatttcaaataagtagagaactttatttagatgtgtcaatgtggcttactctcacaaacatagtatttagtggcatgattaagtcacaaaagaatatgtatagtataactcagtttaaataaagttcaaataaacatagacataacattgacataaatatattcttgaattgaaagactttaatgaaatcacttctccccaaaattaatctttgtaactagtgcatccaaagtaaaacccagtaaggtttgatttagatattgacaagctaattctagaatttatgtaaactctaaaaatattaaaattcagttaataatttattgaggaaggaaagatatattacaggaaatataagaattaatgcaatgtggtattaacaaagtaataaataatcaatgaaatggaataggtagactacagtaaggaaaatataagaacccatgatatgtaagaaagctagtattatagatcagtggtgaaaaataaatttgccaataaatgagagtgagaaaactggttatacatatggaaaataattaaagtgattctttaccttatataatatttaacaatcaattccttggcaatcaatatttaaatgtaaagccaggcaaaaattacagaaaacccgacagtaaaacaaagaaaatggcttgcacatgtgctttataaaatgtacaatgtaagtgtccaccatacctatttagaatcactttaacttatttttaacacaaaaatgcaaatgaaaatgttttatatgtacattattacttatacaagagattgaccaaaaacggtctgacaagacagacttctggcaaacatatagagcaataataatttcatatgctttcctggaaatggaaattatacccgttttaaaaagaggcttgtattacccagtaatattgaagatgaccatatattctaatcagcaattggctttcactccttattttgtatgtacatggttggccattaagaaatgtaatctaaaatatttacaggctcagttgagtactataagcaatgcaaaagttaaacaacagtagaatgtggtagattcatacagtggaatactacactttagaaaaaaaatagataactttatttagatatgttaatgtggcttactctcacaaacataatatgcagtggtatgattaagtcacaaaaggatatgtacaatataattcagtttaaataaagttcaagaacacaaaacagcaagttggattgtttataaaaggtttactggacactaaatctataaagataataatagaaattattttaacacatccttcaattacctttcattcctccagaaatttgttgaaacctcttgaatgcctgtgacctttctcatttcctccactgtttaatttccttttatactttgtttaaaactttgaatggacatatgagagatgaagtcatatttttctaaataagttcaaaaatattttgctttaaaatataagtagtgattaaatttctaagaattgagcaatagttgaatgttataaatttagttttcatgaatatttctctctccacatttcttcttctcaacttgctcatatcccttcaaatgacaaaatacttagaagtatttgagtcaagttagatatatttttgaagatattatttgcttatttatctatgagaggtcaacaacaacttccatgaatattaggaaagcaaatgtcggtagctctattcacttcaatattgaattcacctatatctgaaatttaaatgtcagtgataagactgacagaaagcgtcacacactttaggtaacacagcactaagtggcaacactttaatattgtcactattacatttttcagatatacaatatatactttaccaagaatcctagtctattatgttctaaggatgagctgtctttatacaaattcacaataaatagctgtgtaaataagagttaccatttttattttatagcataaaatgtatttcaattagttgtacaaatcagatatgttataaaagaaacatctttcctattattgaattacccaaagttgcttacctaacatagaatcttgtggaggaaaataggccagtgaaattcagtgattattcattatgatcaaggtgattagtacagaaatctccatgactattctgtgcagtgtcttttctttaacaatattttataatcattcttatttttactttctgtagacaaatcctttcttgttttgcctccttttaggtacttttgagattataaaagtatatagtaaaaacaaatgcacacacaaaactattcggttggtatacttaattttgttagaatagatttagtccaggtatattccagtggtttcttaccgagagttcatcctagtcccctgattattacttgagtgttcactgatggtttttccttcttgttaacaggaaatagttttggtttctgctaaaaatggcagttgccaccattctgctaaaaatggcagttgtgtgagttttatttcttagaaaataactatattttatatttggtgaatatcttagttttgcatttaatttgctaagcagaatcaatgcaatcactatcatattctatagtttttcctaacagattgatagagtaaaatgtatggtttttctaatttttagcatttgtgtccaataaaatgactttatataatttttttcttgttggttcattttttttccggtcaaagtttcttctttagtttctcatataattgattcaaaactcctaagtgatgatcacagtaaccttaggtatttcttatttctccataataaatatagcatctgagtctaatttcttctgggagatttattaacttttaagatagcatgtgtcacataatctaacaatgcattttgcatactaaaatgatgaaacattcttaatgaatttaaatagctactttatcagaaacaggagtcataggttgaatttttatgtgggtagtagagctaagaatatttgtaaaacagctctccatgatgggctccaacaggatgaagtaagaccacctaccaaggaagtaagatcagtcccaaaatgaactgtacatgaaattctgctctaagatctttttgctttttaacatgatttcagaaaaggctaatttttgtaatggactacaatacttgttttgctacataagctttcaggactttttttcttttatttttattttaaaattaatttttgagcagcattcttgactgcaagaaggcttctgtcagtttcccaaattactcaaataacatgtattttacactgaaaatcatgagctccttaactcaaagcttttccttgttgtttttgtaactatttaccatacaattacttgtaaatgaaatgtataacataaatatgtgctaacataaaggaagatgtttaaatattttttagacttctgaaaaaagataaaactctcagtttttaagaacattgtatctttcattttatctttctttctcctccaaatatattaataactatccttctatttgttacgttcttttacttaaagggactaaagtataaatcaggtaattaatacacaaaactttattctgtcccttgcttgtagcactacttcattccagtttcctcagagtttattatataaatcagacagatttgtaaataagtattttacagtctacatttatttgattatgaaaatggaaacagaataaaatgtgaacagataacaaactttacttgtgtgtttctccatcttttcaagttgatcaggtatatggatggcattttaaataatgtgttaaatttagagaatacattaaatagaaaagaaaattgtgggaaataggaaagcctttccattaagggtttagatataaaatgttctattcagttacaaactaaacctaaaatgagagggtttttttgtttaactgaaagagctagagagtaattaaaggtaattggcatgttattattcttaaaaggttcgcttttctgttctaagaataccagggaacaattgaatagataaaaagcaaactataaattgccaaatagatcttttgtataataatacatctcccaagacaaaagatatttcagacccataaaaaataagggaagtgtatttgcctgactggtcttgcatcttgcctgaccacaatgaatttgcatcagattttaaactcacagagttataaaatatcttaatgtgttaagagggaatcaaaagtgaatgtgattaacttgaaggaactagttggcagactttaacattaggctagtagaaactatttaataaataaaactgaaagaaaaatacttttcttaaataattattagtggcagattgatactgttaatattattgattcaatctgggaagtcctccctcttgccttttctctacccaggtcttgcattcttttgcaaaataagaacaatacaaactcattattattattattattattattattattattattattattatttttggagacagagtctcgctctatcgcccaggctggagtgtagtggcgcgatcttggctcactcaacctccgcctcccgggttcacgctgttctcctgcctcagcctcccgcctagctgggactgcaggctcccgccaccatgcccggctaaatttttgtattttgtttagtagagacggggtttcaccgtgttagccaggatggtcttgatcccctgacctcgtgacccgcccgcctcggcctcccaaagtgctgggattacacgcttgagccactgcgcccggcaacaaactcattattaagtcacttatttactattctattcctcaatgaactcttttgtagacttctaccccatctataaccaatgcagtggtactcctccctctcatatttagtttctcagctcaagtaagacttcctcagaggtttaatctaattaatcttaatctaattaaaatagaaaaccttacccatttattctgtccaaagcaacatgtttcccctcccctccccttcccctcccctccccttaccttccccttcccttccccttcccttccccttctcttccccttcccttccacttcctttccttccccttctttccccttgccttccttcctgccttctttcttttccttctttctgtcttttctaatacaaggcttgaccactggggtaaaattgtcaaaatgtaaaaaggagataattaaaaaataaatagtacctaagtagtatgctaaaatatacatggggcaagatcatctttgcattttatgcttgggtgcattctggaccaccttaatctttttttttcttccctaagacagagtctctctctgtcatgcaggctggaatgccgtggcaccatgatgactcactacagcctccacctccgaggctcaagtgattaatcttaaatagtgcaattattctatttaatcacaaatgtcagcatctcttttctttagttttggcacatggttttcaccttttatcctctccctctctctctctctccatgcttcattatattagttccctaggctatcacaacaaattgacacaaactaaatgacttcaacaacagcaatgtattctaaaacagttctagaggctagaagtcctaaatacagtggggccacactcgctctgaggtccctagagagaatccattctgtggatcttccagcttctgggggctgccagcattcctttactcatgcgagcattcctttaccccagcttctgggggctgcaccactccaatctctgctccctggtcacattgcctcctcttctgtgtgtcaagtctccctctgactcactcttgaaagaacatttgtcaggccaggcgcagtggctcgtgcctgtgatcccagcaatttgggaggccgaggagggcgaataacttgaggtcaggagtttgagaccagcctggctagcatggtgaaacccctcctctaataaaagtatagaaattatctgggcatgatggcgggcgcttgtagtcccactcctcaggaggctgaggcaggagagttgcttgaacctgggaggcggaggttgcagtgagcagagattgcaccactgcactcctccggcctgggcgaaagaacaagactccatcttaaaaaaaaaaaaaaaaaaa

SEQ ID NO: 28410 - DNA, 5125 bp, Homo Sapiens
gggtaggggggtggggccaagtggcgcgtgcgcgatactgttgctgcccctttgctgctattgcgttgcaaaaaaaatcctgactaggtagccttggaccttttctgtgctagcgagtctaaaggaaagaaagatttctgcaactgaaggggcagtcgggtagtattacatttaagatattaacgcccgacctggctcacaggagtgtgggaacaggggcggggaagggccttagcactgagagccgaaaagtataaaacgattagtttcggcgtcaggcgttttgaaaggctttgcaggtcctgttttctgcgtaatttttccgtgattactgactggtttaaacacgaccccttgaacaatattgataaaacctccgagacccgcagcccctccttgcagcgtgtaggagctgccagcgtgcccagcagctggtgttcccgtccgtatctccagaagagcccagcgcgtgcaccatccccaccccctagcttccctccccacctacggcggcggcggaggcagcagtaaggcctcctcctcgtcggcctcttcggcaggggctctggagtcctcgttggatcgaaaattccagtcggtaaccaacaccatggagtccattcaaggcttgtcgtcttggtgtatagagaacaaaaaacaccacagtactatcgtctatcattggatgaagtggctccggagatctgcatatccccaccgtttgaatctcttttaccttgccaatgatgtcatacagaactgtaaaaggaaaaatgcaatcatattccgtgaatcatttgctgatgtacttcctgaagcagctgctctagtgaaggatccatctgtctctaagtctgtagaacgaatctttaaaatctgggaagatagaaatgtatacccagaagaaatgattgtggcattgagagaagctttgagtaccactttcaaaactcagaagcagctgaaagaaaatctgaacaaacaaccgaataagcagtggaagaaatcacaaacatctacaaatccaaaagctgctctcaagtctaagatagttgctgaatttcgatctcaggccctaattgaagagctgttgctatacaagcgctcagaagatcagatagaactgaaggaaaagcagttgtcaactatgagggtggatgtgtgcagcacagaaactctcaaatgcttaaaagataaaacaggtgggaagaagttctccaaagaatttgaagaggcaagctccaagctggaagaatttgtgaatggattagataagcaggtgaaaaacggaccctcattaacagaagcactggaaaatgctggaattttctatgaagcacaatacaaagaagtaaaagtggtggctaatgcatataaaacctttgctaaccgagtaaacaatttaaagaagaagttggatcaattgaagtcaacccttccagatcctgaagaatcaccagttccttccccaagcatggacgctccctccccgactggttctgagtctccttttcagggaatgggaggtgaggaatcccagtcaccaaccatggagagtgagaaatctgccacacctgaacctgtgacagataatcgtgatgtggaagacatggaactctcagatgtggaagatgatgggtcaaaaatcattgtcgaggacaggaaggaaaaacctgcagagaagtcagctgtatccacttctgtacctacaaagccaacagaaaatatctcaaaggcctcttcatgtaccccagtgcctgtgaccatgacagcaactccacctcttccaaagcctgtgaatacttctctttccccttccccagcattggctttgccaaacctggctaatgtggatctggcaaagatcagttccatccttagcagtttaacatcagtcatgaaaaatactggggtcagtcctgcatcaagaccttctccaggaacgcccaccagccccagcaacctcaccagtggcctgaaaacacctgcacctgccacgacaacatctcacaaccctctggcaaatatcctctccaaggtggagatcaccccagagagcattctgtctgcactttccaaaacccagacacagtcagcccctgcactgcaaggcctgtcatctttacttcagagtgttactgggaacccagttccagccagtgaagctgcctcacagagcacttcagcctcccctgccaacaccacagtctctaccataaagggaagaaatctgccctccagtgcccaaccttttattcccaaaagcttcaactattctcctaactcatcaacttctgaagtctcttcaacttcagccagcaaggcctcaattgggcaaagcccagggctcccaagcactacttttaaactaccttccaactctttggggtttacagctacccacaatactagccctgctgccccacctactgaagttaccatctgccaatcttcagaggtctccaagccaaagctggagtcagagtccacctccccaagcctggaaatgaagattcacaacttcttaaaaggtaatcctggtttcagtggcttaaacttaaacatcccaatcctgagcagtttggggtccagcgccccatcagagagccatccctcagacttccagcgtggccctactagcacctcaatcgacaacattgatggaacccctgtacgggatgaacggagtgggacacccacccaggatgagatgatggacaagcccacatccagcagtgtagatactatgtccctgctttctaagatcattagccctggttcctcaacacccagcagtacaagatcaccaccccctgggagagatgaaagctacccccgagagctctccaattctgtatctacatatcgaccctttggtctgggcagtgaatctccctataagcagccttctgatggaatggagagaccatcttccctgatggactcttcacaggaaaagttctacccagatacttctttccaagaagatgaggattaccgagattttgagtattcagggcctccaccctctgccatgatgaacctagagaagaaaccagccaaatctatcctgaaatcaagcaagctgtctgataccaccgagtaccagccaattctgtccagttatagccacagagcccaagaatttggggtaaagtctgccttccctccatctgtaagggccctcctggactctagtgagaactgtgaccgtctctcatcttcccctgggctatttggtgccttcagcgtaagagggaatgaacctgggtctgaccggtcaccatcaccgagtaagaatgattcatttttcacccctgactccaaccacaatagcttgtctcaatctaccactgggcatctcagtttgccacagaagcagtacccagactctcctcacccagtcccacatcgttcccttttctctccgcagaacacccttgccgctcccacgggtcacccacccacgtcaggcgtggagaaagtcctggcctccaccatttccaccacgtcgacgattgaatttaagaatatgcttaaaaacgcctcacgtaagccctcagatgataagcattttggccaggctcccagcaagggcactccaagtgatggtgtcagtctctcaaacctcacccaacccagcttgaccgccactgatcagcagcaacaagaagagcactaccgcatagaaacccgcgtctcctcctcctgcttagacttgcctgatagcacagaagaaaagggggcccctatagaaaccttgggttatcacagtgcatccaataggaggatgtcaggggagccgatccagaccgtagagtccatccgagttcctgggaagggaaatagaggacatgggcgtgaggcttcaagggtgggttggtttgatctgagcacatcaggtagctcttttgacaatggcccttcaagtgcctctgagttggcatcccttgggggtgggggcagcggaggcctcactggctttaaaacagcaccatacaaggaacgggcacctcaatttcaggagagtgtcggcagctttcgttccaacagtttcaactcaacatttgagcatcatcttcccccatcccccttggaacatgggacacccttccagagagagccagtggggccatcatctgccccacctgtccctcctaaggatcatggtggtatcttctctcgagatgcacccactcatctaccctctgtggatctttcgaaccccttcacaaaggaggcagccctggcccatgctgccccaccccctcctcctggagagcacagtggaattcctttccctaccccacctcctcctccccctcctggggaacatagcagcagtggtgggagtggtgtccccttttctactccaccccctcctccaccccctgttgaccactctggagttgtacccttcccagccccaccactggcagagcacggagtggcaggggctgtggcagtatttcccaaggaccatagttccctccttcaagggaccctggctgagcattttggggtactcccaggacccagggaccacgggggccccacccaacgggacctcaacggccctggccttagccgtgtacgagagagcctcaccctaccctcccattctctggaacacctgggcccaccccatggaggaggaggtgggggaggcagcaacagcagcagtggcccccccttgggtccctcacacagagacaccatcagccggagtggtataatcttacggagtccccggccagactttcggcctagggaaccttttctcagcagagacccatttcacagtttaaagagacccaggccaccttttgctaggggccctccgttctttgcaccaaaacgcccattcttccctcccaggtactgatggaaaccgagggaaaggcattttgaacagtctagagaacattggaagtaggagtttggtttattgttgttgtttttatttgttttctctttctcgattttttttttattataacaaagggcctctcttccaaagtaagaaatcacatacgcttacgttttactattcaattcaatcctccctcccattgcacttatctaccttccccaagttgtttgtattaaaaaaaaaaaaaaaaaa

SEQ ID NO: 28411 - DNA, 4918 bp, Homo Sapiens
gcatcagtgccttctgattttgttgtgtttttctggtcttttttactcttctctcctactctctttggtgatttttcttcttctgcatttcttttctcttcttttaaactccatgattagccttaaagatagtgaccagaaataatccctgagtttatttctattctgacacatttgacctcattttttattccaatgaattttttaaactgaaaataaacctgtgacttaagatatataatggttagagggaagaaaattggcctcaagtcttctcgtcaggaaaaattggggaggatattgatactgatgtactttttagggctgagattgttaaaaattctgaaataccaattattagttgaggatttctgagtttcatgaagcgtttttataaattcagaggtgtctagaggcagtggtgtgctagtaaatatgtttaacaatcatctgtctcaggaaaaacagccttgatttgtagtgtttgccaattagtagtataaataaataaatactctaccatgccaatgtcaagctcccctgcatgaagcagaggtgggaagacatgcatgatagactcacagcctgtacgcgccactccagtacaacactgcctaaacaattccaataaggaaaaacagatctctcccattgtttccaattaacccactaatttataaagtatgtaatttgttcacaatgtgtctggcagccttatctactataaattttccaattcatatatgcatgttcagctcatgttccagagtttcatgttataacaagataatatgattttaggcttaaagggaaaagattatcatcataaattgatttatattcattaaaagtagtgtaattaggtaagatgaaagtagcttaatccagacaatgtatagtttaacagcaattaagtttataatatttcagcctctggtagaggctcgcatagagcctgaagaaaaagggaaaggaacaagttagtaatggttttataccctatcttctgcttgcctaattcagtgtacactcatttgcaagtaaagcatacatttaacagttctaataaaaatcagttgaatgtcattacagtatacagggcaggaaaactcaacaaaataaaaggcaaagtatatcagtaaaatattttgttgctctatcagtccaaatttgaaatacttcaaattttagataaagttctgctttgacccagaaagaaacatggcattgatgaatccgtgtattcagtacattcagaaaatgttttaagtaacaaactcttgcctaccatgtagacagaagtctaagatcaaactcctccttcatgcttttaagatttataggataaatgtagaacttcaagcaagtcattttttaagtgatgatttttctcccactgaactggaatgtccctcttctatcaccccatgtatattttcatttgaatttgacatgacagatagtaccgatcttttcacatgtggaaaagtgaataaagggatctgcagcatattaaaatgcatggagatgataatacttttcacatgatttaggttataaataaatcaagtgcaacgtttctgggttcttgttcaaagaagatatattttcatctgatatcttttcaacgtgtccctttcctgggaagccattgatgacagtttgatcgaagtaccatgttgtttttgtaagaaaggaatgttgagtcatatcgacatgtattattgtcaaaaagattatgtttttagatagagctaagcttttgatgccaagccattgattacactgattaactttggtatttgaaaaatattaggaagtagtaattatgattaacattctaaaagcagtgtcccacctcaattttaaatttatctgattattgataatttttctgtattggaaaatagtttccatggaattgttattttctatggatgtatcaaagcaacatttgacatatttttttaagtctttaggtttatcagaatgtaggttgccaggtataacttacacaaacaagttgagtatagagagttactgatggaagccagtgttggacttaatcagtttctctgcatccttcctctccccacaatccttgcacagcactaatgcttcatcctgcttaccatcaggaggcagccactcagtaggtaatagtgaaggtactttgcagacccatttacaatatttaaggttgaatgccactagttaccttactaattttgtattttaacattcagatttatggaaaatttacaaacagagattcaagaaatggaattccttcagttttctaaaggtttgagtttcatgagaaaagaagactttgcagagtggctactttttttcactaacactgaaaataaagatatttattggaaaaatgtgagagagaagttgtcagcaggagagattggtatacccttttattatgcatgtgataaagatgaaataataagttagacatgtttacataaagtaacttctgaattaaccaagactgtgctaccctcgatggtatataaaatcaacttgaggaatgttctgtacatgctcttctcctgtaaaggaaaactactgcctaagacagaatcagtgtagcaattacaagttttccatttccagtaaagtcaagaataagacaagtatcactactgttatttaatatcactctgtaaatcttaaccagtccaaattaacaagattatttaaaagagtataaaaatgtgaaagggggtagtagttgtctttgtttttatatgatgcaattatatgcctagagaacccaagagaatccagtagaaaaaccgtagaaacaataagaattcaataaagtacctgtcacaatgctaatatataagcagcagcagctctcctatatacaaattacaagtagaaaatgtaatgacatgcatatgtgtgtgtatatatatacgagatgtatgaaatgatgattgccaagctattaataattattcatgtacagtggtgaggtttcaagtgatttttactttctttctttatacctttatgtattgttccaaaaaaatgtttacaatggacatgtattttatgtaactttttaaaaagttacttctattgtaagaaaaaaataaattgcagtagaagaacccagttataactgcaagataaatatataacaattagaaataaatttaacaaaaaaaaagaaaacttgatagccttgatggatataaaaagaaaacttatctaattataagacatcccctattattgaatagaaagtcttagaattataaatacagcaattctgtcttcagttagtctataagtgtaatggttatattagaacagcccaagtttactgcagttacaaattaaccctgaaatccccctgtctgacactgagtttcttgctcagtcatgccgcagttccattgtgggctgataggagtctctgtccgcatagaggtctagacccattcaggggtctagactctctgaggctgtgccatcttggagttacatcatctgaaagaagtaccacgctcagaggctgtggcaggaaaagaaggaggggagtcaaaatccagcaactaaatgttttggcctggaaacatcacatgacacttggctattggccagactaatcacataaccccacctgaatgcagggaggcaaggaacttcagtctttcgtacgtgcaggaatcagaaaagatccagatactggtgaatactcgtgggtttcaataaaaataccattgaattattgggaagaaactagacaagctataaaactttatatgatcacgcctgtaatcctggcactttgggaggccaaggcgggcagatcatgaggtcaggagatcaagaccatcctggttaacacggtgaaaccacgtctctactaaaaatacaaaaaattagccaggcatggtggcaggcgcctgtagtcccagctactcgggaggctgaggcaggagaatagtgtgaaccctggaggcagagctttcagtgagctgagattgcgccactgcactccagcctgggtgacagagcaagactctgtgtcaaaaaaaaaaagactttatatgaaaagaatgtcaacatattaaaatatattatcaaaccttggtaactaaaacagtttgttactgacaatgaatttgacagactccagaaatagacttaagcatatgaaaaatttagtaattatgaaatagtattttaaattagttgggtaaaagaattattaataaatggcagtaggataattcactggccatctgagggagaaaatgaacataaatctttacaccattcattactctaaaataaatttaggatcaatcaaaaaattaaatgttgaaaaaatgaaactgagtaagtgtagaagaaaacatggaaacaatgtttcatcttaggttatatacctttctaagcaaaacccaaaacctttcaaagaaaacttgatgaaatacctaaaaattaaaatctgttgcctcacctcgtcccctgcaaaaattataatgagagtcaaaataaaaagttaacatgaagaagggggagatattgatatgtaaagaccaattttcttaatttataatgggatctttaaaaatcagtagggattggccgggcgtggtggctcattcctgtaatcccagcactttgggaggccaaggtgggtggctctctcaaggtcaggagttcgagactagccgggccaacatggtgaaaccccatctctaccaaaaaatacaaaaaaaagtagccgggcatggtgccacacacctgtagtcccagctactcaggaggctgaggcgggagaattggatgaacctgggagacaaaggttgcagtgagccaaggtcacacctgggcaacagtgagactctgtctcaaaaaaaaaaaaaaaaaaaaaaaa

SEQ ID NO: 28412 - DNA, 8167 bp, Homo Sapiens
cacggaggagcccaggggaacccattcccaggggcagttcacgatgcctcttgctggaatgagcctaggaagcctgaagagtgagtttgtgcccagtacctccaccaagcagcaagggccgcaacccacactgtctgttggccaagagtccagtagtccagaagaccatgtctgcctgctggattgcgttgtcgtggatctccaggacatggacatctttgctgcagagagacatccgagagaatactcgaaggcaccagaggatagtagtggagatctgatcttcccttcctattttgtgcgacagacaggaggaagcctcttaaccgagccttgtaggctgaaattgcaggtggaaaggaatttggacaaagaaataagtcatactgtgccagacatatctatccatggcaatctctcctcagtccactgctctctggatctgtataaatacaagctgatccgcggcttattagagaacaacctgggagaacccatagaggaatttatgcggccttatgatttacaagatccaagaattcatactgtcctgagtggagaagtgtacacctgtatgtgcttcctcattgatatggtgaatgtaagtctggagcttaaagatccaaaaagaaaagaaggtgctgggtccctagccagatttgacttcaagaaatgcaaactgctctatgaaagtttttccaaccaaaccaagtccgttaacttggtttcccattccatgatggcttttgacacccgttatgctgggcagaagaccagccctggcatgacgaatgtgttcagccgtatctttcagcccgctaagaacagcagcaccacccaagggtccattcagattgaactacatttcagatctaccaaggattcctcctgctttacagtagttctcaacaatctccgtgtgtttctcatatttgactggctactgttagtccatgattttctccacactcccagtgatattaagaaacaaaatcatgttactccttctcgccaccgtaactctagcagcgaatctgctatagttcccaaaactgtgaagagtggagtagttaccaagcggtcttcccttcctgtgtccaatgaaaggcacctggaggtcaaggtcaatgtaacaggtacggagtttgtggtcattgaagatgtgtcctgcttcgacaccaatgccattattctgaaaggcaccacagtgctcacctataagccccggtttgttgatcgccccttttcaggaagtttgtttggcattgaggtgttttcatgccgactagggaatgagcatgatacagctctttcaattgtggatcccgtacaaattcaaatggagttggtggggaattcttcttatcaaaatagttcaggattgatggatgcattcaatagtgaagatttcccacctgtcctggagattcagttacaagccctggatatcagactctcctataatgatgttcagctgtttcttgccattgcaaaatccatcccagagcaagctaatgctgcagtgccagactcagtggccctggagtcagactccgttggcacttaccttccaggtgcatctcgcgttggagaggaaatcagagaagggacaagacacaccttagatcctgtcttggagttacagctggctaggctgcaggagctgggattcagcatggatgattgtcgcaaagctcttttggcgtgtcaaggccaattgaaaaaggcagcaagttggttgtttaagaatgcggaacctctgaagtctctttccttggcctccaccagccgagatagcccaggggctgtggcagcgccattgatctctggcgtggagatcaaagctgagagtgtgtgcatctgtttcatcgatgactgcatggattgtgatgttcctctcgctgaactcaccttttcccgtctgaattttcttcagcgtgtaagaactagccctgaaggctatgcccacttcaccctttctggagactattataaccgtgctctttcaggctgggagccatttattgagccttggccatgctctgtatcctggcaacagcaggcagctagtcgtctccatcctcctcgactgaagctagaagccaaggccaaacctcgtttggatatcaatatcacttctgtgctaattgaccagtatgtaagtaccaaggaatcgtggatggcagattactgtaaagatgacaaggacatagagtcagctaaatcagaagactggatgggctcttcggtggatcctccatgttttggacaaacagaggtgaaaacccccaagcgccggcagccctttgtcccctttgctctgaggaaccacacggggtgcactttgtggtttgccaccctgaccaccacacccaccagagctgcactctctcacagtgggagtccaggggtagttccagaagggaacggaacatttctcgatgatactcacaatgttagtgaatggcgagaagtccttacaggtgaagagattccctttgaatttgaagcaagaggaaagttaagacacagacacacccatgacctccggattcatcaactgcaagtgagagtaaatggctgggagcaagtgagcccagtgtctgtggacaaagtcgggaccttttttcgatatgcagcaccagataaaaattcatcttcctctacgattggcagcccaagcagcagaacaaatattatacatccccaggtttatttctcttcactcccaccagtgcgggtggtctttgcagtgactatggaaggcagtgcacggaaagtcatcactgtccggtcagccctcattgtgaggaacagacttgagacaccaatggaactaagactggatagcccatcagctccagacaagccagtggtgcttcctgctatcatgccaggggattcgtttgctgtgcctttacacctcacttcttggcggctacaggcccggcccaaaggattgggtgtatttttctgtaaggctcccattcattggaccaatgtagtgaagactgcagaaattagtagcagtaaacgagagtgccactctatggacacagaaaaaagccgatttttcaggttttgtgtggctataaagaaagagaattatccagattatatgccctcaaacatattttctgacagtgcaaaacagattttcagacagcctgggcataccatatatctcctgccaactgtggtaatctgcaacttgctaccctgtgaacttgatttttatgttaaaggaatgccaattaatgggacgctgaaacctggcaaggaggcagctctccatacagctgatacatcccagaacattgagctgggggtatcactggagaatttccccctctgtaaagaattgctcattccacctggaacccaaaactatatggtgagaatgcgactctatgacgtcaaccgtcggcagctgaacctcaccatccggattgtgtgtcgagcagaaggatccttaaagatcttcatttctgctccatattggctgattaacaaaacagggttgccactgatcttcagacaggacaatgccaagacagatgctgcaggccagtttgaggagcatgagctggcccgtagcctgagtcctctcttattctgctatgctgacaaagagcagccaagcctctgcacgatgagaatcggaagggggattcatccagaaggcatgccgggctggtgtcagggcttctccctggatggtggtagtggtgtccgagctttgaaagtcatccagcaaggaaaccgcccagggctgatctatagcattggtattgatgtcaagaaaggccgaggtcgatacattgatacctgcatggtcatctttaccccccgttacctgttagataataaatcatctcacaagcttgcatttgcacagagggaatttgccaggggacagggaacagccaatcccgaaggttacatttccacccttcctggttccagtgtggtgttccactggcctcggaatgactatgatcagctattgtgtgtcagactgatggacgttcccaattgtatttggtctggaggctttgaagtcaacaagaataattccttccatatcaacatgagggataccttgggaaaatgcttcttcctacgagtggaaattactctccgaggagctacgtataggatctcatttagtgacacagatcagttacctcctcctttccgaattgacaacttttctaaggtcccggttgtctttactcagcatggcgtagctgaacccaggctccggactgaagtgaagcccatgacttcattggattatgcctgggacgaacccaccttgccaccttttatcactctgactgttaaaggggcagggtcctctgagatcaactgcaacatgaatgatttccaggataatcggcagctttattatgaaaatttcatttacattgctgctacatatacattctctggcttgcaggagggaacaggcaggcctgtggcttccaacaaggccattacctgtgcggagctcgttttggatgtctcacccaagacacaaagagtcattttaaaaaagaaggaaccaggaaagcgttctcagctgtggaggatgacaggaacaggaatgctggcccatgagggctcctcagttcctcacaatcccaataagccctcagccgcccgctccaccgaggagtctgccatcttagatattgctggtctcgctcagtgactgacaacagatacgagccactgatgctgagaaagcctgaccgcaggcgaagcacaactcagacgtggagtttccgagaaggaaaactgacctgtgggttacatgggttggtcgtccaggccaaaggaggactttctggtttgtttgatggagctgaagttgttcttggtcctgacacttccatggagcttttggggccagttccacctgaacaacaatttattaatcaaaaaatgagacctggttctggaatgttatccatcagagtcatcccagatggaccaactagagcactccagataacagatttctgccaccggaaaagcagccgttcatatgaagtggatgaacttcctgtcaccgaacaagagctgcagaaattaaagaatccagatacagagcaggaattggaagtgcttgtgaggttagaaggtggaattgggttgtccttaattaataaagtcccagaagaactggtctttgcaagtcttacaggaatcaatgtgcactatacacagctggcaaccagtcacatgcttgaactcagcatacaggatgtacaggtggacaatcagctcattggtaccacgcagcccttcatgctctatgtgactcccctgagcaatgagaatgaggtcatcgagaccggcccagctgtgcaagtcaacgcagtgaagttccccagtaagagtgcactgaccaacatctacaagcatctgatgatcacagctcagagattcacagtgcaaattgaggagaaactgctcctcaagctgctaagtttctttggctacgatcaagcagaatcagaggtggaaaaatatgatgaaaacctccatgaaaagacagctgagcaaggtggaacaccaattcgatactactttgaaaatctcaaaatcagcattcctcggatcaagctaagtgtgttcacctccaacaagctcccattggatcttaaggccctaaaaagcaccttggggtttcctttgatacggtttgaagacgctgtgattaatctagatccattcactcgggtacatccctatgagaccaaggagttcatcatcaatgatatcctcaaacatttccaggaggaactcctcagccaggcagctcgaatcctgggatcagtggattttcttggcaatcctatggggcttttgaatgatgtttctgaaggggttactggactgataaaatatggaaatgtcgggggcctcatcagaaatgttacacacggagtatcaaactctgctgccaagtttgctggaacattatcagatggcttagggaagacgatggacaatcggcatcagtcagagcgggagtacatcaggtaccatgcagccacaagtggtgaacaccttgtagccggcatccatggcctggctcatggtatcattggtggactgaccagtgttataacttcgacagtggaaggtgtgaaaacagaagggggtgtcagcggtttcatatctggccttggaaaagggcttgttggcactgtaaccaagccagtggcaggcgccctggattttgcatcagaaacagcccaggcggtgagagacacagccacactcagcggccccaggactcaagcacagagggttcggaaaccgcgttgctgcacggggccccaggggctgcttccccgatattctgagagccaggcggaagggcaggagcagctcttcaaactcacagacaacatacaggacgaattcttcatcactgtggagaacattgacagctactgcgtgctcatctcctccaaagctgtttacttcctgaaaagtggagactacgtggatcgagaagccattttcctagaagtcaaatacgatgacctctaccactgccttgtctccaaagaccatgggaaggtgtatgtgcaggtgaccaagaaagccgtgagcacgagcagtggagtgtccatccccggcccctcccaccagaagcccatggtccatgtgaaatctgaggtccttgctgtcaagttgtcacaagaaataaactacgcaaagagcctctactatgaacagcagcttatgttaagactcagcgaaaaccgagagcagctggagctggactcctgaagccccgctgctgagacgggcgctcccgacacagcgcagacccaccaggaggaaagaggcccagctctcagctgacgatggaggcagaaccggagtcgggtttggggaagttgtcaaggaatgagggaaagtaaatcctcatgaggaaaagtacaaatggaaatcgtattaatttgtgaggcagggagttattttagattatgggaaataatttttaaaggtattggttaaataacgtttaaaaacatgtactgagatgaatctaatttttagattgccctgtattttgttaacatgtatatatgtacaacagtgtgtttgtaaatatataggaacgtttctgaacagggtctgtgctatgtgtaaaggtttgttaactgtaaagtaatataaagttatattggatcttctattgcactaattctagatgtctaattcaggatactgtctatagaaaggcattcttaaaagttaaagaatgttacgtcttagttttggagactaaagtattcccagtaaagtgggttgaggtgagggctgtggtcctgaaagggacgcctttgacatcgtggctgtccagttgggctgtgagctgtggcacccaggactggcgctggcccttcagaaggatctaggagaggggcttgggagcccacttttaatttctcacccccattttacaaagagtgcttagattcttacaaattatgttgtaagttatccatttggctttttcctaactagtcttaccaaacttagggggaaacctgtgctccattaccacatgggtgcaagtcagcattgtaagttttctcaggttattattattagagaggttggaaacattggtaaactctgttgattgagaaggaaaaaaaaagtcccattgaactgttgcaacaaatcagaaatccacataaaagtgctctcctgcctgggcagcaacaaccaagaacaaagccccgggactgttttctttttaataaagccacaggcaggcatcgtagctccacagcccgaggggacacaggatggaaaccccaggatgagaagggagcagggagagttccagaaagggggatgaaataggagtattaaaaagctgcgttggtaagtttttcatggaaccaagatttgacaaaggcatctcttatccttggttttaaattcctgctgggagcaaggcctggtatgagcgccctgggtcttgtttttggtgtttcgcttttctgtaaggattaagcagatagggagaagggaaaaggggcctcactttagaatgaatgagtcaccttgtgatttttaaatttttattttaataaagctaatcaatttctaaaaaaaaaaaaaaaaa

SEQ ID NO: 28413 - DNA, 7964 bp, Homo Sapiens
actgaccacgcagactgctcagctgctgctcccagtgtccatccagggctcgagtgtcacctcagtgcaactccctgtaggcagcctcaaactccaggtgtgaagtgtgtcttctaactactttgccttacagcatgcatggaatgcaaaccctgctaaggaaggcaccatacctgagctcttccataaatgcgtccagagcagaccccacggagaaaacgtatgcatgtgtgagagggttattcagaaatctgaatatctagcactgtttttatatagtgaaaaaaacacaggatgcttttctagtcctgttaccttttcccttgaatgaacacagtatcatccatgcagacatttttttacacaccagtgacgtgatcattgtgatcatagtctgccgctgagcactttctggcaaggcacagcatctagtactttaaatggccggcttcacttaatcctcccttctcctagaagatctaagtgataccacccatctctggataaggacgctgaggcctaggagtactcagggagttcccccaaggatggagctggcatttaaacccaggtgttctgcccgcagagcctttattcttatgcccattcttatattctgcctcccacatttagttcttgaaagtcactgcttatatgaagatgtctaaactaaggaaaacatgaccacaaatttaggagtgaggatgtaattgaaagagatgagaaaacgctgatgagcatgaaattcccttttgtgcgtacataacctatgtatttaccgtgtcatgcagttttggtaagttttcaccaaacatggagcacgagtggacaagaaaccatttgaagcagtgctcctcagcctcgacacccaaatacctgaaacaggcgagaggaatcatctcgtacccctgtggttaggaggcagggcccacagaccctttggcagatgcaaaaattctgattcctctgttttatctttagggtatctgtgaaattgaaagtctattccataataaatccttaaattttttggtccaaatcttccattgctgtagtagaaacgagaaccgtgtttttatccttgggtctgagggcgccctggccccattgctggctctccctagggaatgcacacaccgcttgcaagcagcaattgggacagttaggtctcacgagttgccttgctgttattcaagtattacagtacctgagctattatgtgtagaactgccttaggttcttattatttccatttccattttctcaaaattttcaaatgaaaaatcttagctacttaggaataataagagcatgcagtgactggtctgatgtttccctctctggtttagaatcattaaagttcagatttctgtgcagatgaagtgtgtatctgtaaccttggtcttatttcatttagatacaatccccaagtgaccagtgattctacacctaagttctgatttctaactttgattctgacaattaaattgatgtttttttcaattcacctcctagacttcaccacaagcaggaatgcagactcagcctcagatagcaactgctgcacaaataccaactgctgccttggcctcaggcttggccccaactgtacctcagacacaagacacgttcccgcagcatgtgctcagtcagcctcaacaagtcagaaaggttttcacaaactcagcatcatcaaatacagttcttccatatcagagacatcctgccccagctgtccagcagccctttatcaataaggcctccaacagtgttcttcaatccagaaatgctccgcttccatccctgcaaaatggacctaacacacccaacaagcctagttcacccccgccaccccagcaatttgtcgtccagcactctctatttgggagtccagtcgccaagacagaagatcccccccgctatgaggaggccatcaagcagacacgcagcacacaggcccctctgccagagatttccaacgctcacagtcagcagatggatgacctctttgatatcctcattaagagtggagagatctccctccccataaaagaagaaccttctcctatttccaaaatgagaccagtgacagccagcatcaccacaatgccagtgaatacagtggtgtcccggccaccaccccaagcccaaatggcaccacctgtatctttagaacctatgggcagtttatctgccagcttagagaaccaactagaagctttcttggatggaactttaccctcagccaatgaaattcctccactacaaagcagcagtgaagacagagagcccttctctctgatcgaggacctccagaatgatctgctgagtcactcaggtatgctggaccattcacactcacccatggagacttccgagacccagtttgctgcaggtactccctgtctgtctctcgacctgtcagactcaaacttggacaacatggagtggttggacattaccatgcccaactcctcttcaggactcactcctctcagcaccaccgcgccgagcatgttctctgctgactttctagacccacaggacctaccgctgccatgggactaacgtcacagatttcttttctgagagttgatgaggtttaagaacatgaagattctaaaaggtcagtttttagagatagatctatagttgcattgttgcaatcaaaatatgttgtcacagaaagaataggtggaaggtcatagcctggaacccaagtttgaaaacatttcattgtgtccagtagtgaatttctacagtttaacatagcacagggccttctgaaaatcgcacttgtcaaagacgactcatctatttctccagacttcagtaaagaatgaaaagtacctttagataaaaacaaagaagagtaatatatgcagcacagtgacgttaggattctggtaattaactacatttaaatctctggtcactttaagaccctaaataaaaggcagacagctccactcaaaaactaaggctgatgtgagggaggtgagaggtcactgcacttggtacttcctagagacggccggagccaggcccaagacacagcagaggtcaaaggcagtggagagccttggccagttcagtgacagcttctggctgaagacttttggttctattcagaaacctgtgtcgtttttttggtgttgtagtttattttgtgattttttggaatcgtactttatatttccaaatttaaatttaaatgcaagatctttcaacataaacagaagatacctacaaaatactgtcagaagtccaggtatactgataacactgaaaattctattagcaaccttctgggttggttagattgattttaatgtatatattagacatttgtatgtatgctctgacattgtgatttgtacagcctacgctggggtaaggaaatgggtatccaaggtcctacttttttaatagctcgaatatttctagagtacttgagccacatgtatttctgtatttaaagaattgctgactaactttcaggtaaccagacccatctcaaagaaccaagaaaaggctttagcatgaaatatctttctgagctggcgagttagaagaatggaaggtaaggggaaggtctgtcatctacccaggacattcccatgatgagtacaggtcagattgtgccacaaggtgggcctccacgtccctgccctggccctctttcttctgtcactaaccctggttatcattttacaggcttgtaactggatattctaccagagctctcactatattgtcaagcctaagattgaaaaactggaggctttattagtgtttttatatagaaaacagttattacatatgtgttaagtcatttcttaagaattttctaaaatgccaactatcacaggattatttcaagctagtcattgaggtatatgacaaaatgtaaataacaaaaaactgaaatctaccaaaagagcatggagatttttcttaaataataatattgtgctctccacctcacccttgtgtaaaccctcaggtcaggttggttcccctgggtcacaaaatggtaaatgttccatactgacatgccggaggcagcctgacccgttatttggaaagaatttgtgaattatttctgggtttgtgttttgcctaagagctgatcttatttctgatttgtgtgtgtgtggtttataaattttactacgtgtaacaaaagtctgcttttccagcatgagcacactggagccctctgctcactggcacttcctgactcaaaggcactaacagtgctcatgtgccttccagacggttcaaggcagaggccactgtgctcagtgtagtctgtgatgaatagtttaagtgttcagaaattggtaaaccaacacacgggatacaataactctctgttaaccagaacaccgtcatttgaccaagccctacaagagtttaccacactagatgttctgtgaatcctcgagtcagttccattgagaggggcctgtctccagggccaggctatttacttgggaaagtatttttcttacagttcttggccacagtttttttgctgagggtttctgtctgggcctatcaggtccatacttagaccctgagcatcttcttcattcagatttgaatggcttattaaattagcaccaaatatcagtgggactgtagaaggtaaccgaacactagtaccattgactctcgttgaataactttatatttccataatcctgaattgtgtagatagttttctagctctcgggtccctttattgctttttaaaatagggtttgaaacatgccacaggaaggttgctctccaaaaatacacagtgcagtgcaagaaaatgctatctcattggcctactctcctatgaattgctaaagtgcccacttcacatatgtgtttaaacctttataaaccagtatttcacttttaaaaagacaaggcatctctacccattaactctgcaagccactccacttgcaccattccgcttgaccctcctctctcctggcttgggtcaccagccaggcacctgtgacacgagtgctgctctccaggatctccactacatgttccaggttggagtgaggacgcgctatgtgctcacactcatgtgacatgaccaaagatgatactctgtaaacaaggcccttctgaccggactcagtgcgtgtgatggtgagtgcaatgaggaagggtggatattgactaaagactggttgttgttgttgtttaggttagtgtcacagccattacagcacaagtcaaagtcgccagttgaattttcattatgcacgtgtgtggtttaagcagtggtactgttgtatatcatattgtaaagtatcatactgccaagaaaataactcctagaaaggcattatctcacatccccatcttactttcctacatgttctcaaaacacagtagtaccagccttacctttctgctgtatgtagatagtcagatcatcctactgggggtgggatgaatttaaaagttataccaaaatttctgtaaagtctttgaaagtctaggagtaggtggtcatcttgtacatttcagcaaagcatccactaggaaacctcataggacagtgttagtggttcacgttctagtgtttttcctgaaatgtgcaatctactgtatagtattgccacataattgtacatagatgtattctgaatttgtggaatttcttgcttagatactattgtgtttgtttcatatgaatatttttgtaattctaaaagagatcttatttaaatttcctttttaaaagccgcatggttctgtgatccatgtaactgacactttttggctttcagtgctgtttagaaacagtggcaaaggcagggtggtgctgcctgcaagctgctgcctatggaaggcaaagtcatagtaatgagatagcacctctgaactgtgcagtcagcataccctgagtgatggctcaggggcgcactacctattttgtcaccagagctgactcaggcttcctggaccctcaaccccagatcattccaggcagcatagctttcttcacagtcctttcagaattcccaggctgaaatcagccatagcagttgacaaaacagctatccccacaagtgatgagatagtccctttactgtcctcaaatggacttggccttagagacgtggtaaagcactttggcagggtttaaaatatttgtgagaagcccacatttcagtatacatcctcactggcttccatgcacccacctgacggtagcctcacagaagtcctggctgtcactcaggtggggagctcatggtgccgctggggactttttagagaaatgtaaagagaatagctattcagtgtctactagcagagcaacatgtgtcaatttaaccaaattcacaaataaccctccatttttcaatatctgctactgtaaacatgaatattgaatactgacaagagaatacccatacaaatcgtcccaccgccctagaggccacagaattagcccaaaattatcaaagaacattaactggaaggtcaggtttttcaaggaacatagcttacaaatgcatcagtgtgtatctggagagcatcctaactgcatttcaactcatcttttaagtgatttcagtcaaaactggaaaacaactaagatgtagtaatttttttttcctggttcaaaccttcaataacttgctcattcagcagtctctctgagctacatttttatttgtaaagtgactctgtctgcatggcaatgagcaggtgcgtgttttttccacattcgccctttcttgcagtatccagggaaacacatcattacaaagggtttctacctgaaatctttcatggaaggcctacaattcgaaaagctgcacatgtttacagaagagctcttaccctccatgcaaacactttgctctgtggtgtcacagctttgtgacaataagatggcaatctcggatctacaaggtgctgtcgggaatcaaataaaatatgttatcagagatatcatcacatctatagtgtttaacagagctttatgccaactactaagacaaagctttaacaaagtttatagaatactgaaactcgtaacaattacctctctacgtgatgctgtaaggaatcttgctaatttggtaggaagaggaagcatttaggaaagggtttagtatctaccaaaagtacttgacctcaagtaaccaatagtaatgcaaacttgctttaaaggaaccaaaggcattgccaagtatttgccaaaaggaggcactttttatttaaaatttgagactaatgagatctcaaaaatcagccccaaaaaggtattatccatttaaggttataattttcactaagatgtagatatttctcttattgttttcatgtaaaatagtatagagttgttttgttggtttaagagtaacattcagtagtaatacaaagttttttttctatgtagaaattagttttcttttcttgcttgcaatagaaatgcaatgtgataggtgtttctcttcttattttcattgtcacattatgtcttagcatctcactttatgaaaaaaaggagaaagataccaatctacagagccctgcttgttgaagcactagtttaatcaacaaaaaattatggcaatcgggggtccattcatctattgcctttatgttgttttttaaaagaaaaaccatgatgcctttgtatttgctgtttgcacccctgaaatcaattccatatcatgtttgaatgccatacattttgcacatgtactgtacataagtaatgcatactgtatttttatatgtgtgcacatttatcatcagatcttttgtacatagtggcagtattgtagctgatcgggaaatgtttgatatctcagcaattttgcatttttgtgtctcaaataaaagacattttgatgtaaaaaaaaaaaaaaaaaaaaaaaaaaaaaaaaaaaaaaaaaaaaaaagaaaaaaaaaaaaaaaaaaaa

SEQ ID NO: 28414 - DNA, 4729 bp, Homo Sapiens
gcatgcaggcaagatggcggaaggggaggacgtgggatggtggcggagctggctgcagcagagctaccaagcagtcaaagagaagtcctctgaagccttggagtttatgaagcgggacctgacggagtttacccaggtggtgcagcatgacacggcctgtaccatcgcagccacggccagcgtggtcaaggagaagctggctattgcagcctgttcccggggcgcttgcttcctctgcccgttctctatacagacggaaggctcctcaggagcaacagagaagatgaagaaagggttatctgacttcctaggggtgatctcagacacctttgccccttcgccagacaaaaccatcgactgcgatgtcatcaccctgatgggcacaccgtctggcacagctgagccctatgatggcaccaaggctcgcctctatagcctgcagtcggacccagcaacctactgtaatgaaccagatgggcccccggaattgtttgacgcctggctttcccagttctgcttggaggagaagaagggggagatctcagagctccttgtaggcagcccctccatccgggccctctacaccaagatggttccagcagctgtttcccattcagaattctggcatcggtatttctataaagtccatcagttggagcaggagcaggcccggagggacgccctgaagcagcgggcggaacagagcatctctgaagagcccggctgggaggaggaggaagaggagctcatgggcatttcacccatatctccaaaagaggcaaaggttcctgtggccaaaatttctacattccctgaaggagaacctggcccccagagcccctgtgaagagaatctggtgacttcagttgagcccccagcagaggtgactccatcagagagcagtgagagcatctccctcgtgacacagatcgccaacccggccactgcacctgaggcacgagtgctacccaaggacctgtcccaaaagctgctagaggcatccttggaggaacagggcctggctgtggatgtgggtgagactggaccctcaccccctattcactccaagcccctaacgcctgctggccacaccggcggcccagagcccaggcctccagccagagtagagactctgagggaggaggcgcccacagacttacgggtgtttgagctgaactcggatagtgggaagtctacaccctccaacaatggaaagaaaggctcaagcacggacatcagtgaggactgggagaaagactttgacttggacatgactgaagaggaggtgcagatggcactttccaaagtggatgcctccggggaggtgagtgggcctggtgggtcagagggaagcgagcctaatggtcctgggtgtgagagctctccccagccagcccagctgtcccctcaggagggtccctgctcctgtctgaggtgacaggtggtgggaaaggagctggagcttcctgctcagacccacaacattggtcatcagcaggctgcacttttcctcagttccagggtggatagagggtcaagttcttgaccttagctctgtatcaaaattgcctgagaaactgcttaagaaaacagatgtcatgctgagcgcggtggctcacacctgtaatcccaacactttgggaggccaaggtgggaggattgcttgaggcgaggagttcaagaccagcctggccaatatagtgagaccccatttctgtttttgaaaaaaaaaaaaaaaggaaaaaagaaaacagacatcaaaccctgcctgaccttctgagttgtggtcctcaggtatgaggcctgagtatatacttggccttggagacaaaagaccagtgtgatcaagggcaagggcaagttacttaacctgagcccctggttcctcatctaaaacatggaattgatcattataagacctggctataagctgtaatgaggtgatccatgtagacaccttagggctattgcctgagacatggtgaccagcactcaggagacattagtgataaaccccacaaaacccattccagttattaagctcaaggaggccttagtactgttattcttcactacctctcagaatcaaaagtggctcatttagattgagaggctggaacagtccaaagctctcccagctaataagtgacaggactgaggctgcaacccagacatctgattcatgtcagcgttagttccactgtcacataagaaccacatgagtccttccatcatgcaacttatgagcctgttagaaagaggtggacagattagagagacatgtgaagggcctcctttttcatgatgggaaactgaagccttgggggagtattttacctactcaggagtattttgcacttgtgactacctcactatacccaggacagagaaagcccatagtgccctgtcaggccgcaggggcttgctggctttttgtgtctttgcagccccctttaaaacctgacgtgcagtacacgtgagcattctagaacctgctataccagggcttagccgacagcaggccaagagtaggaacaaagcaagaaaacgttccgtggggagacttgagctgggaattagggtgttggtgcccctagtgaagacctagtgggcatctgtaggccactgccacctctgcttttggccacagtgccactcaggcagtggcctccattcacccaaagactaagtaacttgcccttgattacactggtcttttgtgtccagggccaagtatctgctcaggcctcctgagttctctgcttctcagagccatggcattatctgctcagcaggaggcaagttctccttaaaggactgaggctgacttggttcctgtaggcagccatcaccttgtggtgtctggtgttggttgggggaagtgtttcctttaggtctgaggtaatcagagcatcaggcccaccccccaggcagagggcagctctgcccctcagacacattccttaagactaggggttcactctcagtgggacctcagagtatggcctggggtaggggatgggaggtggctctgctcagcaagtggaggttaggtctgggcctgactcaggagtaactatgtgtttgtgatttccattaccccctcccatttgcagctggaagatgtagagtgggaggactgggagtgagggagccagagggagcagctcccccacccatggcatctctcgcctccctcgctcgtctcagcccagccctggaagactgagaatgttcccccaaatctcctctgccaaccagagctctgggcacagattctggtggctccctgctggccctcttgggcctctgctcacacctgggaaggggctctctaaatcccggccagaaactctgacttgtgccaacaataggatgacccaagggagaggaaacctatcctcctcaccagaagagcctgtgtttttctgctgaacacccactgttcctgaggactcctgctgggaagtcccaagggatagttctagcccttctgcctgtgtagacagaagctaaaccaccagtctctctcggaggaagctgagacaacatactctgtccatacataagcaggcagggagggccatgccacctacccttggctaaacagggacagtgaacacattttggttcctatcccagtgggtaagaggcacttatctctgggaaatttgcctctcttgggactctccccctcccaggcattttccattcctggaaaggctcctttggggttcagaatccagagaccaaaccctgacccacctccttcctttcctccagcccacactggtctgtccccatgccttcccagggcttcttcatgtcagatgcacccaagtccttagcccagctgtgccacctgcaggagttcgctcttgcgtttcttcccctccccaagaagggagggggctacttcaggcccttctgtgtgttgcctggcaggataccttgtccaaccagctacccacctcaactcccctgtagtttaggacacaaaacagctaccagcggtacagagcggtgatcaaagccgagtacttacaactctggtaagcctagcttctccgcctcagcccttctgcttctggaagagctatcctgggggtgaacttgaaactctcatcaggcttctgcaaaagctcttcttcctgaagacagacccagcctttgtgctctcaccctccactctggtaaagctgcacctctgggggaatgaggggctgcaggaatctctggagagcctggtgcttcacgatgctgctctggtgattcttgtacctaatctggtgtgctcaccaatgagtgaaagggatcgtgggtcagggacaccgagagagtgaggtcacttccacttcaaaccttcagtgagggggtgggatggagagaatgctgaatcttttttttgacgggatggggtttttctctttgtaattatttctttagtttaattaaccttttggttgtttgtgcaatattatatattttaaattataatgcatctccccagagtattttgtagctgggaaaagaaaaaaggaaaaaaagaaaaaaagattctaacagctgttagttttataattaaaaaagaaagaaaaaaaaaaaaaaaaaaaaaaaaaaaaaaaaaaaaaaaaaaaaaaaaaaaaaaaaaaaaaaaaaaaaaaaaaaaaaaaaaaaaaaaaaaaaaaaaaaaaaaaaaaaaaaaaaaaaaaaaaaaaaaaaaaaaaaa

SEQ ID NO: 28415 - DNA, 5366 bp, Homo Sapiens
  misc_feature (5360)..(5361): n is a, c, g, or t
  misc_feature (5363)..(5364): n is a, c, g, or t
gaaatacacaaaataactctttagcttgctctgagcatttttttcttttctgatagcaactttttaacgttgtggatccacagaacttactgctttgctttctcttttggggtcacaattcctctccccttggagtgtccactccatgcatgtgcacttaggatgtgtggctgtgtgtgtgtttgggaaccctcacggacacataaggttctatgtcatcaagtagaaaacctatctcattatcattataatgtcttcagatgctttctaaggttcacctcttttttaacattagaagtcagtgaatgcagctttcattataatttttaatactttaaaatgtttttgtattagctgccagaatgctcagcagcaaagttatgactcacttctagcaagtgtggtagttcttgcttcaagcatttggtttcatgtagcttttcttcttattttttctttgtcttgattttatcattacttaaaacaattctgttgaatattaacacttggaaaatgaaaaaaagtggagaaataaatcaatgaataaacaaatattttaagtggcataggcacagcatttaatattttgcttcagtagttcttaattaaaaaaaaaaaatccctcattttggtaagcactagggatttaccaacatttagcaaatgatttctgttacacatactcttaaaatattcagtctatttatactatttattaatttcctctttatcataaaacttttattcacataaaaacacattataaactttcaatgtggttgcaggagccttcattccaggagttccagtgcagccagtcctcctcagatacccaaacaagctggatactgtgacctggacatggcaaggatatacattcattcagctttgtatgcttactttctgccagctcttcacaaaggtagaagttgagtttatgccagttcaagtaccaaatgatgaagaaaaaaaatgatcctgtcctttttgccaataaagtccggaatttaatggcagaagctctaggaataccagtaacagatcatacctatgaagactgcagattgatgatttcagcaggacagctaacattgcctatggaagctgggctggtggaatttactaaaattagccgaaaattgaaattagattgggatggtgttcgtaagcatttggatgaatatgcatctattgcgagttcctcaaaaggaggaagaattggaattgaagaattcgccaagtatttaaagttgcctgtttcagatgtcttgagacaactttttgcactctttgacaggaaccatgatggcagcattgacttccgagagtatgtgattggcctggctgtcttgtgcaacccttccaacacagaggagatcatccaggtggcatttaagctgtttgacgttgatgaggatggctacataacggaggaagagttctccaccattctacaggcttcccttggagtgcctgaccttgatgtttctggtctcttcaaggaaatagcccaaggggactcaatttcctatgaggaatttaaaagttttgccttaaagcatccagaatatgctaagatatttacaacatacctagacctccagacgtgccatgtgttttcattaccaaaagaagtccagacaaccccctccaccgccagtaataaagtcagccctgaaaagcatgaagagagtacctcagacaaaaaagatgactgaaagcagtatttccaataaggaaaacacagtagcttttgcttgaaattgtaaaggcacttattgataatacttttaatgtgttggtaatgatgtttaaaattgaaagatttttaaaacaaaaatgatagattttcttactaaaaatgtttttattaaccttgcttttattggaaaaaatcaagcaatatttcgttttcttttgtgttatattgtactttactgattcatttactggtgatacatatgtttttatggattttccagtttaatttgcatatacaaatgaatgcaatggtctattggtgagcattgagcaacactgtataaagttttaaaaatgtaaacactttttaatctactttcctctaaaaatcaataatattctattatttctaatccttttccacttgggaaataacaatgaagaatctgagaatttgacatctataactttacagattcatttttccatttaaatttcagtttcttggatcactgaatatgggaagggagagcttcactaattagacgcagcttcttaagaacttatattctctttgacatacatctctattgtagttttttgttttgttttgttttttgagatggagtcttgctctgtcacccaggctggagtgcagtggtgcaatctcagctcactgcaacctctgcctcctgggttcaagtgattctcgtacctcagactcccgagtagttgggattacaggtgcccaccaccacacccgactaatttttgtatttttagtagccatgtggttttgccatgttggccaggctggtttcgaactcctgacctcaggtgatccacccacctcagcctcccaaagtgctgggattacaggtgtgagccaccgttcccggcctattgtagattttcttaactacttgctaaggaaatcatatccttttacatgaactacaggtttagaacttggttttaagacaactgctatggccagaaggtaaatgggaattgccttattgaaggtaacattgattgcctaataagaaaatgaattgtttaccacagagttgaatttaatttgagttagatagttcagaatgtagcacttgccctataaatgaatcagatttgttctatttatataatattagaattaatatattatcatgtaagtgggaattttattttgttaagtggactctcaaattttagaacttgtgtgaaatatctcccagaaaacacaaaaggtttcaaggtatcacccaaagctagggaatcaacaaacgtactttattaatgcaagaccacaatttaagccccaggcaggaatccaacagtaacatttttcctttaggttaagcagtaatttttttgaattgtcatttttaatgggtctcacacatgcatattgctaatatcattcatgtttgaggttttcaacaaagaaccaatttattaatataatgtacaaaaatagttggttcattttctgaattcagtctttgaaataaaactccttgttttggccgtgtttctgaatgtattggtgattcacccccaagctaattttttaaagtcatttttgaagttgggaagtctcatgagagatgttgaagtatgtatttaatcaagagtcatgatttcaaactagttttacatattaagcagttagtgttctaatttaatgggtaaatgtgtgtttggataaatatctgaaaattttatccttaagtatatataattatttgcctcttatatgtcttaaagctatttaaacaaggtgttaaatgagccaaaacaattaagtaattagaacagtacatttttatcagagtgtctgtcatatgcaatgaatgtatgtaatactaaaaaatcatgactacttttatcaaagaaaaaccacacattaatcctattaatcatgaaagcgtagcattgtaaattaaaggttttctttgaggctcttgaaagtgatcccattgctttcctgttttaaaaatattttatgctctttatttccacttctgtgaatgtgatatttctattttgtgattatgttactgaataaacaaacttgctacataaaattcttagcaattaaaaaaattctgattctgccattttgtctcaaatgtaatatacccttttaatatcatatgtttacatatttatgaatgattaatcatttttgtttgcattaaactttatgaaatgtcagaaatgattttactctaatgaaactcaaattttgcccaaagtagcaatattcttaaagatgttgaattttgactggttgaattttatatagtaacacacaagtcgtgatcatcaatattattgcagaccaggactctgcttatatgccttgctaacaaagatttctttcacagaggcttttctcctctcaagacttaaagtaagaattacattttattaagtcagttaaatgcaccatggcttcatatagtaatataaaaaaactctttgaagtgagaaatattatatcctaaaacctctaaaccacaaacattcaattgaaagagttctgttgaaggataatgacatactgactgcttacagaccaagttgcttgcattttgtatgtttagccctcctttgccactgcttttagagccttggaaggctaagtgtgatagtaatgctagctctaatgcatatttaaaggagactgcctcgcttttagaagacatctggtctgctctctacatgaggcacagcagtaaagctctttgattcccagaatcaagaactctccccttcagactattaccgaatgcaaggtggttaattgaaggccactaattgatgctcaaatagaaggatattgactatattggaacagatggagtctctactacaaaagtctttgggtatttgtttcttacatagaaaatgctaacatgaatagaaagatactggtgcaagaccattcccgggaaagtagacatacttacatttttttccttttctgctcatttgaatgaactcaattttatgttaaattgttatatcagagtgacaaataagtgctatggcttgatagaagtgaagctcttcacatatattcaaaatacatatcacaaactttggtaaataggatagtaatctgaagaacttttgccctttttaccccatttactgtaactcttgtttctaggtaatcgttctctctcaacaaacttctcaagcgtctgtgtaacaagccacatgttctaacaaattgtctccatcgcacttcaacagccaggtccctattttttataacgtattaaccttattattttcttattattttaaaagaatctatgcacattagcaaaatttaaaagatagagaaaaatataaacagaaaaaattatgtttacttctaccaccctaaatcaactattatcaattttatacatattttactccatcttttttcaaagtttcttacattttccaatgtcattaaaattctctgtgaatgtaaattttaaaaactgtacctactgttttttggaaatctgtaacaagctatgtgtaatcattcttctaatattaaacatattgtgtccagaaaaaaaaaaaaaaaaaaaaaaaaaaaaaaaaaaaaaaaaaaaaaaaaaaaaaaaaaaaaaaaaaaaaaaaaaaanntnntg

SEQ ID NO: 28416 - DNA, 4035 bp, Homo Sapiens
ggaaattagttggcctatgcttactgtgacatttgtcttctctgtggcaattaaaacttcaaaacattcttacaggtcagttgttccttgattctttgggtaacatggctagtgtggcaaacatggtttcatcatgcctgcaaattttgattatatttcctcctcctttcatcaaaccctgctctcaacattacctagtttgtaattaaaataggcttgtgctggggtgatccacactaatcatttgacatagttaacctgtgccactttgataagccatagcactgaccttgccttaaccaaatgaacttgacatcttgtagctttaggccttctaagtgttagtttctcttcacagtcagtctagcagtggagctttcattgacattcttcattcattctttattgtatctgcatatgaggaagccacaaagttaatattttttaaaaaggtatggactctgttttcagacttactacctacttaggggttaaagtcagtaataagtccttgagtaataaaaacgttgtgatatagactggatgaggcaagaacatacaggtagcatggcacagtgggtagcctctggagccattaagattggaatttagatcttggtccctcaactcagtggccctgtatcttacccatcctgaagcctccagttttccttctgggaattgaacaggagaggttatggggaggactttccccattttgagtttcctttccacttcttggcagcattatagtaaaggaccgtgaagactaggaaagtcagcccagaacttcccgaaggaatgaagactggagctagaccttgatagtgggctaggtcacatggagaagggaaaaaggcatggaaacaagtctgtagaaagagcattgagaacatatgcagggaagagactccatgaaagcagtgcattaaaaaatgtgtgtttgaaggggtagagtctggaatctgaaagatgggaaagaggattcttaaaatcgaggcatgagatgagaatatgagtgaacataggagctcaggcaatggcatagaaagggcagatacaaggagcatctccaaggaaaaatcatcaggatttgacgggtgagaccgtagaatgaaagaaattttcaaggtttaagctgggcgattactgtgtctatcatgtattcattcattcttagaacacttaaatggaaaacctgctgttgcggtgttctgttctaggtattggggattaaccactaaataaaacagaagcccctgctcttttgaaacttactttctagtgttaattatgttaaaaaatttagtgtcagcaattttaggatcttgagatgtcatcatctagctcatgatttttttatgatctaaaagttaaatgggaaatgtcaatgaaagtgcatccagtatcttcatgaactcagtatacagtatttccgcgtttcagaactgtaaagataagaatgaaaccgttaaactgaaaatactgaatttcacagatcaaagaaaatggtactactctagatgtagaattaatagttcaccttataattaataaatttcaggaaatatcatgaagtttggaacacctagggaattgctgagttgtaaaaggctccttttgtagactttggttgggttaaaactaggttcatttaaaaaccaggaggaagtagttaggttgaacaaggctttaatacttgatggcttttgttcatgtgagttttgtcagcttatttctgaagtagtgctatgatgttttagtgttcagttttcttcaattctttaaggtaaaataatttgttattagtagataactccttgacagaaaatgttgacataagaaataaagaagtttgaaatttagaatacagttttccatgttatgttgaaagcttgaattggaagaacattatctaataaaaattatgatgcatttagatattcatttggtttagaaaactttcctgcctttcatttaattgacctagttgtatttcatagcattttaatgataaccacaactagtcagctgtaacaacagaatataaagattatatgtaattcttttttttttttttttcgagatggagtctttctctgtcgcccaggctggagtgcagtggcgcgatcttggctcacggcaagctccacctccccagttcacgccgttctcctgcctcagcctcccgagtagctgggactataggtgcctgtcaccacgcctggctaattttttgtatttttagtagagacagggtttcaccgtgttagccaggatggtctcgatctcctgacctcgtgatctgcccgcctcggcctcccaaagtgctggaattacaggtaaaagtgcagttttaaagtgtctcctggatattcacaaaatttttcaggaaaatgacccagcgtacatactgaatgatctctacatctcagactactgtgtgtggattcagaaagtcaaatccaaaaagttggcagctcttgcagaagccttaaaggaagtctcccttacaaaggcccagctggggttagaactggaagaactagaagcagcagcactgcttgtccaggaggaagaaactgcattaaaagcagcccattcagtttctgggcagcagacactttgctccagctctgaggcaagtgattcggaggactcagacagcagcgtgtcatctggaaacgaagactcaggctcagattcagaacaagatgaactcaaagatagtccatctgagacagtcaattctttgcaaggtccctttcttgaagaaagcagtgcctttcttattgttgatggtggagtacgcagaaacacagccatccaggagtctgatgccagtcagggaaagccacttgcctcttcctggcctcttggagtgtctgggcctctgatagaggagcttggggaacaactgaagactacagttcaggtttctgaacccaagggcaccactgctgtaaaccgcagcaatattcaggagagagacggctgtcagacaccaaataattgactcttaggtggttttattcattgttgagaaatatggtagattgggtttcatttaccgaatgagaattcttcatttccactttgaaatttttcttagtatatagtcagcccactgtatttgtgtgttccacatctgtggattcaaccaactgcagatcaaaaatattgaagaaaaaatcgcatctgtaccaaacatgtacagacttttttcttgttattattctctaaataatacagtatgacaactatttccacagcatttacattgtattgggtaatataagtaatctagtgatgatttaaactgtgcaggaggatgtgggtaggttatatgcaaatactgcaccattttttatcaggggcttgagcatctgaggattttagtatcctcaggagtcctggaaccaaccccccacagatacggggacaactttatgacattgtttttcaaccaatgaatgtttataccttttgttttccttgccgcgactgtgaagataaagttcaaaagtatttttaccaaagtgtagctaatatttcaagctgaaaataatagttctactgcccgtgtctccagaatgtagagcccatcaatatttttattttaggaggtgtacttgacacccaataaactgcacgtatcaaaagtgtacaatgtgttggcgtatgtataccctgcgtaaaactatcaccacaactgaggtgaggaacggacccatcattcccaagtgcccttgtgccctgttattagtttgcatgtcctagaattctatgtaaattgaatcatacaatatgtatcccttttttggtcaggcatattttactcagtatagttattttgagattcatccatgtggtagcatgtgtcacgagtttttgtttttatgtttttcattgctgagtactgcttcattgaatagatttgttcattgacctatcgatggacacctgggttgtttccagtttggggctgttataaataaagctgttatgaacatttgtgtacaaaaaaaaaaaaaa

SEQ ID NO: 28417 - DNA, 2560 bp, Homo Sapiens
gggatgccaaaggaaacaagatttttctttatttattttaaatacctgaaacctcgtactttatattttgaagtaaggtgggattgtgtgaaaatgtggatggtttttctccagtgttggttagaactactttttttaagtggagggcaacttggtagtattagtagaatttgggtttaaaaatatcagacacatctacccagtttattttttgcctgtattatcagggtatatttaattgtcctgtggttaaacaaaggtgagagagctcagaggtttctaaaggtcaagcattttacatatatacatacatacatgctcttggaggcagctatatcctgctttgatttttatgcacatgagccctatagggttatatactcatctaactacacttcagcatccccagtgcccaagaaattggaaagtacaatatttggtttgagacattcttcataaaagattctttattataaaaatttacctcatttacatttaatgtgatgatcttttttttcctttctggtatatttcccactgtactgtttggtttttgttattctcttgtctgtgggtagatttagttacccaaacatagaaactaaagcaattgcttttttcctctggtcttaaatatgtttggacaaaaagacactaaaaggtcaggcctaggggaaaagtaccctggtggaaattatttttgtaattcttaatatttttgagttggctccgtttgtcagttttaaaagcctcaaaaattatgttaaaaaaaaaatccagtgaaatcccatttagggcaggccgatttgttagaagtcactgatgctccagtaggcttttgttataatcaggcctgtttcctgagtatgtgcctcttttaaaagaagaaataattagctgtatagtatttcagtactgatgaatgaatgaatgaatgaatggcagttagtggacccaaataagtattcagtggtatataaatattttaggactaggtactgaattaggtgctctgagttggcaccccgaaatgtttggaatcacgactatgatttacttaaacacgtaacacattcaaggatatataaatggagtctaagtattttgcttttgaagagaataatctatgaaatggaggacttgattttttttttcattttttagaagtaatacacatttatgattgttggcacataaaactatgcaaaataattctttttaagtatctgtaagaaagaattggcagtttaaacggattttgcttatttatgcactacagaatgcagcatactgtattactgttgaggctgcttaataagtttaccaatgtgaaaagcagatcttgggtataagtgtatgcctgatttgagcttttaaaactgtgcagtaggtgtatggtaatgttttacaatcctatgtagcaaaataggaaattatgaatttttgttgttattgttttaaagatttaagatggattggggtagggaacagctggagccaggtataccttctagtatgtagagggaaacaatgtttagataggaaaaaggaagccgtctgtttacagttaactttatttcatggacttctacaaaatgttgtattaatcactttttctagttcaaggaatttcaattccagggtacaaaccattgatttaaaaattacgtttccattctttttagtatcagtttaaagtaaatgcttaccatcagccagttgctgtcactgggaagaaggcaacttgaagtatttactgataaaatagcctttattcccaagtgtgacttttcttcagtgtctacatattatgtcacacgttctatttgcactgctgcaatatagatcaaagatcttgtggcataggggtaggggagtgttagtatctcccttgtcccatttgttctgttactgcttcattggactgatataccctcatgaacttgcaatcacctaaatggaagtcttgaatgtgtcaccttttgcttggttatttcaaccatgctgctatatataatcaggtgtggcacagtttgtcagtttgattataggtgtgagtggatagaaatcattacactgtgctgttaacgatccttgtctgcttgctgttacctactttttacaggcatcataataaaagctagactatttctttggggggaaagagacttatttaatgtaatttaaaaaacttttccaatagaaaatgaaatattattgaaaataatatctattttttagctttcagcaattgatggtgctttgttgtggtgtctgctggaagtctactgccattatagggaaccttgcttgttagcttctctagatctctattctaaacaatctgttagtgatgataaattctgtaggagggtctattctgagccgttaacttcctgtaaggggaaaatgggtgggttaccagaaataccattgaagcagggtgggctgtggggtggaaggttggggtatttgtcttgagaattaaaaactacgaaacacttttgtacacaactgattttttaaaaaataaacacatttttaaagataaaaaaaaaaa

SEQ ID NO: 28418 - DNA, 7153 bp, Homo Sapiens
gtttatatggattcctaaagggcatttctaaatgatccctcatggaataggttgatattaggagattccaggggaaattattatttagttaagtagcacttactttgttttaaatttgtggaaaaattttgctaggtgcaagtggaaataaaaaaggctggtacttgctctcaagtgtgttccattgtgtgagaaacacagacaagaattaacactcactgatagtgcactgggacccaaaagatgagctgttgttcaggctaagagaaatcttggaagacttcccacgggaggcagtattttagcatttagatgaagaagaaaactccaggatgaaggactaacacaaaagcaccaacacacctttggggagctgtgcctaaagctgaggctggagcccggccatctttccctggcttctgtggatgggacaggtagctctgcctcactcactgcatgccactctctatttccctggggtttgagatggatctgaatcaaatgtgggggcttgggagtggcaaatacaatgggcctggagaagcagacaggactgtggctttgtgctttcctgccaaggagatgttctgcatactgagaacactcctctaagtgtgaactattgacatcatctgccactaactcataaagagttgagcaaaggcaaaagaaaatggcctaagtaccagcaccacctcaaaattgcctatcttaatgtcaaacccagaaaagaaatggctctctgcagttcactgcaagtagcatgatgcttgaggactgtgttagtttcttcaggctgtcataacacagcatcaaacactgggtagcttgaaacagagacatcgagtgtctcagttctggaggctagaggcccaagatcaagctgtcagcatgaaggattacttctgaatcgattccatgcctctcttccatgcttccggtggctgggtggcaaacgttggcattcttagtgtctgctgcctcacctgcatctctgctttcatcttcacgtagcgttctccttgtgtgcatgtctgtgttataaagtccctgccccttttttcttttttgagatggagtcacgctgcgtcacccaggctggagtgcagtggtgcaatctcagctcactgcaacctccgcctcctgggttcaagcaattatcctgccttggcctcccaagtagctgggactacaggcgcacaccaccacacctggctaatttttttgtatttttagtagagacggggtttcaccttattggccagactggtctcaaactcctgactttgtgatctgcctacctcagcctcccaaagtgctgggattacaggcatgagtcactgtgcccagccaagtccccctttttatacaataccagtcataatggatgaggagcccaccttattccagtatgacctcacattaactaattacacctgtaattaccctagttccaaataaggtcacattcagaggtactgggagtgaggacgtgaattttttagaaacgccattcagcctataacagtgaaccttcacttcgacatgcaaaaatctgtattttgtttttggcctccttcctgtgatagttaacattctaactcagataagctggttcttccagctgacctccttttgtgggaagagatcctgttatatatgggaaagattcctgttatttatgtgctgtttactcccacactggtacaggctcttgcggccaacccaacaatccctacaatgaaagggtgagatgatgtgcgccatgtcccttcctacttcatgttaaggcacttccaacttttccatttcttgagtctttgccatatgtcatcttcataatttgaggtctgtttgctacaagatcaggagtaattttggctgctagtaggtttcaggagcccatcaggtgctctgtttggactgataggaactagaacgtgtcacactacaagagactctgaaatctgtctcttggagattccactggacaagataaatacccatttgtctagaagagctcacatgctgttttgagtagatactaatgacttctgggggctgtaaataatcttatgattttagatattatttagacaatttaagaaataatataagcgtatcttataaattaagaaaaaaacaattggctgttcattgttttagaatttattaacccagaagcagttttgcaaactgaaatcttgctttagagaattttgaagttctccatgtccacaggtccagtaaatatttactcctatcttgttaatccttgcctcttctgggtctggtgtccccatccccatatccaccccttttaccaagggaaatcaatttgtttcttttaaaacggcagcttccatgattgggtgaagaaacagagtgaaaaaccgaagacagtgggatgccgtaaggtttgagaactcttacgtgggagctggaaggaagcttgccttgaagttgcaactatgctaccaaaccaaaaaaataccaaacaaacaaaagcaaaccctaactactttgcattcagctattgtgactagtcttgagtggatataaaaatactcctaagaaaatgattgttttcctttaaaatatgcattattgaaaggcttgcagcattcttaattgatcatcattccttagagtcaaaatgttttccaagggaacagatctctaatgtggcatttactaaaaaatattgagaaaatgtctttcaatagagaaatctgctttgcaggaaaacatccaggaactcacctactctgtaaagtggaatatgtctgcataaaatgacacctctgttttctcttcagcaccttttgttttgtgggaacagggagccagtccaagccttctgaaaatgcttgtatatctcagggacttagcaaatactttgcaccttgaaagtgaaagaggaagggaaaaaaatgataaagttttgacttccaatctcattaacctaaagagttagtcctctgtgcacacctggaaggcatagaaaccaagttggaatgcacacaaacaaatcagaagcacttaaatgaaactcaaaagatattttctccaacccctaaccatctggttctactccgtaaggtccaacaaaaaccttaagttttttgttttttgtttgtttgtttgtttgtttggggggtactataattttaaaaaattaaccttaaaatcagagagtcggttgggagttggaaatattttctgtattggattttatttacatgatgcttaactttatggtctttgagggtcaaaacagttctccaagtactaataatcatattattcatatgctttcttcattgaccacctcttatcttttcatgccaattgtattacagcagctgtctatgtggtcttcaaacttctagcctatctgtctatctgcctggatctccagactttctcacataacactctcaggttcattttgctaatccactttcagtgtgtgacttctttgttcaagacccttccctcttgcctatgttgtaaagtctgaatctggccaggtgcccagggctctctgcagtctggctacaaataatctttgcagccttatggcctcctgtccacccatgtaacctctctattccagccagctaattcactcacccttcccgagtcaagacctctgctttgctatcttcctgtctttacttatgttgttttcctgtttcctccctcctaatcctttcacttctaaagcccacatttatataggctctacaatctattctgtatcttttagtaggtaaacatacatagctttcaataattatttgacttttctggttttgcttctgtctcccccaaaagattttaagctcccttagatcagggcttggcttatgttacacctctggtattctccatagcatctaatgcaaagataagcatatcataagtacaaaatatatattttgatgtattgatttatccatccatgagatgggaattgtatggtattattatacatactagatgcttcaacttctgcttttgcaaagactgtgaacgtaattggtttaaaaactcagtactggaagcttaataaattagctgtcagcctgtttttgaataaaatctatttattccaagtacacctaattttttcccctctaagtgcagccagtcaaaagtagaagaagtggatagcttcacctttccattgacttctgttgaggattgaagagactgattagatcatgagatctatgtgaggcataccttcaagaaagaggccaccatatagatggacagttgagaggtataagtctgtagaaggcaatctgcaagataaaagagtcgttttttggagatggggacaaggtctcactctgttgcccaggctggagtgcagtgacacatcctgggctcactgcagccttgaccttctgggctcaagcgatcctcccacctcagcctcctgagtggttgagatcacaggcacgtgccaccacgcccacctaatttttgtttttgtttttgttttattgtagagatggggttttgctctgttggccaggttggtctcaaactcctgagctcaagtgatctgcccgccttggcctgccaaagtgctgggattacagttgtttaccactgcacccggccaagagttacatttttaagagaagactttttaaaaagtttaactgtatcatatagaggggcttaaaggagtaaaagcactcaaatagccaatgagcaaatggcagagtaagcttttccatctcagctaagaaaagttaaatcgataagtttactgtgtttattcctcttaaagttgagccttctttctccacttaaaagtattccctttacttccttccaccacttgttcttctaagtaaactcaggggatatcctatgatccacatcatagaaactggtcaggatgagatcatctcagaagtttcttcttgcagtcttaatattttgtgtatctggggttgctttgtttccagtcttggtgttgacaggatggctgggatatgtttgtaaggtcaaaactgttttgtataatattaagttcacaaagttactgtgaaccaagcttgattgtaacttcatgaatagaggcagccagaaagagggaaaaaattggctttatttctagaacccccagcccataaattctctctaggaggatatcaaactactgagtattatatcatcagaaaaagcatttgtgggctaggaagatctcaggaagtggggaagccgatgcaggcagctgtctttagaaatgattaagaaatcaatcatttcaagggttccatgaatagcatgaagtaccatccaataatcacttctgtctgcatcaacagcttaagattttttaaactattaagattttgagattgcaatacttgtttattcttcagaagagaagggacaggttgggaaaataattaagtcttggatctcatctaataaccattttttttttatcccttgcatactgcagcttacttttttgttacagtgtttgcatttaaacggaaacatcatcgtccaggaacaaatgtggtcttttcatattatttgggagaacagcaggacttcagtgagttggtagcagtacaatagctcactcgggctactgcagtctagctgtagacatgttaattaatatatttctctgacacctaggtgattgaaatagcaattaaagagtaattaaaatgtttacttcttgtaggaatgtcaactaagatgtggaatatagcaattacctatgacggattagaggaagatgatgaggtctttgaagtaattctgaactcccctgtgaatgcagttcttggcacaaagacaaaagctgcagtgaaaattttggactcaaaaggaggacaatgccatccttcatattccgccaaccaaagcaagcacagcacatgggagaagggcatttggcatctgctgcccccagggtcttcctcatccaccacttctggttcctttcatctggaaagaagacctcttccatcttccatgcagctagcagtcatcaggggagacaccctgcggggctttgattctacagatctttctcaaaggaagcttaggacccgtgggaatggcaaaacagttcgtccatcctctgtttatagaaatggaacagacatcatctataattatcatgggatagtttccttgaaactggaggatgacagtttcccaactcacaaaaggaaggccaaagtatccatcattagtcagccacaaaagacaatcaaagtggcagaactgcctcaagcagataaggtggaatccacaactgactcacacttccccagacaggaccagttgccctcatttccaaagaactgcactctggaattaaagggactcttccattttgaagaaggcatccagaagctgtatcagtgcaatgggatcgcctggaaagcctggagtccccaaaccaaggatgtggaagacaaatcctgtccagccgggtggcaccagcactcaggctactgtcacatcttgatcacagagcagaaaggcacctggaatgcggctgcccaagcttgcagggaacaatacctgggcaaccttgtaactgtattctccaggcagcacatgcggtggctctgggacattggtgggagaaagtccttttggataggtttgaacgaccaagtgcatgctggccactgggagtggatcggtggtgaacctgttgccttcaccaatgggagaagagggccctctcaacgctccaagcttggaaagagctgtgttttggttcaaagacaagggaaatggcaaacaaaagactgtaggagagccaaacctcataattatgtgtgttccagaaaactctaaatataacagaccctacagggggccacctggagtttgtcacctatttattcacaggatctgtgaatattgctccatagaaaacaaattgttatgattgagtgggtatacctttgtgattctgtctagtgaaaatgggacatttttaatagtgccagaaagattgataaataaatattttttacaagataagatacaatttttgtatctcaataccttttaaaataaatgccagcagtattaaaaaaaaaaaaaaaaaaaaaaaaaaaaaaagaaaaaaaaaaaaaaaaaaaca

SEQ ID NO: 28419 - DNA, 3742 bp, Homo Sapiens
tcattttctttttctctctctctacctgcgctcttcgagtgtcagaaacctttaaagctgttactatggaattgcaaaaaagagatcaagtgactctttcactatgctggtttcccttgtgacccagatgaagaatcaattcagaattcagttcctcccttggcattgcaagacacagaagaaactgtcacttcctaacagcctagtactggagtaaattcagtatgaaggaagaaagcgctcctgcgtgttagaaccttgcccatgagctggaccgaggacaggagatggactccaggaaaattggatttcttcaagcagcctcccttggaaatggaatatctttaaaatcttctttgcagaaagacagttagaatgtattaatcagaatagttgaagacttattttcctttttattttttttcaaaatgagcattattatgaagccgagatcccgatctacaagttccctaaggactgcagaggcagtttggtaacgttcttttctctcatgcttttccccttttctcttttaagattgacgtactccttgagtatttagtaagttgtgtgatgtcgaggctttgtgaaagaaggcagtattggcggctcttttattctttattttgttcccaaactcatgtgctttaaccaaatgggtgctgattttttttttaattcctcttggactgtaacaatttatctgatgataatttttaaaggaggaaagaaacttgcagatatgttgggagttttgaaaatgaaaacttgtcatttttcagtgtttgattcagttgcttgttttcttatcttctttgcttgctgcaagcaggctggtggttgacaggctttgcccttgtctttaaaagcaataccctcacttttagcacagatgtgttagaaattaataatgttatttatatttaatcatacacatgaaacaaacttgaatttaactatgtggctaaatgtatatcaagttgcttatcattcattcatctcttatgttttattttattagaaatgattcctagtaattatatttttggttattttaatgcttttactctgatgaaaaaatatgtcagtttcaatgtattctaatgttctattatttccccaatggtgatttgatatgctaatcagcatatggcatggcccttaaggagtattttccaacaaagtaacttttttttctacaataggtatttacaaaatacttttatggctattttaggggttagtcttattttgtttttcttagtgattgattataaataactaagctcacctctttgaaatggaaataatcatacctcacactggggaaataaaagcaatgattgaagtgaggtggttgagaatgggaggaaaacaggccagcaaaatatgcattatcatgtgagcaggcaaacacacatgtaaatactcaaattatttgcgtcaggaatttagcttgtgtttttgtggataggttagcctttgctgttattgtagtgttttacagtcaaccagaaacaagaattgccccatccgcagtatttctgtgagttttaataaattatagatgaagattttgtctcttaacgttacttgccatttcttacaaaataacacgtgtaataaattattccttgagtttatttaaagaaaagattgcatctgcaaacaaatttggagagtcctgtcctttttttcctcaaacaataaatactggaaaatccttaagatccttgtatgaattaccatagctaatataaatcaccaacatgagtaaacagaatttataatatacatgaatttaactcatttataatttataccattcctatgtgaaaagatgttactactttaaaaatagtgtttaaccaaactatttctctttttgtctaaactgccaggagatgtattttcaaattcaggtttcaattggaaataatttgttcatttcaggagatgagtaacattgacaccctttacctctctgagattatcatagtctatttttatccacaattattatattttttgttttaaattgtatgggatattttcataagtcaagccacaatttaaaatgcatttttaaatattttgatttgttaatgtgtgtatttttccatttaactaaaaatattctccatagacttggggatagaatgatttctgtgtaagaaataaatctctctctatatatgcatgattcttagatttaactacacactatagaaacctctccagttattaatcttacatctgacttaataatataaccgcttgggtatatcactgcagctgccaaaaaatttggcctgagggtataatcagctgtagtaacagttttgccattttattatccgtctatcagtcaaatattagacacatctattatatttatttatttaattacatgtataaaatcaatatagattatagatttggtatatagagaaaaatatgtttgtgtgtatatatatgtatacacatacatacacacacacatgtttacttgagcattaaaaaaacccaaacggcctctcttcttgtgcctctgcacataaaggccacaggcctcaaattgctcagagggacaatgttttctcaccagtgttgctgtctgcatttctccaccaccaccctaccctcattccttttcagtcgacttcctatgagagagacctaaaactttgccatttatctctttttcagatgtttatttgtttccaggttgatctccaaaatactttgttcttgggacacatctttctggctttaccatcttcactctgattacataaatctattttgtgttccattggtctactttctccaaatctgtctactgtcctccgggattccctaaagccaaacattacgtttggaagtttgttgtattgtgcaagaatccaatgttttggattacttctttacctttttctatttgtttctctccaagtatcataaaaagcagtccacactaacttgtccttacagccttaattaaattgctatgagatattcacattttaaatgggatttcatggcaaacttgtattttatacccttcctcttattaaaggtcagcctgttataattaaaattttattaatttcaagacaaaatacaaataaccttaaaattaatctatttgtctctttgtaacataggtgtccaaatttagggtttatttaataaaggtgtatactaggttgcttttatttaaggaacagttatttatatgccacgttctagcagaaagtgattatagtatttattcttaagcattattttaaaaaaatgtgcctgcatgaaattgagaaaaactttatatattttcttatgctcataaagctaataaaattagcagattcattgattgcagaattgtttgcctttcttgcatatcttaaattcagatttagtcagttgtcatatactatgaaaatattaccttacatattccttgatatctctttaacacttttataaacatttataaacatttcccagggatacttctcattaatgtaattaagacttgtgatttagtttaagtaagtaaaacattattagtcttacaaatataaatataaagagaagtttagtcaatggaagtggactttttttctttcctgctgacagaacagtgtttaggatttatgtgttacatgtaagatcattcattatgtaatctgaaaataaaagagatgctactgttcagaaaaaaaaaaaaaaaaaaaaa

SEQ ID NO: 28420 - DNA, 5554 bp, Homo Sapiens
caggaaccaccttggctggggatcccaccagacccctcactgcctttgtcattacaggtactcaatcagaggttctcacttgtctaacacagagagaaaaggagataagtcatcttaaaggaaaattcaacaaaaatacaatcttcactgcaaatgtgtactctcttatttttaattgacaaatagtaattgtatatatttatggagaatagtgtgttgttttgatatacatatacattgtggattgattgaatcaacctaattaacatatcaatcacctcaccttatttatttatttatttatttatttatttatttattgtgctgtgagaacatttaaaatctactcttttaggaattttgaagtattcaatatgttattattaactatggcctcaccatgctgtgcagtagatcactaaaacttattccttctgtctaactgaactttgtactccttgaccaacatctcccctttcttcatctccccaaccccagtcaccggtaaccaccagtcttctctgtgcttctatgtgttcagctttcttagattacacaaatgagatcacgcagtatttgtctttctgtgcctcgattatttcactctgtacaatgtcttctgggttcatccgtgttgttgaaaatgacagaattttcctcttttttaaggctataaagtattccattatatatatatgtgtatatatatatatgtatatatacacacatatggaatgtatatatttatatataaatatgatctatctatacaccacattttctttatccattcatccattgacagacacaggttacaatacattactcatgatagccaagataatatatgtaaacttctaagtaaagagaaagcagatactattataaaggagaggactttcacagctgctcttaggaagtggagagaacgttctcaagagttgtataaagcttttagggttttttgtgcccagttttattggctgttttatccctagtttagagattctgcctaaaaagtgactcctaagttagtaaaggcctaagatcgaaatcctgttcataaatcatgctaggtaacgcagttcatatatgtgacaaaagtataaccatctttttctttaaaaaataattattcttaaaactgacaacacagatgcagctagatgcagctaatttgaaattcctgtctccttttttttcttttgattaaaaaaaaaaatgcatttaccagtactgtcagaaaaaaaaaaaaaagaaaaaaagaaaaaagaaaaatcacctagaaaagagacgctgaaccttctccactaatcctccttatccctcaggattgccatcactgattggggttggctttgggtatggaaagaacgtagaacttggagtcggaagacctggttgtatatctcagcttaggcacctagcagatgtatgacctaggataagtcattaacttctctggtttttttagatgtgatcggggttggaagattgatgaaggttcaacctcagatggcagataaatttcaagtttaattaagccctacccattcactcaacttgacttcttgaacatttgccaatgttcaatttggcaaatgctgccaaatggtggcagcaaaaacttcaatggcaaaggctgcacatggtgtcagtttactaaattctagcccaaaaagcctcagaaaatatttagaagtctcttccttttcattagtgataattttcagaagacggactttgccatctgattttcacattaaaccaggtctctcccagggtctaaattgccatcactaagacatgtcaattagtacaattaaatatttaattataggcagcatggtgtcctggaagagtgaggattttgagatcaagcttttgtggtttctaaacctctcccacagctttttagctacataattttagcaagttcttaacttgtttgaaccctaatttccttatgcatggagagaggataccacaggcacttctgggagccttgtctcatagattaaatagagttggtgaaatttaactgcctagcatccagtaggaattttatacatgctaggttctttctgctgtctcccaacattattaggaaagtggctttcttaaaaataaccaataaggctagatagaacaatagacctatgcaatcatgaactccctctcgtttttaagagaactttggatgtgttttaatgtaagattaaaaaatgagtattttttcctatccagttacctaatgtgaattaaatcattcagatgagtcttcaaatgcagaacatggtaatttcttaagggactgagacaaggaggaacgagatgagattctcactcctcaggaggggagaaatggccacagatcccatcaggccattgcttgtagcggcttgcaggacctcccacataacagaagaaaaggaagctgagagacccagtcttgggaatcctagatccagttacagcattgtctcagctaatccatgatgtgaaaagattgcgttttaaaagaagcatattaaaaaagaaaaaaacaaaacaggagggactcttaaataacaagcccttgattgcctaattagcctgaatgccctcactttcattggaattcactgctttgatggtgtggaggtgcaaagaggccagctatcaaagagagatgccacttatctaaacaaaatccaggaacagaattcgagacccttgtctctcagatgaagattgtttgcccagtataagagatttcatcctcgcttttgatagaattatgattcttgggaaatctttacgtggaaaaactgcctcagaataaacaccaagtgtttcaaaatagctacaggaagtccaagccacagcaaaatttaaatctctatttacaaaatgaaggtattcattcccttattcattcagtcaccaaacacttctttttaaaacatttttctttatgtctcatggattagaccctaggcattagtgaattaatgcaagagcatttatctctttgtaagtttccatttagctgtaatggaaaagaagtgtctaaactagatgcagctaatttgaaattcctgtctcctttttttcttctgattaaaaaaaaaaatgcatttaccagtactgtcagaaaaaaaaaaagaaaaaagaaaaaacacctagaaaagagacgctgaaccttctccactaatcctccttatccctcaggattgccatcactgattggggttggctttgggtatggaaagaacatagaacttggagtcggaagacctgattgtatctcagcttaggcacctagcagatgtatgacctaggataagtcattaacctctctggtttttttagatgtgatcggggttggaaggcaggtagcaatatctaccttactgtatcattttgaagactaactaggataacaatgtgaagccttgtcagttggcaagtatcaatggaaacttagccaacataagctcactccttttggatatcccaatgtgtgaaaaggccctttagcacctgagaaatcagaatgcctgggacatacatgtttggtgaacgaatgaaggagagatggtgacagaatttactaagacccagatgtgttcttgttttctaactttatccaggaaaataaacagcaaaagatttagcaaatcttatcatttcttagtgggttataaccatgagctattaattttgacacaaaaaaaacttacctcctccctttatttcagcttgtgaggatatctcactaattgacttcattaatttgattcaaactgtgcactagaagtgggatagaaacacatgaagtataccggaaagaaattatactcgaaaaaaaaaaaaagagctgaaggcagtgggaagtagacaacgggatccaaactcaacaaaatgcaacctatttgtataaagaactacatggcctttggagtcaaacctgactaaaatcttcgctctatctcttcttacaagcttgtaactttagctaagtcaatcaacttctttgaaactcagtttgctcacgtgtgaaattagaataatacctacctcatgggctattaagagaattgcacaagataacactatctggcacccaataagttcttactgaattttcattttctaagcatataacacaaattgaatgatggacttgggtatctattggtgttcttggaaacgtgtgctatcctgacagagtcagtgctgctaacctgagttattttcactcctcccttctttcagaggccctgccccttctggaaaacctaaccatttccgacattaatccctacgggttcacagtttcctggatggcatcggagaatgcctttgacagctttctagtaacggtggtggattctgggaagctgctggacccccaggaattcacactttcaggaacccagaggaagctggagcttagaggcctcataactggcattggctatgaggttatggtctctggcttcacccaagggcatcaaaccaagcccttgagggctgagattgttacaggtatttcaaatcaagtgagccatttgttcctcttcctggtccccttctgtgtaatctgtctaccggatcgccatgactttaacatctttgttcacattccctacttaatccataaatgtagcctactgtttcaccttctccccacactccctcttgtcatatgtacttaatgaacactccccactcccaccccagaaatgagaaggtcgaaatatttctgctttgtattcaaaatcctttagaccttgtcttgtccatagctcttgtgtgcttacctcatatcatcgtcccttgtgatcaacctggctggtccccagctacatttcagccttctcaaaagaaatataccaatgagtatatttccaaaacgtatttaaaacttttgccatctcaaaatctcaaccatgatcttaacaaacttacccagtgggctcgtcattggaaaaccaaatgtgaacttattttatcggtaatcactaatatcagagagactctgcaacacggactaaatccataattttctcaagactaatgattcctacagaaattaacaacggaatagtcaaacatctgtgtttcccaaagtctttctagagattactagctccacagaatgttcaaaggtcctactcggtgaggaaattccacgttcaaataagtttggaaagactgagttaaacaaagttaaagaggatctttaactgcacggcttttcagaacaccctaacgtgcatcatctccaagaagtacttatccaggcagtattttccaaacttatttgacaaaggatactttttaaggaagaggatcaaacaggaatagttcactgtgagcacactttgggaaactcagctctaaatctacattgacattgagttttgtctagttaaggcaatgcaagatgaaaccctgggtccacagtatgtagcacaaaaggttccaacctcagttctaccatctgaacatttatctaatagttaataaaataacaagaaagaatgcaaaaaaaaaaaaaaaaaaa

SEQ ID NO: 28421 - DNA, 3681 bp, Homo Sapiens
ttttagttttatgagggaataattgttccaacttctatataactcaggaatttactctcaaacaacactgtcaattagttacttatctctctggaaatgatctgggaacatggagaggaaagggaggaaggggcaaaatctgaccacttaaatctaagcatattagatcattttatgctagaaagtcctgaatgatgtgactttcgttcttgtaaaacacctctttccatagattcatggcccaaacagtatataaagagtggggaaggaactgcatttgcaaatagttcaaatcattgctccatcttaactacgcagttcacaaagtgtgaagaaatttgatcatctcaaaaaagataatggggaaaaaatatgttttgttctgtgactttaaagtcttgcaatattttacataaatgataatgggtgctttaataagaactcttgatacttttgttattgtattcaatatatgcatataatacaacaggatgatattgttttggatttggaaatgtattctttcttatgcaatcttatgcagtcatactgcttgaatatcattacctgaatttatctttcttttttttgttgttgttttacactctacttatttggtgcctgtcagtcttctgtcatcagtttatattctactaaactcaaaaagacaatctcataccttttgtaattgtaggcattctttactagatttttaaatacacttcaaaaattcaagtgctttgatttcatgccatcaagtagctgaatctatccccccgtctctttttaatttaagtgagtagttcaatttctgtcactttctactttgtgaattctaaatcttttaaaaccatcttgccatttttcgtgcacttacccttacagaaaactctgtgaaacactacttatctctacttttatgtttttaactccttttttatattactattccctctgcattctaaatgcacatattaatttgttctttttattctctgtagctcttctcagtgtatgaattcagtttcccatcagtctccatacaattaaaaaaaagttgagtattctgttattttaataagatatctagtgcccatattctaattctgccccttatttttaatataattttattgttgatttaaaatgacaacagtttcaattcccagaaagtgaaaggaaacaaaggaataatattatgggcttaatttttatcagtgaacttgtaggtgaagaaaagatttggggaaggaaatgaacatattatattgcaaaatagtaaggaacaatcagatgtgttttctagtctctggaaaagcatgtttcaagaaattcaatgaaaagttcatcatgcttgcttagattgttgagaagcaaaaatactgatgaacatttggaagcaatgagaatgtaattctaatcatactattttaataatgttgcaaaactctccaaacactactctgtgtggatgtctttcagaatatgatgaatactagtagtcttattctgcccttttctctctatcacaatatatacattctatattgcatacacatattttccaaatattacatataatttcatgtaatttatagacctattaaggcccaaccattttcttggataggggattctttagaagtccagcttaaataaagctcgtatagaaagtttttttaaaatttatacataatcacctaaagtaaccttatctactgaactcttagtacatgctaccggaaccttttatcatgtttcttcctggcttgcattacaacactgttgacatatctcagccttacttctaggcttctttgagagcatgactcatgtttgtattcctcactgaggttgaatgaataagagaaactacagtagtaggaaaaaacagtacatgtagatatcaatgaatatgaaagggtcaaatggatctattatagtaagcacaaaatcaactgacaccagcaaagtaaacccaaaatttttaatggtattttaatagatcaagaggagcaagcagatttttgagacagttgtctcctactttctctatcacagggagtaattttaaaagaaaaatggagggtaagtttctttaagagaaaattgtagtttaaaacaggtcatgggataattagaaataatttaatttctttagaggattttaatctttcaactgcttgcaattagatcctaaggcaataaaagaataaggagatttggaaaaccattgtctgtaatctctgaagaaaagtggacattaggggagtcagttgaaaagcaaagctatcaccactttctaaagaggaaaaaggtgaacctcacaaactatagaccaaaaaaataggacatcgagagaaagaatatgaagctagcataggttcacaaagaatgagtcaaatcaaacaacatgcattttttatttataaagcatgacttgttcattgtcaattcatgttagcttaatcattaggcattaatgccatcactgcaatgcatatgtcagcaataaataatcaaagaccaggcttccatcattctgtttaatatcttcaagtaatgcttaagtttgcaaatgctcttttaacacattctccatatgcagcctgcccagcactgcacacaatagacctgttacttccccctcacgagcactcctaatatttcatgtgctcatccaattgacttctcccactggtgcctcatattgaatttgtagaatcacacctgctcctttttcaaaactcttctgagttttttcttaaataattcactgaccccaaagttgtcagatatttgaagactactcgcacaattttaatattataaatgtataatgtaaatgtaattaagatttgtataatgtacgatgtactttggtaaataaaagtatgctgtgaataaatacgtatgatacaattcaaaattttacataaatatgtgataaaatttagctcatattcttttttttttttctttgagacggagtctcactctgttgcacccaggctagagtgcagcagcatgatctcagctcactgcaacctctacctcctgggttcaaacaattctcctgcctcagcctcctgagtagctgggattacaggtgcccgccaccatgcccagctaatttttttctatttttgttgttgttgttgtttttagtagagacggggtttcaccatgttggtcaggctggtcttgaactcctgacctcagataatccacctgcctcggcctcccaaagttctgggattacagacgtgaaccacggtgcccggcctagttcatgttctttaaggacaattatgaatatttttatgcactgttaattttcattaagatattgatcaattaatagctatatatgttctataaattaatcctatctagtttcaatcttaaattgtttgcatatactaatctagtttattgtttgcatatattttatagtgtagagattaggcattttaataaaattttaaaatttccaggacatactgttaatgactatgcttcctactataggccataattaatttttttctattgtcaacaatattttggtagggatgatcaggaaataaggaaatgtttccttcatttgttaacaataggtgtttggggattttaaaatgaaaattgaagaagtaaaagacaaaaaaaaaaaaaaaaaaa

SEQ ID NO: 28422 - DNA, 4437 bp, Homo Sapiens
tgtgtgtgagagaaagagagagaggatggagttgggcaagtaccaggatcttcagagggaatcggcaagctggagatgcaggccagcccatggttttgttccagtctgagtccaaaggcctgagaactaggagcagttcccatctgaaggccagcaggctggaaacccatgaagagctgatgttccagttcaagtccaaaggcaggaaaaaaaactgatgtcctagctcaaggcagtcaggcaggaggagtccctctcactcttgggaaggtcagccctcttcttgaaaacaaaagctttcagctgattgtatgagggcccctcctccatattggatcatccaaaaaccctcacagaaacacccagaataatgtttgagcaaaaatctgggtaacccatggctcagtcaagttgacataaaataaattgtcacaagcctgttgagattcaagtttcagaagtgctgaataagatgaactcttttgaattaggtgaattagatgaacgctttcagctttaaatttttatgattatgtgaattgactctaaagcagtgagggaatcagagaaagaagtgaaaaaatgggggagtatatggaggtaagcccaatgagccacaatatgtgtgagttaagatctttttgagaaatgtaacaggcaagctgcttattaaaaatgaacagtaattctgattgagcaataatgtagttaaattgagcagaatgagtttcctatattcctacctagttggaatgtaagcaattggcaatgggtccctggttctactgtgagacctgtagcctcaggaaaatcacagatcattctagagcagggctatccaatagaactccccgcagtgatgagaacattccacatctgcactgtcctgtatgggtggctaccggctacctgtagccgctgggtacttgaaatgaggccaatgtgattgaagagctgaattttaaattgtatttaatttcaattaacatttaaacagccacatgtggttagtggcaactgtaggggacagcccaaatctagggcatttcttttagctcttaagatagaaccatgtagtctccagctagggaactgctagtgtttgccctgactcccaggggggtatgacagggtcccaacagccttatgcctgaggaaggatcctgagtcatttccactcaccactaccatttccaaccccatcaccaacaaaataaaactaagccagctcagctctttgagcttctggaaatatttgcctgtgtcctggcacatcgtttttggaattttagacctgtgctttgtttggcttcaggacctgtatgaggctggagagaagaaatgggggacagatgaggtgaaatttctaactgttctctgttcccggaaccgaaatcacctgttgcatggtaaggcacttacttcatttcccaaagaaaaggagtgaaagatagcaaaaactatattgcccataagtagttgataaccttcctccttcagttggtacaaagaactgattgtacccaagtgtcttagattctcaccctggaaatgtattagtccaatgatgtatatgaaagctaatttctgaaagattaattatgaataattagaaaaagtgcatgtagtcatagaagtttggcattcttgtttctaggaaactgaccttcacagtcagtcctttttctaaagtagccccagtattttcattctaatgtagttacatatgaaagtaatctgtagtagatcaggtagcaataaaatagcaatgttggttgatatttattcctgtgtaatatccaagctgtaaagctaatacaagtgatttctttaggggttatgttgtataagatgaatagtggataatttcaaatttgatatgtttctaatttgtttctgataaatataaactttgtaatgtgattttaacttatttgggggaaagatactagacaattttagaatatttgctgtcaggttcatattcttttaaacaagcaagtaaggatataataagatatttcatcttttatacgagttctttagatctttaagtacattataattttataaacccacccaccatacccttttaatcacacacactgatttgcaaagcttgtgggaaatttgagaatgagtttgctaaattgaaaacataaagcaattgagaagtacaacacattctgaagttgtaattatttcaggtttttcacagtgacaaaaaaacaggtgattactcctgttaatcaatatcccgggctaccatcaggtacacaaacttctgactcagcttctttcttcacttccttcccttgcctggttacaaataacaggaatctccccctggtggtgttttccaagaactgcaggtcctcagaagccgatttagtgcataaatgcatttgcaagaattttcacttctgggtacaagtcaatagttaggcagttatgaaatatctgtttgtaagccactgggagaaaatattttaagcactgtttggattaggaaaacttcataattgtcttaccaaccaacaataatggtgagatttcataataactaccgttttgttaataatgttctattttctaggtgcagtgttaagcattttataagcattgtttcttgcaacactcaatggagcagtaattattttccccattttacagtggagaaaactgaggcttagaaaatgtgtcaattaagttctttgattccaagccacacacactgacttcaatttaagtaagaaaagatgaaataatatagaatggcacaggagggaaaatggaaaatactggtagctcacagatttgaacagacagctgaacaccttcaggaagaacagaaatcaaggcagttctgggggtctcagtagaagggaataatggattttatttctaaagcagagtttctgaagttcgttttctattaaaaatgctaaatattgaccccctacttcagactggctgaattagaatctctgagtgtgacacccaggaagtttaataggtttctctgagggtaaagatgatgcagtgcttttggccatccccgtgagctgctcaattaaaaagttcccaggagagagtctaacgggtcctgactgggtcaactgctcacgtgtttgacagaggttgtggtgtatgttgttgggtatggtgtcccttgattgacagccctgttaaaatcacattgatggaagtgaggcagcaccccaaagaaggcgatggtgagaagataaaatagataccagctctaagaagtttccagaaggagacagcaagagaggggaacatattcaccacattcaaaaatacttggcaaaaaacaacaacaaatgtaattatgtttaagtattttaaaagatgcaaccagctgttattaactgtgactcagttctgaagcagttgaattgttctagttttgatgagccaaaagggagatgacagggaggtgattgccaaggacaaaaacacaaaaagacacattctgcttattaaggaaacaatgagaaaggaaagcaaagctccccagaggccatctccattttatgtgtgagggtcccagataagggaaaggacttgactgatgtcctccaaacatcacagcatttcttcctccttatctggggcccattccactctgcacatccctcctggctgcttgcccacattactaattagtttcctcctgaaatatgccaaagaataaatagtgtaggctagttaaaaatgctcattctctccataaattttagtttcctctgttttttcttcccaataatactattttgttattgtctgcagtgtttgatgaatacaaaaggatatcacagaaggatattgaacagagtattaaatctgaaacatctggtagctttgaagatgctctgctggctatagtaaagtgcatgaggaacaaatctgcatattttgctgaaaagctctataaatcgatgaagggcttgggcaccgatgataacaccctcatcagagtgatggtttctcgagcagaaattgacatgttggatatccgggcacacttcaagagactctatggaaagtctctgtactcgttcatcaagggtgacacatctggagactacaggaaagtactgcttgttctctgtggaggagatgattaaaataaaaatcccagaaggacaggaggattcccaacactttgaatttttttaacttcatttttctacactgctattatcattatctcagaatgcttatttccaattaaaacgcctacagctgcctcctagaatatagactgtctgtattattattcacctataattagtcattatgatgctttaaagctgtacttgcatttcaaagcttataagatataaatggagattttaaagtagaaataaatatgtattccatgtttttaaaagaaaaaaaaaaaaaaaaaaa

SEQ ID NO: 28423 - DNA, 5834 bp, Homo Sapiens
ggcgcttgtcatcatggcgacgcggggccatgtgcaggaccctaacgacaggcgcctccggcccatttacgattatcttgacaatggtaataataaaatggcaattcagcaagcagataaactgttgaagaaacataaggatcttcattgtgctaaggttttaaaggcaattggtttacagagaactggaaagcaagaggaagcctttactcttgcacaggaggtggcagcccttgaacccacagatgacaactcactgcaggcactgactatcctttaccgggagatgcaccgaccggagttagttacaaaactttatgaggcagctgtgaagaaagttcccaatagtgaggagtatcactctcacctcttcatggcctatgccagagtgggtgaatacaagaaaatgcaacaggctggcatggctctatataagattgtccccaaaaatccctactacttttggtctgtgatgagcttaattatgcaatctatatcggcacaggatgaaaacctctcaaaaacaatgtttctgccccttgctgagagaatggtcgaaaaaatggtgaaagaggacaagatagaagctgaggctgaagttgaactttattatatgatcctggaacgtttgggaaagtaccaggaggccttggatgtcatcagagggaaattaggagagaagttgacgagtgagattcagagtcgggaaaataaatgcatggctatgtacaagaagctgagcaggtggccagagtgcaatgccctttcccggcgcctcttactaaaaaactcagatgactggcagttctatctgacttatttcgattctgtctttcgactgattgaagaggcctggagtcctcctgctgaaggtgaacactctttagaaggagaagtacattattctgcagaaaaagctgtgaagtttatagaagatcggataacggaagaatctaaaagttctcgccatctccgaggaccacatctagctaaattggagctgattaggcgtttacgaagtcaaggttgtaacgatgagtacaaactgggtgatccagaagaattaatgttccagtattttaaaaagtttggcgataaaccttgttgttttacagaccttaaggtgtttgttgacctcttacctgctacacagtgtacaaaatttattaatcagttacttggagttgttcctttgtcgacaccaacagaggataagctggcactgcctgctgacatcagagctctgcagcaacatttgtgtgtggtgcagctgacgaggttacttggcttgtaccacaccatggataaaaatcagaaattgagtgtggtcagagaattgatgttaaggtaccagcatggactggaatttgggaaaacctgtttgaaaacagaattgcaattttctgactattactgtctccttgctgtccatgcgcttattgatgtatggagggaaacaggtgatgagaccactgtgtggcaggccctgactttgctggaagagggattaacccatagcccttccaatgctcagttcaaattgctgcttgttcgaatctactgtatgctgggtgcatttgaaccagtggtggatctttactccagcctcgatgctaagcatatccagcatgataccattggttatcttttgacccgatatgctgaatctctaggtcagtatgctgctgcgtcccaatcctgtaacttcgcactcaggttttttcactccaaccagaaagatacctcagaatatattattcaagcttacaaatatggtgcatttgagaagatcccagagtttatcgcttttaggaacaggctgaataattctcttcattttgcacaagtccgtactgaacggatgctgttagaccttctacttgaagcaaatatatcaaccagtttagcagaaagtataaagtcaatgaaccttaggccagaagaagatgacattccatgggaagatttgcgagacaacagagacttaaatgtttttttcagctgggatccaaaagacagggacgtttctgaagaacataagaaactttccttagaggaggagaccttgtggttaagaatccgatccttaacattgaggctgataagtggacttccaagtctcaaccaccctgtggagccaaagaactcggagaagactgccgagaatggggtatcctcccggattgatattcttcgtttgctccttcaacagctggaggcaaccctggagacaggaaagcgatttattgagaaggatattcagtatcctttccttggtcctgtacctaccagaatgggtggattctttaattctggctgttctcagtgccagataagctctttttatcttgtcaatgatatttatgagctggataccagtggtttagaggatacaatggagattcaggaacgaatagaaaatagttttaagtctttactagaccagttaaaagatgtcttcggcaaatgtaaaggtgacctcttagaagttaaagatggtaacttgaaaacacatcctactcttttagaaaatctagttttctttgttgaggtaagtttttgttctcttcctaaaagacattgttgttcttaatggtctacaggattcatttttcaacagtgaacaggtaataggcaccttatacctgtaacttaaccctccatccctgtttttgttaattgaaaagcaatttaaatcattttctaaaccaatttcttccaagaattctaagatgatttcattcataatacttaggtaaaacttcttgaaatttgctgtactcatctctaaacttccccagattcacctcaaatctagctgttttcattctcctttctgactcactctttattatgtagtttaattcctccagcttcttttatttgttgtcatttattaattgctaagatattatgcattgtgatagtgtccagcaactgatacagcaaaactccctcctctttttttgccagagggaagagaaggaagattgcaaacactcataatctattatcttttcttttatttctgtcacatatttgttgactgttctccccttactactctgtgtggggagtgtacactgttctggtgattggcaaactgtaagtgcctaagagatttttattaagtgaatgagtaataagcggacatatatgtacatgcacacactgtagtataggagaagacatataaacagctaatttgatacagtgcaggatatgtactgatcaactgggtagattttgccatacatatgtaagttaagatttgcaggtaaggtggtatcttacctgcttggagagatgtgacgggagaggcatattgtaaagaacctttggattccatgcctaggaatttggactcttctctgagtgaaaaggatgttaaatcagtccccacttcttcagggaagtgacagaaaattggagtgaagtggaggatggattttgagctaggagagccagaagaaatgctgaagagttaggccattgtagtattctgagcaggagatgatgaaggcctggatcagtagagtgattgcagaaagtagagtggagattcacatgagaaattgaagggatttacatagaagaactgcgttagaatttgttgaatccattgcctctaatttcctgatagatatttttagtgtaatccttattggtgaatttgcaatttttcctttcaggctatttctgttatcctttgggtatccagttactgtgagagtgtcctacgaccatacaaactaaatttacagaaaaagaaaaagaagaaaaaagaaaccagcatcatcatgccacctgtctttaccagtttccaagactatgttactgggcttcagactttaatttccaatgttgtggatcatattaaagggcttgaaacacatctaattgcacttaaacttgaagaacttattttagaagacacttctctctcaccggaagagagaaaattttcaaagactgtgcaagggaaggtgcagagctgttatctgcactcacttctggaaatgggggagctgctgaaaaaaagacttgagaccacaaagaaactaaaaatttaaggaagtatctatcatgggcactgatgactctgcaacagaatatgacaccatcttcccaggcaaaagcaacatctggttgaccatgattttaatccagaacttcctcataaaatgcatgaaggactttgatcgtgaatttttttaggtgttaaatatatacaactgattaaattattgtatataaaccagaagcgggaccctcatctgggtttgaccactttttatacatgttcatatgcatatggcagcaacaagagaaccctacttttcttcttcccatcaccagaaacatcttttcaggggagcggggggtctataaaaacagcaatagaaattaagcataaagcatcaacctcatagcaactgaatagcccttccattataaataacattgagagtttttggtctggtccttgagccacaagaagtggaggggagaccatgcctgggaacagacccccttttcacagcagtaagtttgttttgaggctttctcagctacttggctcccacagaacccaaggcaggtacacaaaggaccttagatgagatctggcatatgcacccgcaatagaagggcaccacttggatgaccacaggcacttagtttttggctagtttttgtctgatagttaagacatccccatcctagcttctgtgagagttaaaaatctcaggtaagaaggcaaggaaggctctgttaatttatagctgtttagaggggaaagcagtgcagaccacttattaagcccgctgaggactggctttctgtctttcatacatttgggaaagataggaatgactgtttcaaagaagagaggtgcacataatttatgcaggcaagtatgatacttatttcattggttttgtgagtcatatatatacatatatatatatacacatatatatatgacttgaaaattaagatttaatactttaatgttttaagtgtggggggtttgggaaggaaggaatgtaatattatggatttagccttaggctttaagttttaggctggcaaaagaaatgttattcagtgggtttgaggtttggactactttcttcaaacttagagaattataacaggatggtgtttactttgttcacctggatgtccccaagactctagcttcttctatcagtggttggtctgatagaagaggtaaaaattgctcttgaaaatgtcctacaatttatgcagtttctttgataatatttttctgtttaaatccctgcttctgtttttggtctgttacctaaatatagttcaagtttaattctgtaagagcaaagaaatgaatttgatgaggaaattaagcatccaatggaggattggtcttgaagaccttaaaggtgctttccaacctgcactgctccagtgaaatgtggtacttttttcttttaaaagcaaccaagagagctgggaatatctgtgtacgcaaagtaattgcattttgtcccttcattttgactttcttagattcataatttgatacagtgcttaaacttccaaggaaattttaaacaattactacattacctgttcaaaataaggcttgttggaaatcctagtccatcaactaatttcaaaaatttatttttgatatgagtagcaacagctggtcatataccctatcccaaaaggaagaactgtcttgaacaagatgaatggaaaattgtggttaattctgaatttcatgtaatgacaacatattctttcataaaactatggcctgtttaagaaaaaaaaaaaaaaaaaaa

SEQ ID NO: 28424 - DNA, 5511 bp, Homo Sapiens
gggacagcaggaggccatggggggatctgaggcagggaaggtgctcaggagaggacctgagaaggaagagatggctgtggtcctggaggctcagggatcaggcctagggcctgtgttccttcggcctcagcatacctctgaagcggtatgcccagcttctctgggcaggccctacaatgtgtgagaaacagcctcagaacaccacctcttttcagggtagttacccaaaatacacacgtgggagtttgccagagttgaggcagcttttaaaggtggagcttttcaaaaagggaaactgggagcacttacagcccaggtctatgttactggtaagaagtggtttgtctcaggaataatgtaccctgtggagagtactttgtgtcagcctcactgagaacaaaaaaagcactcctttccccatgattaacactcgtgtgtcaggaaagtacagtcaatgtatgctaaaaatccacttgaacaattagctcgcttttttccctcatttgctttcagagtaaatgtgctttcagagtattaggtcggcctaatatatgatacattttaagaaggggaggaaagcgcattgtataccctgatgctgggacccaatagaagacaggccccctggctggcctttggttctccctggagctgacaaagggaaggggcttggaaagcagccactgtccccgcctagtttgggcctttacagacacacctttccttttggcagctgctatggcacggattctctatgccagcacgaagctggaaaacctgcctacctggctggtgaaatgagggtggcagctggaggaaacaggcatcttaggagattagaaatgtccttcaaagggacttcagtgagtgctcaggggaccaggggtgactgtgttaagaagggttagaggttgagagggagccatgagcttgggtcatcaccccagtgagaccatccaggcacacagctcccaggcttgggaggccgcctccagtccaccaggaccctcagggagctgtgacttcattgaagctgggtctaaaggcttccttcaaggctcagcaaactgggttttcaaagatttttgatccctgaagctaatttacacgttatgtggggccatggcaaagacttggccctgaagtggacagaaagaggctgtgctgagtgatgaatgagactaaacagtgttctcatgcttggtgattttgatgagaacatactacataagagttaagagcattataattccctttatcaccatataaacatgtcacttatccggaaagcatacaatttatttgtacatgagaatgtaaatttaaaaattttctgaaaactagattaaatcttgagaagcaattttcaagtaaacaaaaacatgccatgttaatcagcactagatctcccccaccccccacataatgtgtatgtacacatttctcaaattcagactgcagtacagctgtctccttggaggcgtcaggggttcctaagcctaaattctacctctagggtcttgatccctcaagagttcatcctgagttaaaattttgttatccccggaagcagagatgcactgactctggtgatctcagtatgaatgtggtatgaaatcttctaggtgtctgtggtggggcctgagggagggtaggaaaggtgacgaggaaaaagtagagggagcctgaacaccctgggtctcaggtacggagtgaagaaatcactaaggtgaaaagacaggctggggcccaggagctcgtccaagtcctgatgaacaacaagtcctgggcaacatcacaggccaccaaacacaccttcagctccagggtcgaatagatggtggaagagcacagccatctggaaaatcagaaaaaagtggggaagattttctatcttgaacttgtgagctggagaattaccattagtagcccactaataggttatggccgatgagtcccttcataacacactgagagccacttttgacactcccagaaaaggcaggttaacaaaaccccttgatggaaggaagaccctcattgcccaatgtacccaagcctctttgaaccttgcttagactgaactgcaaatgtcttgactgctctgggctccttagtgcaactccttcccacagaagccatcaggagcctggtccaggaagctcctctcctacacctgccttaaaaggcccagctctgctggggagtaaggttcatgggggccgtcccaatgcaaaagggaatctctgccatcacccactgcaaccacatggtagccactctgcagccggcaggcgtgaggcatgctgcgctaacatgggagggcggaggctctgcctgacttcccagaagcccagtgagaagtccaggacaatcagcaggtgctatgggaaccttggctggcaggcaccatgtcgtcctgtatgatcggcaggaccggctccttcctgaagacaccgattcttggcggctcctgacaaggattgagaggatttgtgggggacagccctgaagccctgagccctcaactcaatgaagggattgtgctggtgtagacccacagccatccagctctgtcactgatgaaggtctgaactgccatactctgcccctttggtgtcagccttaaaggtcagttttaggtgagtttcaaccagtggctgtagatgggtcctttgtttaccagtttccccacatcctgtctgagaccattgctagtttttgtctgcaccagtcttagggaaaacaacctggacaccgtgggtgagatcaccagtgggctccaagccagagcatgggcctgggacagggtgggttaccttggcatactctaacatactcaaacctcatttcttttggggtgatcagacccaacagcaggtcatgggggcgaggaagtccagtggagtccaaggaatgagaaagacagtttgagagacaaaatgggaccagggggctatcacaagtgtggaggctgcaacaaacaggtggtgaggatgtgggggttgaaaggaaacggtgtatcaagtgaatgagaaacatatggctacttgagaacatgggaatgctagaagcaaggagcagcaagtctagcaaacatgcaagccctgcctcagcttctctcccaacactcagcttttcttccaacacatttcatgtgcaaggttctcgtgcccactcctcttgtacagtttggcagcctcatggagcttccctggtaggaaaacacatctgccagaaacaggtcattgttggtctctccccgcttcttcctctcctggaaaaattagaagcaaaggaaatggcctctgcagccatgggcagaaagcagcctttacaaaggttagatgtggctatttcaagtgaggcccctgggccttcctactggaacctgggcttggctcctggctgttgtctctctcccctaggttcccgctgggaaggcttgataacaaaagcaggcttttaccagacaagcaaagatcaaaaaaagatgtaaacctttgtttgtttaatggaaattcctcagggttgctttcctgtgtattccaaagctatgacagaatgtttagggtttctgcccaagagggagaccaataaaataggatgacaagtcttacgatgtccctacttctaaagagaaggtaagaaatcccgtgctgaacatccactaggttctgggtatatactttatacacacatggcccctttattcctctcagtgaccctcagggtaggtctcactacccaagtgttagagtgaaggacgctgagaccaagaagaggaacaggtcagggtcagacagagctggaatttggacacagttctgtctgactccagatattccttgtatcacacaatactgtcttctgaagcaagtgattgtccccaacacacacacacacacacacacactctctctctctctctctctctctctctctctctctcagcagagctgaggataaagaggaatatcctgcacacttcttccttctgtgtcagggaacatttgcttgtctacagctcgagtatttgtaaacactcagtagcacccaaaccctgagccctagcagtttccttttgcttgtttactagcaagagtagcatgtcggaggacgatgagacattgaatcaaactcttagacaagctggtgaaagttttaacgactgctggaggcaacatgcttccacactgacagaaatcatctttcaaaaatcccgcacatatctcaggcttatgaaacaaactaattcctaatagttggaaatgaattaaaagcttgcggtgagataaaagatagattttggctggatgtgatgactcatgcctgtgatccctacactttaggagggcacagcaggaggatcgcctgagcccaggaattcaagaccagcctggtcaacatagcaagactctctctctgcaaaaaaaagaaaaaaaaaaaaacctcccaaaaaaaaggttttactaggcatgaaaatgagtccatttccattctaggccccaggatatcaccatgaccaataaaaacaatctgtggcactcagcaggtgcatgtcaacatgggcaggttctttctccccgtcagcaggacaagaacatctcccctatccaaaaggcacccactgaggatccgcagttctctggaattatgctgagcacccagatgtgtgcaactaagccctgagcagtcgatgtggagcgcacttgaaggcacttcatttttttttaagatacactcttaggagtttactttaacccacttcccagctcatagcacacgaggagaggcagacattttaaccttggtaagacctgacaaatgacaatagttggaccccacagcaatcattacttttgtagacagcaaagttatgctccttggcttcaggtgaagacccccagatccaggccagtggatttacaagtgagagtcagcagcactgggcatttcaggcaatagctctgaacaagccctttaccatgcgggtaggtaaaccccagaatatacagatgccccttacgatacatgggtggggagggtatgtggccgagagagcataagcttaggagacagagtggatttgaattccactgagcttttggctgtggacccatggggacgtggcatatgtctcgctgagccttagtttcctcctgcatggaatagggagagcaatagtacctgcctcattcagctaacgtgaggatctagagcagcatttgcataaatgacgcgtggggcacagagcagactcaacacagagcagcttacgttatgaggcttggcaggctgggagctcctgtcggcctctctcctcagctctgtgcccactgagctcggcacaagggttggcccatgacaggtgtttattatgtggaaataaatgagagggacaagacatttgctgatttcttcactgtttccaactgggaattcaaatgtatctcacgttcccataccctcacaataaatctgttcaggagaaaaaaaaaaaaaaaaaaa

SEQ ID NO: 28425 - DNA, 8219 bp, Homo Sapiens
cagaagattatatttgcaattaagtataacctggtggtattcttcacatacttgtctcccacacattctttagcaccactactcatgtcaacattgccaacaaactatacaagatgaccagatccagtggccattttatgtccttagtttactggacctctttgcaccatccagctcagttgtctgttacctccctcaaacattcttctctctccatttctgtgacattgcactcagctgttttcttcctcctctctggctgttactttgtagtttgttttgtatgttcatcttcctctgctgacttctgaatgttttatactgagggctcagttttggatcttcttttcttctatgttttcttccgaggtatgccctttagtcttgtggctctctctgcataccaactgcatggtgataactcccaaatctattttcttcagccaaaaactaaccattggtttcaaatcacagatacctaactgctgtacacttaaatgttgtctcacacatatgtcaagcttaatgtctccaaacaaaatttttagtactcctcttcactttccaacttactcattttttaaaaaattatgctcattaaaatttgtgtgtgggtacatagtaggtatatacatttatggggtacatgagatatgttgatacaggtatacagtgcataataatcacatcagggtaaatgggtttctatcacgccactcattcttttctttctgttaatggtgctgccatccaccaagagttttcaatctctattttttctactttgacccaccctgccaccactgtcatgtcatctaggccaccaaaatctctaacttgcattactataatttccttttgcctgaactccccttcttaccttcccttagtctttttttttttttttttttttttgagacagttcgctctttggcccagactggagtgcagtggtgcgatcttggctcactgcaacctctgtcttccagtttcaagcgattctcctggctcagctggcacctgccaacatgcctggctaatttttctatttttagtagagatggggtttcaccatgttggccaggctggtctcaaactcctgacctcgtgacccacccgccttggcctcccaaagtgctgggattacaggggtgagccaccgcacccagcccccttagtgtttttctatagagcagtcatttttttttatgtaaacctaatcatgacacctattttaataatagctttccattatacatggaattttgaattagatgtataatgaaatatacgctgcttatcatggccttagaggaccttcacagtctggccttttccagtcttccttacctcatgttgtacctgatcctcccttgctcactatattccagccacaatagcctattttcagccccttaaatatgtctttatatatgccattgcttttattggaagctgcttccagcttatcctttgcatggctgggctccttctcattgttcaatcctaactgtcgtctccttagggaggtcttcaccactgtccaaagtaggtttatgcgcccatttccctgctgtcctttatttcagagcactagtcacaatttatgtttacttacaacctctgactgtaaacccctgaaagcagaaaccatgtttcttttactcaccaatgtataatcagtgtatagcaaagtgccctatatttctttcgttgaatgaactcagaaaatgaagtgactgaatggattctgagctaaaaacatctccagatggtttagatttgtttttaaaggaatctcgcttttttaatgtaatgtatagatattataattaaaggaagtcatatcatctagagaaggcagatgtttttggtacagtctccatttagtatctggtccttagctttggtgaggccattcatgctaagtcaattcaaaagatagtggtttataaaaaatacaatgctgatttaaaaaaatagtgaaacaaatacgtaactgagcaggcaggctgttcatgcttgttgatctctatgggaaaactttacaagagttgaaatataagcaggaggtatttggtggatgtgaaatctgagctttcagaattagcagaataatgttattttggtggtggggtgaagaaaatttgctagtctactacattctgtgtgctataaataaaatttggctgtcagtgagagtacgatgaggcagggtgtagggtccagatatgaataagtctgtctacattaagacttaactatctacctgaggtcaaatgcattctctaagtctaatgacgaagaattgacaacattattttttcctctaagggaactcgtatgagggatttgtaatgccatgtgtaatacatattaacatttagtgcaagaggattctgaaatgcattggaatgctgtaataatatttatttgaacttgcaggttctcctgaaaagaaagctgaacattcatctataaatcaagaaaatggcactgcaaaccctatcaagaacggtaaaacaagtccagcatctaaagatcagcggactggaaagaaaacctcagtacagggtcaagtgcaaaaggggaatgatgaatctgaaagtgattttgaatcagatcccccttctcctaagagcagtgaagaggaagagcaagatgatgaagaagttcttcagggggaacaaggagattttaatgatgatgatactgaaccagaaaatctgggtcataggcctctcctcatggattctgaagatgaggaagaagaggagaaacatagctctgattctgattatgagcaggctaaagcaaagtacagtgacatgagctctgtctacagagacagatctggcagtggaccaacccaagatcttaatacaatactcctcacctcagcccaattatcctctgatgttgcagtggagactcccaaacaggagtttgatgtatttggcgctgtccccttctttgcagtgcgtgctcaacagccccagcaagaaaagaatgaaaagaacctccctcaacacaggtttcctgctgcaggactggagcaggaggaatttgatgtattcacaaaggcgccttttagcaagaaggtgaatgtacaagaatgccatgcagtggggcctgaggcacatactatccctggttatcccaaaagtgtagatgtatttggctccactccatttcagcccttcctcacatcaacaagtaaaagtgaaagcaatgaggacctttttgggcttgtgccctttgatgaaataacggggagccagcagcaaaaagtcaaacagcgcagcttacagaaactgtcctctcgccaaaggcgcacaaagcaggatatgtccaaaagtaatgggaagcggcatcatggcacgccaactagcacaaagaagactttgaagcctacctatcgcactccagagagggctcgcaggcacaaaaaagtgggccgccgagactctcaaagtagcaatgaatttttaaccatctcagactccaaggagaacattagtgttgcactgactgatgggaaagatagggggaatgtcttacaacctgaggagagcctgttggaccccttcggtgccaagcccttccattctccagacctgtcatggcaccctccacatcagggcctgagcgacatccgtgctgatcacaatactgtcctgccagggcggccaagacaaaattcactacatgggtcattccatagtgcagatgtattgaaaatggatgattttggtgccgtgccctttacagaacttgtggtgcaaagcatcactccacatcagtcccaacagtcccaaccagtcgaattagacccgtttggtgctgctccatttccttctaaacagtagatacttctgatggattctcggcattaactcctgtttcaaaaaagtgtgaacagttttatgaatttgaaagaaaatttggtagctctttatagcattcattcttaaagatcagtcagaataggtgatttctaaataaaccaaatagaagaatgaagtatctctacagggtagtaacttgattcctcttcaggagaaaagggagctaaattgcaagctctaactaagggtttctgctactgacatcacaacacagaaatgcaagtgtggtacttccagtgaaagcacatggcacctttctaggtgtgtagccactgagaagggacagtgaaactgttatttttgatatcagaatgtcatttttatgtgcatatccctaaaattagggttatttctacatacactagttacacttgtgaattttttttaaggtctcttttaatttccagacagttaaaaacaatctagttatcttaaagcattagaaagttattatctggagagtgcagagatttcagtccatacacctttctccacaaagcagagccagaagtaactgactattgtgcctaaaactctgtttcatttttaaaaacaagtgccattaaaatggaatatctaatgataagcatatgaaataatgtgtaattagctcaatttaactattccacaacttacatattccaaaacaatgttatacatgataaatatatataatttttgtcagttaaaacaaattaaaaaaaatggactatcgtcgcacagaagcctagaacaaaaatatgaagagaaatatctgacatttgtaaagaaattataagaagaaaaaaagatacagaacagaaaacattcactactttagaaacactttatgcatggcttcttgccccaaacttttattgtgatggccctaataaagcagattattggaaaaattggaggacaagggttgtataaaaattttattttatgaagaaaatatgtagcggaaactgaattttcaagacatttacaatgtgaaatcatgttgcatttaacaatgtactttattagcaacttcaccaaatattccccaagtcataagcaacaattatttttattaggttttggggggtggagtagttttaataaagtgcacagaatggtgacacccacaaagccttatataaaggcaggattcatgcatcctgctgcaagtacctctgcactaatataccagatcctaaaatgcatataaggtggactagcatcttaattctgctagttgattgtgtctttactgaaaagaacccagctaccaatttgcctttttttacaccacaaatcctaattagaaacttgaggttttatagaaatcatttaatgatagagattacatatgtgaattaatgtgaatatagtatctgtgcttcctgtgtctatgactattttaagatataattgtgctgcgctatcagattaacatttggaagtttctagaacagttaatgctatttacagagaggagtagaaactcatcaactggcactctctttgatttttatattttaaattaactctcttcgatctcaaagtatattttacgagtaattttattaggaatctcttatagtgccccaatgggataagctatttgcctattttcacagttctgaacttggaaagaagcaaagtatatgtaactaaaccacatatttgtctttttattgctttttcccttcttttatatgctaaatcaaatatagatttgtggatagggaagcaatatgtgaatcacaatgtagcagaggcagaccaagcattacattattatttagagctggactgcaccaattacttgtcctcgtgccaaaggcaaatatgtttgcacctttttttttttttctgattctcaggttgattaatactgctaatgcaaatgctcaagtagatgtttaaaaactttacaaaatagattcaagtgatactttcttttaaaagtgaagagttgatgattacacatagtaaattcatgaactacagtaggtttgtatcaaacaatttttttttaatgaaaatctgttgaggtgtacacaatatgcttcttgattgtattagtccttggtctctgctagacctcatgagtttcatcatttagaaaaggggtagaggatgaactaatgtctccttcagatgtaaacatgaaatacctagagttttacttgcttttcaatacactgaataattttaaatgattctgacactgatgtagaccctttgacttataaattctgaggaaacaactgacagcataaaatatttacattcttataacacagcacagtgactttcttctttcaagattgtagctcagagaaaagatacaggattcaattgggggttcaataggatagaaatggagagattcctttgtgttgtagtagaggcattttcctaaggagtatagatttatactttgcattttcattcatcatcccccagaatcatggtcaaggtgtaggtcactccacacagctgatgctcaggttattcccttgtgagaattatgagaataaagctcccaagatatgtgaaagtgcttaacacagtacctggcacacagcactcaataaaagtttggctctattatgggatggttcaattctggtttaaggaaggaagaaaggttattatatatgtaccactaagcaaatatatatatatatatatatttggggttttttttccctaatattatttgggtgtcccctgtgcttctttaggatgtagttataactaaacctgttatacttgaacatcactaagagaagtaaattattgtgaagctagcaaaaatcttgaggccaaagttgtttcttaacagctttaataatgcttgttgattttgaataatcctttaaaaagtggaccatttgcttattttaatatcacgtcagtaaaatgttagtattaaaaagatcagctttttatggcattgaagaatgtatctgctaagacacaaaaattgcatggtaagtataataggtggaggaggaaaggttgtaggccggatgaaaatttaactgactagaacatttattcaggagtgtaattattttcccttaccccaatccctgtgtacgtgttgggtatagttacgacattatccggatttgcaaatagacacaactttcagtcttaccctgtttattgtttaagagtgatagactgttgtcctcttgctggtggaaaatctaaggtggagcccactcttctatgctgaagttcaccaggcagagcagttttcttacaagtcagctactctgcttggtttattttaggttttggtacttcacgtaagcactgttagaaggtacaagtgtattaatatcactagttttgaggcgcttgggtacatttgtttttaatatatttagaatgtgcagtaaacttttttctcatttttttttctttttagcaaacttgttattttaggtccaattattgagttgacagtctactgtgagaatgagatgacatatctactgtgagaataccataaatgatgaatagtttatttgagaacttttatactcagtggtgttttatatattaagataaaaatatgtacacacatgcatgtcacatctctctactgtggagttaatgtgaatttttaaaaaatggaattgcaaccacaatcatatctaagagaacattcactcctagtgagggtttacaaaagctactaagagaataaggtagatgataatgcaaagggtcatgatttggggttatttttgttttattttaaaatttatactgctacttttgaaagaattgtttttatgactatgctctttttgtgattgaaaagtcatctaatagaagctgtatagaagctactttttaattgctggcaaacagctttaagtgcactttctttgattacacttccattttttgttaaacttgaattttctgaagccttttatgtaccactaagcaaataactttaacctttaaataaagcaaatttacatctttattgtatttctacttgttacaaaacatacttgctaaagtaacttcagtcctcaaatatagctgggaaacaattatgagatagactcagtctccccctcccaccccttttcccctgccatatctaattaagcactaactgattttattactttattgcctttacactgcttattctttttgactgaattctgtccctgattcactgttttgtttgaaatttaaagttattttcttactgtatttatcatacctgttttaatctgttttctttaaatgcaataaatcccaaatggattgcatattctttataaaaaaaaaaaaaaaaaa

SEQ ID NO: 28426 - DNA, 4364 bp, Homo Sapiens
cagaacaaagtcaagtccatggcgaatcagctgctggccaagtttgaggagagcactcggaacccctcactcatgaagcaggaatctatgcgaaagtcatttccccttaacctgggaggcagcgacacgtgttacttctgtaagaaacgtgtgtacgtgatggaacggctgagcgccgagggccacttcttccaccgggagtgtttccgctgcagcatctgtgccaccaccttgcgcctggccgcctacacctttgactgcgatgaaggcaaattttactgcaagcctcacttcattcactgtaaaaccaatagcaaacaacggaagagacgggcagagttgaagcaacaaagagaggaggaggcaacatggcaagagcaggaagcccctcggagagacactcccaccgaaagttcttgcgcagtggccgccattggcaccctggaaggcagccccccaggtatctccacctccttctttaggaaggtgctgggctggcccctcaggctgccgagggacctgtgtaactggatgcagggactcctgcaagctgctggcctccatatcagggacaatgcttacaactactgctacatgtacgagctcctgagcctggggctgccactcctctgggcgttctctgaggtcctggcagccatgtacagggaatctgagggctccctcgagagcatctgcaactgggtgctcaggtgcttcccagtcaagctccgctgacatggctggctgccccaaagtgccttcacatttccagggaggcttcagatggcagtgcgtttgcagtttgctcaggctctggccaggaagcctagcattctctaagcaattagctcaaagccaaagaatttcacatgggccacctccgcctggccttatcagggtgaacatctactcacggtgctagggccagggatgatatgaaggatcttttctatagctttgtgagccatacttctgggtttacatttcaatttttttaattttaattagcccagagaaagcatttttttctatgagtgtcaatttttctaaacatgggtttgaagcttataaccagttttataaaccccttgaacactgcagtgagttatcaaagccactgcctgcaaagtggatgatttaagattttacacgcatgaaaatgagtgtgccatctcctgaccagtgccttttgacttaggtacccagatgccacttgtcagcagcaggatactttttacaacacgaaagcataattattttagaagaagagagtagaagggcagaatagaattcaacttacagaagcacggagtagtgtgtggttggctgttatctgtccccctgggaggaggactgttttgctcccttgttttgatgttaaacagtagcttaaaggctttcccccccataccaactcacagccaaatgacaaagaaccgtggggtttcaacagattctacaaacatgcattttcccttcccactaatgggcactgcagggaaagcccattggcatttgaccatggagctgatgcagtgccaaagatgagctctttcaactgatggcattttagcccctgtggctcccagcggatcccccagcccgggctgcaggctgagccaaggctgtgcagggtccatattggtcaggccaagtggagtggaagactctgtccacttatgtggtgtcctttgggactgagggggtttgttagcacatcaggctattgctgggaagcgtggcctgcccagtgagcattgcctgtggacatcctgactgcttagctgctccgctgccacacatatgtggtcaaaacagaaaccaatttcacactgccctgggaaaggaatgggtctgacctccaggggaagctctaccatatcttgactggcagggaaggctgggagtggaagctatttatggactgatccaaaggacatatgcatgagtaagggtaaaaatgagcatgcaggtccacctgtgttcttactctgggtatctagaagagtcctcagctctccctactccacgctgcctagacatacacagctgcagggtctggctgaacaatcaaggggccgccagagaaaggccatctacggtgcgcagtgtatctggagttgctgggcccaagatagctctgtggagttatcactagagatgcctctggattaactaagaggtgtgcctgggtgtgggtgaggagtcagaacctttgagagctttgagatgacagtttctatggggcgggaagaaggaggtgcatttctacaaacacttccctgaaatccttgggaaaaacagaggcatggccgtggccaactctgtgggaactggcgcctctgtccttgttggcactgttctcagtccgatgacttgcattgtgttttctccaatttttgctgggattttaatgttcagcatggtgggaggaacccttgattccttttgtttgagtatagaaagtaaatttttgaggtcatgatgtgaacggccatgttattgtgattatcttcagctcaggataggctgagatgctttgtggagtgttccatgaagcccgagtcggaatctctgactgtcgtgtacagccataaggagactggtttgaattactgtggcgagacagggcgtgcctgtcagaaatctgagatgtttgtacgctctgagatgttgaacctttctggtgggcagcaccgacacccaggggtggacccccgaggatgaatgcctctaggcctccgcaacatattcaagaatgaatgggagacgctagagtaaaatgggggcagagaggatatcagggagcaagatgcaaactgtgtgcatccactctcgtaaacaagtagctggtcacaaccagaaaggttcatctctcctaagcaaacagcgactctttcagaggaagtttccctctttcaatcgtggccttattttcaactccggtgccttctcgtgatgttaatcatttccttttttccccacactaagctctcttttctatctttctctctctttccaatcttacgccatggccatcagttcatttcagccttccagtgctacacccacttcttggctgacacacttctgctctaaggtgactggttttcttgccaattttcaaagagtggtactaacccccaacccgctttccgcaccccgtcctctccgccagcagtactggttgcactaactgtgagtgtcttgcatactgatggactcatttggtggcatggttggctaacagcatggcggggggtgttcagcttgagacccatgcctgtgttcatttcccatggagctggcagcctggtctaccccaagtgcatgccccgcctctcctctctcccttgggtctgcctgcgtgcatgcttctccagttgcgtctgcgaagctacctactttcttgggagggtcgaccttgatcatgaaacaataccatgagggggcctctgtcacctttgaaaagaacactttttgagcagcctcaaaaagctcatacataccagcgccttcttaaattggctctaatgtaaagattgttaatgtcatttatcaaaaccataggtgattatttggagggatttaaaaaacttaattactctcaggcctcatcccaagcttgacacatgctctgtaggttgaacacataatcacaaatattctagcaaatgctgccttggttgcagcctgcactgtggacccaagggttttgctgtggctcttcttatctcccttggcccataaagccccagatgatgccagagcttcaattagagccatcatcatcccaggcagggatatctttgagaaatgactcagttcagccccaggcccctgtgactctgcttaaagcacacatttctgctgactcttgtacctggggcagcaggataatcaccaacacactcttaacgagaaacaacacaccaagcacagtggagctgtcctaggcaacactcgcggtctcaggctgcggtgggcgtctgtcctgcatgtggcccagaccaccctgacccccgggcctgcctgcctggccctgcatgctgcacgctcactgtatttgtgcagatcctggccagtacaaagtcgttgctcttgtcttatcttctcttacagagtctccctccctttatagaatgtcaaccaaagagtgccctcctcccctctcagcctcctctttagctagcctccccatctcatcacaacgcatgtctgtgacctttggtaatcatttacagtgccacacggaaccctgtattttgcacacagcaaaacaaacaatgtttagctttatttatggtatttgatgctgtaaatggaaataaatattgttctttataaaaaaaaaaaaaaaaaaa

SEQ ID NO: 28427 - DNA, 4881 bp, Homo Sapiens
cttcatcaggctgagtttcacagagcgtgcatgcttctgcattgctcacctccattttccacatttcacgggtgcccagaagatgtttctgatgtgaacgaatgattgactggttgatgtttgtgattgcaggaaaggggaaggtatcctgcagggggatggtgggattctaagaggccagggcatcctggagatcgggtatccgaggcagcagggcaggcacttgcatgagttgtgtcagatgcaccaagtctggggtgctgtacttggcagaataattgccccaaaggtgtccatgtcctgactcctggaccctgtgaataagttgcctcacatgacaaaggggactttgcagaaacaattaaggatcttgagagggagagatgcactggattatttgagtggatctaacataaccacaggggcccttaggagagggaggctggagggtcagaggagatgtaatgataggagcagctgatagaggaagaagccataagccaaatgtttggggcagcctctagaagctggaaaaggcaaggaatggattctcccttggagcctccaaaaggaacatagccatgctgacaccttcattttagcccagtgaggcacaaaccagacttctcatctccagaaccataaggtaatacatttgcattaatctgagccgctggcattgtggcaattcactataacagcaataggaaactagttagttaggtgccaaggagacaccttgtggggttaatgaggtgaaagtcagtgaattcaccctgtgtttaacctcaggggtgaataaaataaattagtgccacagaagacaatgggaagaggctttccagagaaccctgagaatctcacattatgtgatcagtgtgttagttgggacgcttgagtgtgactgctgcaaagccttgcacagaatggctcaagggagaaggagaatttattggaaaagttccagggtgctcgagcatcaggcagggctggacccaggagctccaatagtgtcctccagacttgtcctgtccctcattcttacctcttctgccctccactggcttcatcatgggcaggctgtctccctgcatgggatttctctttcccaaatgttccaactaaggccttgttggctccaatcatctggctataggctgtgttcatcccagatctaatcactgtggccaagagaaagggatggtccagtgtgccagcctaagtcatcttgtggcccaccttgatggtgggggtagattagcattgtggaagcctgtggaccatttggggtcatgtgaggaaggttagaatgaaggagccgtggttacaggggcccttgggccaggtggagctgttgttttcttaggtggaggagacttggtgacgttcacctcaagatggctgcatttcatgggtccagggaaagtctcaccttccatgaggtgggaggagagagggaagaaggaagaggtgcccaaataggcagggtgcagggcttggaggccggaaacaggggctttgactcttaagaagggggcgtcagtcagctgcctcacaggaggggctggggccctcagcagcccccggaaagggaaggagtgggaccagagtctcagcagtgaggacactggtgccctgtgacccttggagggtgagccatcccgggcccatccaggtgtgggcactcgggcacgtgctgtgaggggagcagagctggtgggaagggaggacaggagcagaggctgtcatggagccacagtacgatgcaggggtgcggtggccccatgggttgcagagaggccacccttgccctgcctaagggtccccacacctgctgacctcctctggctggtgtctcctcccagtacttcctgcaggacaacctgccgagggcaccacctgctgcctcgaggtcactgcccagcaggaggagaagcaggaggatgcagccatctgcccagtgacagtgctccctgaggtaagcggggagtatcaccctgttttggtcacagcatctcctgtgaggcaggcccacccctgaggcatccactctgccctgggctttcctaagacctcccacaggctgggacattctgagattctgagctcttaggtctgtgctgaagcaatctgagtatgaagagcagccctgccctccagccactgtggcatcactggagacaacgcatggtgacccgggagctgagaaagcaggaggcaagagggaagggactaagtgtttacagagacttgagaggtggaactaccacaggcaggcacatctgtatccaggtcagaacaagagagccctcaaccttcagaaatgcatacttaggtatttatctttggtatctgggatttgcttcagaataacccagagctggggtgtgggtgaaaaagattggtcctgatgcgctgaccactggggtagtggtatgtatgtgtcattggtcagacctgtttgcactgcaaatggcttatactggctcaagcgtagaagtcaatttattggctctcatgtattctctggtaggcttcaggcaaggctgcatccaggtgctcccaggtgatgggaagaatctctggccaacctgtttcatggctctgctttctcccctttcttcttcttttttttttgagatggagtttcactcttgttgcccaggctggagtgcaatggcgcgatctcagctcactgcaacctctgcctcccaggttcaagtgattctcctgtctcagcctcctgagtagctgggattacagacagctgccactacacccggctaatttttggtatttttaatagagacggggtttcaccatgttggccaggctggtctcgaactcctgacctcaggtgatccacccgccttggcctcccaatgtgctgggattataggtgtgagccactgcgcgtggccactcccctttcttcttaggcagattctgccccatgtaagcaaaatgcctcagatcctggcaaagcagcgttgggggtacctcttcttcccaaagtcctggtcagttccccagaaaggaccagtcatggctgtgccagggtgactgccctcccccaggtcagccctgtcgacaaaggcaggggcttggttgtcatttccaccaagtgggaagacagtattaatagatggagaaccctctgcagtgggaagatttcagcaatgggcaagctggatagagccgtggttaggatggagttgtttgcttgttgcacttggagctctttatgaagcaagggctctgcctcccagcctgagacccagaccctggtttggacccagtagaactcttgtgggccctgggttggtgtctctgagcaaatccccaaagcaggagagtccctagcaccgtgagctctgtcagaacctcccagctggcctttcttctgccctcattgacaaccctctgaccctcttgctgagcatagacacatatgtgatgttacaggagccagtgacctcccaggatgtggctgtggacttcagccgggaggagtgggggctgctgggcccgacacagaggaccgagtaccgcgatgtgatgctggagacctttgggcacctggtctctgtggggtgggagactacactggaaaataaagagttagctccaaattctgacattcctgaggaagaaccagcccccagcctgaaagtacaagaatcctcaagggattgtgccttgtcctctacattagaagataccttgcagggtggggtccaggaagtccaagacacagtgttgaagcagatggagtctgctcaggaaaaagaccttcctcagaagaagcactttgacaaccgtgagtcccaggcaaacagtggtgctcttgacacaaaccaagtttcgctccagaaaattgacaaccctgagtcccaggcaaacagtggcgctcttgacacaaaccaagttttgctccacaaaattcctcctagaaaacgattgcgcaaacgtgactcacaagttaaaagtatgaaacataattcacgtgtaaaaattcatcagaagagctgtgaaaggcaaaaggccaaggaaggcaatggttgtaggaaaaccttcagtcggagtactaaacagattacgtttataagaattcacaaggggagccaagtttgccgatgcagtgagtgtggtaaaatattccggaacccaagatacttttctgtgcataagaaaatccataccggagagaggccctatgtgtgtcaagactgtgggaaaggatttgttcagagctcttccctcacacagcatcagagagttcattctggagagagaccatttgaatgtcaggagtgtgggaggaccttcaatgatcgctcagccatctcccagcacctgaggactcacactggcgctaagccctacaagtgtcaggactgtggaaaagccttccgccagagctcccacctcatcagacatcagaggactcacaccggggagcgcccatatgcatgcaacaaatgtggaaaggccttcacccagagctcacaccttattgggcaccagagaacccacaataggacaaagcgaaagaagaaacagcctacctcatagctctcaagccagttgaagaaaccttgccttttcagcttgaccctgcaatataacatgcacaggcctgcttgtgaatcaggactgaatgtgaaagggaagtattgagtgaggacattcccaaaaccaaaggacaactgaggagactgcccagcacataatgaataaataagaaaatgagtgaggagttattaacatcatttggaaaaaagatttcccattcacttgatattgtttgttcactcatttagtcattaaaagtgagattaataaaatctgaaaaaaaaaaaaaaaaaaaaaaaaaaaaaa

SEQ ID NO: 28428 - DNA, 6826 bp, Homo Sapiens
ggaaaatacttttctctagcatcgtaggaggaagaaaacaaacacatcagatattttcagcactaaaagagatggttttccccacatatatgtaaaagaaatttgcaagactactggattttgatctcatggttgcagtgggtgaataggtggccttttgtgatctcctacatcaccctggaagtgagacttcttcggtttcttctagagtcagtttggtatcagaatggcaaagcaacttaaccttccagaaaatacagatgattggacaaaagaggatgtaaatcagtggttagaaagtcataagattgaccaaaaacacagggaaattttgactgaacaagacgtgaatggagcagtcttgaagtggttaaaaaaagaacatcttgttgatatgggcatcacacatggaccagctattcaaatagaagaactattcaaagaattgcggaaaacagccattgaagattcgattcagacatctaagatgggaaagcccagtaaaaatgctcctaaagaccaaactgtgtctcaaaaggaacgtagagaaacttcaaagcaaaaacaaaagggtaaagagaacccagatatggctaatccgtctgcaatgagtacaactgctaaaggttctaagtcactaaaagttgagctcacagaagataaaatagattatacaaaggaaaggcaaccatccatagacctgacatgtgtatcatatccatttgatgaattcagtaatccatatcgttacaagttggattttagtctacagcctgaaacaggaccaggcaatctcattgatccgatacatgaattcaaagccttcacaaatacagcaacagccacagaagaggatgtcaagatgaaatttagcaatgaggttttccgatttgcttcagcttgtatgaattcacgtaccaatggcactattcattttggagtcaaagacaaaccccatgggaaaattgttggcatcaaagtcaccaatgataccaaggaagccctcattaaccatttcaatctgatgataaacaagtattttgaagaccatcaagtccaacaagcaaagaagtgcattcgagagccaagatttgtggaagttttactgccaaatagtactctatctgacagatttgttattgaagtggacattattccacagttctctgaatgccaatatgattacttccagattaaaatgcaaaattacaacaacaaaatatgggaacaaagtaaaaaattctcactatttgtgcgagatgggaccagctctaaggacattacgaaaaataaagttgatttcagagcatttaaagcagattttaaaacactggcagagtccagaaaagcagcagaagaaaaattcagagcaaaaacaaataaaaaagaaagagagggaccaaagttggttaaattattgacaggaaatcaagatttgttagataattcatactatgaacagtacattcttgtaacaaataaatgccacccagatcaaacaaaacacttagatttcctgaaggaaattaaatggtttgctgtattggagtttgatcctgagtctaacatcaatggagtggtcaaagcttacaaagaaagccgagtagcaaaccttcactttccaagtgtatatgtagaacagaaaaccacaccaaatgagacgatttctactctaaatctttaccatcaacccagctggattttctgcaatggcaggttagaccttgacagtgaaaaatataaaccctttgatccaagttcctggcaaagagaaagagcttctgatgtcaggaaactgatttcatttcttacacatgaagacataatgccaagagggaagtttttggtggtatttctattactgtcctctttggatgacccaagagatcccctcattgagactttctgtgctttctaccaggatctcaaaggaatggaaaatatactgtgtatttgtgtgcacccacacatatttcagggatggaaagatctacttgaagcaagattaataaaacaccaagatgaaatttcaagccaatgtatttctgctttaagccttgaagagatcaatggcactattcttaaactaaaatctgtgactcaatcttcaaaaaggcttttgccatctattggtttatcgactgtccttctgaaaaaggaagaagatatcatgactgctctggaaattatctgtgaaaatgaatgtgagggtacactgttagagaaggacaaaaataaattccttgaattcaaggcatcaaaagaggaagacttctatcgaggtggcaaagtgtcatggtggaacttctacttctcttctgaaagttattcttcaccttttgtcaaaagggataaatatgaaagacttgaagcaatgattcaaaactgtgcagattcttctaaaccaacaagtaccaaaattattcatctgtatcatcatccaggctgtgggggaactaccttggctatgcacattctctgggaactaaggaagaaattcagatgtgctgtgctgaaaaacaagacagtggatttttctgaaattggagaacaggtaaccagtttaatcacctatggggcaatgaaccgtcaggaatacgtacctgtactactccttgttgatgattttgaagaacaagataatgtctatcttctgcagtactctattcaaacagctatagctaaaaagtacattcgatatgaaaaacctctggtgattatcctaaattgtatgagatcacaaaatcctgaaaaaagtgcaaggatcccagacagtattgccgtaatacagcaactctctcccaaagaacagagagcttttgagcttaaattgaaagaaatcaaagaacagcataaaaactttgagggtttttattcctttatgatcatgaaaaccaattttaataaagaatacatagaaaatgtggtccggaatatcctgaaagggcagaatattttcaccaaggaagcaaagctcttttcttttctggctcttcttaattcatatgtgcctgataccaccatttcactatcacagtgtgaaaaattcttaggaattggaaacaagaaggctttctgggggacagaaaaatttgaagacaagatgggcacctactctacaattctgataaaaacagaggtcatcgaatgtgggaactactgtggagtacgcatcattcactctttgattgcagagttctcactggaagaattgaagaaaagctatcacctgaataaaagtcaaattatgttggatatgctaactgagaatttgttcttcgatactggtatgggaaaaagtaaatttttgcaagatatgcacacactcctactcacaagacaccgcgatgaacatgaaggtgaaacaggaaattggttttccccatttattgaagcattacataaagatgaaggaaatgaagcagttgaagctgtattgcttgaaagtatccatcggttcaacccaaatgcattcatttgccaagcgttggcaagacatttctacattaaaaagaaggactttggcaatgctctaaactgggcaaaacaagcaaaaatcatagaacctgacaattcttatatctcagatacactgggtcaagtctacaaaagtaaaataagatggtggatagaggaaaacggaggaaacgggaacatttcagttgatgatctaattgctcttttggatttagcagaacatgcctcaagtgcattcaaagaatctcaacagcaaagtgaagatagagagtatgaagtgaaggaaagattgtatccgaagtcaaaaaggcggtatgatacttacaatatagctggttatcaaggagagatagaagttgggctttacacaatccaaattctccagctcattcctttttttgataataaaaatgagctatctaaaagatatatggtcaattttgtatcaggaagtagtgatattccaggggatccaaacaatgaatataaattagccctcaaaaactatattccttatttaactaaattgaaattttctttgaaaaagtcctttgatttttttgatgaatactttgtcctgctaaaacccaggaacaatattaagcaaaatgaagaggccaaaactcggagaaaggtggctggatattttaagaaatatgtagatatattttgtctcttagaagaatcacaaaacaacacaggtcttggatcaaagttcagtgagccacttcaagtagagagatgcaggagaaacctagtagctttaaaagcagacaagttttctgggctcttggaatatcttatcaaaagtcaagaggatgctataagcactatgaaatgtatagtgaacgaatatacttttctcttagaacaatgcactgtcaaaatccagtcaaaagaaaagctaaatttcatcttggccaacattattctctcctgtatccaacctacctccagattagtaaagccagttgaaaaactaaaagatcagcttcgagaagtcttgcaaccaataggactgacttatcagttttcagaaccgtattttctagcttccctcttattctggccagaaaatcaacaactagatcaacattctgaacaaatgaaagagtatgctcaagcactaaaaaaattctttcaaggggcaatataaacatatgcatcgtacaaagcaaccaattgcatatttctttcttggaaaaggtaaaagactggaaagacttgttcacaaaggaaaaattgaccagtgctttaagaagacaccagatattaattccttgtggcagagtggagatgtgtggaaggaggaaaaagtccaagaacttttgcttcgtttacaaggtcgagctgaaaacaattgtttatatatagaatatggaatcaatgaaaaaatcacaatacccatcactcccgcttttttaggtcaacttagaagtggcagaagcatagagaaggtgtctttttacctgggattttccattggaggcccacttgcttatgacattgaaattgtttaagagcctgatattcttcctccaagaatttgatctcagtacccatttaatttttttggactcaagatctatgctttaaaccggcaaggttatagatacagcctctagctcttcagatctgtacatgcagtatttaatttcctcttaaacatgttatgagttctacaaagacaatagtgaaaaaggaaggagtgagatatatgaaaagtagcaaatatgttccttggtttggttaacatcattgatgacaaaataataaggagctatgactggagtcaggagaagttagtgtaataagctggctacacagaaccccactacttaccaggcatggattgaagaagattgtctactcaaatggcatttagacattagaatgtctgggaaaatatttctcaaagacagcaaaaacctctcaaactgaggagcaacatttattcttactaagcagatcatcaatgtatcatgtgcttggcactcaaggatcttccaaaacagaggaccaaccagtcttctgaaggtcatgcccacagaagtcatcagaccttaccaaagtaggttggagaattagattgccttttcatgcagtgagattcagttaagcaaaaatgaaatttgtctctatagctaattagcttatcaactcccctccaaacaaacaattaaaaaaaaacatacagacactcaaattccacaagctaatgaacaaaagggactcttgtgagaagactaatgagtccctcatccagaagatgccaatgtactggcagattaacatacaacctatgttttgaacaaaaacaaccagcgatacgtaatcaaaatgtaattttcccctaataaaattatggatatgggcagtcatcaatggctgccaaaaccattaagtggaaagctgattaaaaaacaaaaatttctaatggatttatcaaactgtcccaaatcctgataaatattaacatcacagaggaagaccagacattatgggcctggaagtactataggagtgcacacatcacccgtgacatggtcttgccaaataattaaacctgaatttgatcaggtctctggatcttatttgcaattcaaaagaaattttaaaaaaatcctactaacaccaccacaaatatgcaatcagcaatatccagaaaggggaaattcacaggacaaaaacctggttttcttttttggtttcttcaaccaaaaaagaaagaaatggcaaaggaccaaaaaagtgttggggaatctatacattataagggacttaacaactaaagggcaacatatagactttagatcctaatttgagcaaaatctaaaatcaattattaggcaatcagaaaaatttgaacacagactagatatttgaggatattaaggtactatattattgaagattccatggttatgttttttaaagagttcatgccttttagagatacatactaaagtatttgtaaataaatgacatgatctagaatcagtaattttgtgtttggggtgtgggggtggtgaaagggaagtagaaccgaaacaagattagtcctgagttaacaatggctgcaagctggatacatggaattcagcacacttttctccctcttactgattatgcttttgaaattttctcttgtaaaacatttagaaaacaaaaacaaaaaaaatgtgatttgtttctgtcttcaaaatctcattagaattttttcactggaggaagattttcccttgcttctgcataaaattttaactccataacttataagctcactctttattgttactttctaattgacaaataaaaattgtatattaaaaaaaaaaaaaaaaaaaca

SEQ ID NO: 28429 - DNA, 3605 bp, Homo Sapiens
gctggggtacttggaggggaggggtcctgggtgggaaggaggctgctggggagaccctgcaactcatttccgccctaggacaatggcaacaaggtcaggctgttgaatgaagtgccagcatagcccgtggtggtcagctgcctcccataaccattgtttcccttgtatttttggtttactaagcaagtgataagccagatcttccatcgattcggagcctccagaggcttgcttgtatgtatccctcccactcctgcttacagaatgcctcagaaaatatttgtggatttgatggcagctttaatctataagaaagaaagaacaactggaatgcctttgcaaagttatgttccacccagttcccgccctcaggaagctcagggtgacacgggaagtttgggatgggcacagtttattacaaggcagaaagggaccgttgggcgctactatcctaagatattttcagaaaatggtaggccaaggataggaatatgagaaataagtttgagcttaggggccagggtaggtgtcctggagaagtggggcctgcgggatgcatcggggaggaaatgcaggacgcccctgactccctgcacattgcgggagttgagtggacacacgaggacagggctgtgggggcctgcagtgagggcaaggagctgttcctgtccattctctgtgctgagtttcaggagcttccatccttttctttggcccatatcaaactggcaagaatggctgggagagcaactgtctgtgccaagctcactcagctccaagaagctcccatgtatccctggtgtcagggcacccgtcctcacccagcctgagcactgggaaacacgctcctctggctctgggcctctgtccctgttgagcagtggagtggccaggctctgaagtcagaggggcccagaggcagctcggccaagctgcccacctccccttcctctccagaccctccccacaccagatccttctccatattaaaaaatatgtatagtccttcagtatagttcatgagagaaaacaacaacaaaagaattttcttaataatggtactagagtcaggaagcaggccgtgggatcccaggggagagcgggtaggtagatacagctacagccatagcagtcagcttgtacccctggagtgcagtggttgagatggagaagtcaattaccaggcagcacagctgttttttaaaactttctcctgaaagcagggacgttgttcacactaatgctaacggtcgtccagcaccggctgccacgttgccgcagctggaaatgggggcttcggcagtgattcctggagcgtaggtccgctttcttgctagactcttgcctaagttcagtatgatgtcatcctgagtgtgtctgtttcctcacagtttgaacaggaaaatcagcgactaattggtgaaatgaacagcttgtttgatgaagtgaggcaaatcgaagggagagtggttgagatttccagactccaagagatattcacggaaaaggttttgcaacaggaagctgagattgacagcattcaccagttagttgtgggggcaactgaaaatatcaaggaaggcaacgaagacataagagaggtaggcactgtttaggttccccaggtgcgacgtggcgcagcactgagtcccagcagcgggtgttagtctcgccggcacagctgcccaggagccttgctgggcagagctcacggggctgatcacaaaattgtgtgaccgcggagctgcgtgtgttcatgagacccaccacctgtcgcccacctccagctgctttcgagaggcagtggctcaccagcctccaaaggagcaatccagggtgggtgggggtactcctggcagggtcaggccagctcttcatgtccagggatgtacatgggtagctcgttggcccccaccgaggggtcagagcctggcccctgcttacagaggacactacagccatcctgttgaggggactgtttcccaagctcagtcctcagggttgggtcaccacggacatcatgttactgggaaacacaaagcttgcggtcacactctgctcggggcccttaaccctgggacagaagggagtgattccgagagttgtgttgagggagaattgtgcaggacccaaatgatggccaaacagagggaaatataacccatttgtcttctggtggatctcaaaagccatctattcaaggtaagcacagatggaacgacacccatagttacagccaggatcaggagagcacgtgggaagaggggggcatttcagggctgctcaaaccaaaatcctgtgtgataaaaacacctgtgctcccgtccctgcccaggccattaaaaacaacgctggcttccgcgtgtggatcctcttcttcctcgtgatgtgctccttctccttgctcttcctcgactggtacgacagctagccagggccacgggggcccagcacgagagtcctcatgggcactcacagactgcgtgctttcatgtacttccagtgctggagcatggtatgaccagattttatcacagtgccatttgaagggaaaggagttcagacagacagacgtattccccaaaaagggataccccaggccgatggtgttcagccatttagcagctgaaaaaggaaacagtgcacaccaatgggaggcagcctgcgtagccctcatcaggcaagacagactgaatgcaggagtgggtgattagctgctccttgaacttgaggctgccttggcagcaggggcacagcaggcctcaagagcccctaattgtctcagggttcaaaggaagacactgacctttcccatcccggtagcttcagggaagatcatagttaataacgtctctcaacaaatgattacttctttgtttccttgtggcttcttgtctgtctgagtcaacgaatacacagacttactggattatagaagagaaaattcacatctgccttgttaatctaataaatataattacagccccttaatgtgttgtcaatgagtctaagttgacaaattcagtggcagcccagccacctcctatcaatcaatcagggaagaaatgcaggggagactggggccctcagtgaggggctgcctggcattactcctccaaagactgctgcccccagaacaggcagggggtgtgggagggccagtttcccgccactgggtccaaggagcctttgttcaaaggaagaagtgggccacggaagaacgggcctgcttctctcgtgcctgtgcttctgacctccaggaactgtaaacaggaacacctatgtgtaactgaaggcatgagacatctgtacaggaagcatcccagcgcccacatgggcatgagacagtctgcactgcgcctggtgaaatgcgtgtgtgtacagacagtccactgggcagcacaggtatcctcatgttctttatttgcacagagtgaaatgtcagaagttacatgtaaatgaattcacagtcaataaagtccacgtctacctggaaaaaaaaaaaaaaaaaaaaaaaaaaaaaaaaaaaaaaaaaaaaaaaaaaaaaaaaaaaaaaaaaaaaaaaaaaaaaaaaaaaaaaaaaaaaaaaaaaaaaaaaaaaaaaa

SEQ ID NO: 28430 - DNA, 894 bp, Homo Sapiens
ccccctcactgcctccgctcctcctatcctgcccacgcccactgcagggcctttgcacacactgtttcttctgccctcccttccggcccactccctcatatcattcagtcctcctttcagatgtcacctcctaagatgggctgccctgaccacctcatctataatggccccagtgcctggcacaggattggcacacagtagatattgtcagagatggatctgggttctgtggacaaggctgtgggggcaggtgaagagctccctcttccaggaggttgtttggggttcgaggccttgtttgggttgtaggcttctgtgctggtcagcgttgggccctacaagcgcatgccatgaggcctgcccaggatttccctcatggcctcacagaatacatcggccagagtcattaaagggcgcctgcatctgccttcagagagaggtttgaaggtagaactggggagggatgccaggtgggggttcaggtttcctgttgggtcctgatagaatcagggcaggagaggaagaagaagagggaagaggaggaacccaggcttggggaggggtggcagggcttcacaagcctggggaaggtgaactagggagcagttggggccaccatggcccagagtctatgcctcctcttccttcctgtgttcagagtgtgtgtgggaaccacaagggccttctcagtgttcatagggaagcccggttcacccatgggtgggccgcaatttgggtgccacagtgagcccctagagaccagctctcccagcttccaggacagggactaggggaggcaagagaggctcttccttaaattgtgcacccaaggtgcctcagctgccttactctagactggccccgttaactccccttaaaaaaaaaaaaaaaaaa

SEQ ID NO: 28431 - DNA, 4299 bp, Homo Sapiens
atacgaaaaggaacgatatgaaaaagttataaaggcttgtgctctgaaaaaggatttacagctgttggaggatggtgatctgactgtgataggagatcggggaaccacgctgagtggagggcagaaagcacgggtaaaccttgcaagagcagtgtatcaagatgctgacatctatctcctggacgatcctctcagtgcagtagatgcggaagttagcagacactcgttcgaactgtgtatttgtcaaattttgcatgagaagatcacaattttagtgactcatcagttgcagtacctcaaagctgcaagtcagattctgatattgaaagatggtaaaatggtgcagaaggggacttacactgagttcctaaaatctggtatagattttggctcccttttaaagaaggataatgaggaaagtgaacaacctccagttccaggaactcccacactaaggaatcgtaccttctcagagtcttcggtttggtctcaacaatcttctagaccctccttgaaagatggtgctctggagagccaagatacagagaatgtcccagttacactatcagaggagaaccgttctgaaggaaaagttggttttcaggcctataagaattacttcagagctggtgctcactggattgtcttcattttccttattctcctaaacactgcagctcaggttgcctatgtgcttcaagattggtggctttcatactgggcaaacaaacaaagtatgctaaatgtcactgtaaatggaggaggaaatgtaaccgagaagctagatcttaactggtacttaggaatttattcaggtttaactgtagctaccgttctttttggcatagcaagatctctattggtattctacgtccttgttaactcttcacaaactttgcacaacaaaatgtttgagtcaattctgaaagctccggtattattctttgatagaaatccaataggaagaattttaaatcgtttctccaaagacattggacacttggatgatttgctgccgctgacgtttttagatttcatccagacattgctacaagtggttggtgtggtctctgtggctgtggccgtgattccttggatcgcaatacccttggttccccttggaatcattttcatttttcttcggcgatattttttggaaacgtcaagagatgtgaagcgcctggaatctacaactcggagtccagtgttttcccacttgtcatcttctctccaggggctctggaccatccgggcatacaaagcagaagagaggtgtcaggaactgtttgatgcacaccaggatttacattcagaggcttggttcttgtttttgacaacgtcccgctggttcgccgtccgtctggatgccatctgtgccatgtttgtcatcatcgttgcctttgggtccctgattctggcaaaaactctggatgccgggcaggttggtttggcactgtcctatgccctcacgctcatggggatgtttcagtggtgtgttcgacaaagtgctgaagttgagaatatgatgatctcagtagaaagggtcattgaatacacagaccttgaaaaagaagcaccttgggaatatcagaaacgcccaccaccagcctggccccatgaaggagtgataatctttgacaatgtgaacttcatgtacagtccaggtgggcctctggtactgaagcatctgacagcactcattaaatcacaagaaaaggttggcattgtgggaagaaccggagctggaaaaagttccctcatctcagccctttttagattgtcagaacccgaaggtaaaatttggattgataagatcttgacaactgaaattggacttcacgatttaaggaagaaaatgtcaatcatacctcaggaacctgttttgttcactggaacaatgaggaaaaacctggatccctttaatgagcacacggatgaggaactgtggaatgccttacaagaggtacaacttaaagaaaccattgaagatcttcctggtaaaacggatactgaattagcagaatcaggatccaattttagtgttggacaaagacaactggtgtgccttgccagggcaattctcaggaaaaatcagatattgattattgatgaagcgacggcaaatgtggatccaagaactgatgagttaatacaaaaaaaaatccgggagaaatttgcccactgcaccgtgctaaccattgcacacagattgaacaccattattgacagcgacaagataatggttttagattcaggaagactgaaagaatatgatgagccgtatgttttgctgcaaaataaagagagcctattttacaagatggtgcaacaactgggcaaggcagaagccgctgccctcactgaaacagcaaaacaggtatacttcaaaagaaattatccacatattggtcacactgaccacatggttacaaacacttccaatggacagccctcgaccttaactattttcgagacagcactgtgaatccaaccaaaatgtcaagtccgttccgaaggcattttccactagtttttggactatgtaaaccacattgtacttttttttactttggcaacaaatatttatacatacaagatgctagttcatttgaatatttctcccaacttatccaaggatctccagctctaacaaaatggtttatttttatttaaatgtcaatagttgttttttaaaatccaaatcagaggtgcaggccaccagttaaatgccgtctatcaggttttgtgccttaagagactacagagtcaaagctcatttttaaaggagtaggacaaagttgtcacaggtttttgttgttgtttttattgcccccaaaattacatgttaatttccatttatatcagggattctatttacttgaagactgtgaagttgccattttgtctcattgttttctttgacataactaggatccattatttcccctgaaggcttcttgttagaaaatagtacagttacaaccaataggaacaacaaaaagaaaaagtttgtgacattgtagtagggagtgtgtaccccttactccccatcaaaaaaaaaatggatacatggttaaaggatagaagggcaatattttatcatatgttctaaaagagaaggaagagaaaatactactttctcaaaatggaagcccttaaaggtgctttgatactgaaagacacaaatgtgaccgtccatcctcctttagagttgcatgacttggacacggtaactgttgcagttttagactcagcattgtgacacttcccaagaaggccaaacctctaaccgacattcctgaaatacgtggcattattcttttttggatttctcatttatggaaggctaaccctctgttgaccgtaagccttttggtttgggctgtattgaaatcctttctaaattgcatgaataggctctgctaacgtgatgagacaaactgaaaattattgcaagcattgactataattatgcagtacgttctcaggatgcatccaggggttcattttcatgagcctgtccaggttagtttactcctgaccactaatagcattgtcatttgggctttctgttgaatgaatcaacaaaccacaatacttcctgggaccttttgtactttatttgaactatgagtctttaatttttcctgatgatggtggctgtaatatgttgagttcagtttactaaaggttttactattatggtttgaagtggagtctcatgacctctcagaataaggtgtcacctccctgaaattgcatatatgtatatagacatgcacacgtgtgcatttgtttgtatacatatatttgtccttcgtatagcaagttttttgctcatcagcagagagcaacagatgttttattgagtgaagccttaaaaagcacacaccacacacagctaactgccaaaatacattgaccgtagtagctgttcaactcctagtacttagaaatacacgtatggttaatgttcagtccaacaaaccacacacagtaaatgtttattaatagtcatggttcgtattttaggtgactgaaattgcaacagtgatcataatgaggtttgttaaaacgatagctatattcaaaatgtctatatgtttatttggacttttgaggttaaagacagtcatataaacgtcctgtttctgttttaatgttatcatagaattttttaatgaaactaaattcaattgaaataaatgatagttttcatctccattcaaaaaaaaaaaaaaaaaaaaaaaaaaaaaaaaaaaaaaaaaaaaaaaaaaaaaaaaaaaaaaaaaaaaaaaa

SEQ ID NO: 28432 - DNA, 3980 bp, Homo Sapiens
gccgcttctcttccccttccgtgggtcagggccggtccggtccggaacctgcagcccctttcccagtgttctagttcgcccgtgacccggaataatgagcaaggagggtgtggtgggttgaaagccatcctactttactcccgagttagagcatggattcagttttagtcttaagggggaagtgagattggagatttttatttttaattttgggcagaagcaggttgactctagggatctccagagcgagaggatttaacttcatgttgctcccgtgtttgaaggaggacaataaaagtcccaccgggcaaaattttcgtaacctctgcggtagaaaacgtcaggtatcttttaaatcgcgatagttttcgctgtgtcaggctttcttcggtggagctccgagggtagctaggttctaggtttgaaacagatgcagaatccaaaggcagcgcaaaaaacagccaccgattttgctatgtctctgagctgcgagataatcagacagctaaatggagtctgagcagctgttccatagaggctactatagaaacagctacaacagtataacaagtgcaagtagtgatgaggaacttttagatggagcaggtgttattatggactttcaaacatctgaagatgacaatttattagatggtgacactgcagttggaactcattatacaatgacaaatggaggcagcattaacagttctacacatttactggatcttttggatgaaccaattccaggtgttggtacatatgatgatttccatactattgattgggtgcgagaaaaatgtaaagacagagaaaggcatagacggatcaacagcaaaaagaaagaatcagcatgggaaatgacaaaaagtttgtatgatgcgtggtcaggatggctagtagtaacactaacaggattggcatcaggggcactggccggattaatagacattgctgccgattggatgactgacctaaaggagggcatttgccttagtgcgttgtggtacaaccacgaacagtgctgttggggatctaatgaaacaacatttgaagagagggataaatgtccacagtggaaaacatgggcagaattaatcataggtcaagcagagggtcctggttcttatatcacgaactacataatgtacatcttctgggccttgagttttgcctttcttgcagtttccctggtaaaggtatttgctccatatgcctgtggctctggaattccagagattaaaactattttaagtggattcatcatcagaggttacttgggaaaatggactttaatgattaaaaccatcacattagtcctggctgtggcatcaggtttgagtttaggaaaagaaggtcccctggtacatgttgcctgttgctgcggaaatatcttttcctacctctttccaaagtatagcacaaacgaagctaaaaaaagggaggtgctatcagctgcctcagctgcaggggtttctgtagcttttggtgcaccaattggaggagttctttttagcctggaagaggttagctattattttcctctcaaaactttatggagatcattttttgctgctttagtggctgcatttgttttgaggtccatcaatccatttggtaacagccgtctggtccttttttatgtggagtatcatacaccatggtacctttttgaactgtttccttttattcttctaggggtatttggagggctttggggagcctttttcattagggcaaatattgcctggtgtcgtcgacgcaagtccacgaaatttggaaagtatcccgttctggaagtcattattgttgcagccattactgctgtgatagccttccctaatccatacactaggctaaacaccagtgaactgatcaaagagctttttacagactgtggtcccctggaatcctcttctctttgtgactacagaaatgacatgaatgccagtaaaattgtcgatgacattcctgatcgtccagcaggcattggagtatattcagctatatggcagttatgcctggcactcatatttaaaatcataatgacagtattcacttttggcatcaaggttccatcaggcttgttcatccccagcatggccattggagcgatcgcaggaaggattgtggggattgcggtggagcagcttgcctactgtcaccacgactggtttatctttaaggagtggtgtgaggtcggggctgattgcattgcacctggcctttatgccatggttggtgctgctgcatgcttaggtggtgtgacaagaatgactgtctccctggtggttattgtttttgagcttactggaggcttggaatatattgttccccttatggctgcagtcatgaccagtaaatgggttggagatgcctttggcagggaaggcatttatgaagcacacatccgattaaatggataccccttcttggatgcaaaagaagaattcactcataccaccctggctgctgacgttatgagacctcgaaggaatgatcctcccttagctgtcctgacacaggacaatatgacagtggatgatatagaaaacatgattaatgaaaccagctacaatggatttcctgtcataatgtcaaaagaatctcagagattagtgggatttgccctcagaagagacctgacaattgcaatagaaagtgccaggaaaaaacgagaaggtatcgttggcagttctcgggtgtgttttgcacagcacaccccatctcttccagcagaaagtcctcggccattgaagcttcgaagcattcttgacatgagcccttttacagtgacagaccacaccccaatggagatcgtggtggatattttccgaaagctgggactgaggcagtgccttgtaactcacaatgggcgcctccttggcattataacaaaaaaagatatcctccggcatatggcccagacggcaaaccaagaccccgcttcaataatgttcaactgaatctcacagatgaggagagagaagaaacggaagaggaagtttatttgttgaatagcacaactctttaacctgagggagtcatctacttttttttcctcctttacaaaaaaagaaaggaaatataaaagccgggtttttgcaacatggtttgcaaataatgctggtggaatggaggagttgtttggggagggaaaggagagagaaggaaaggagtgaggtatttcccgtctaacagaaagcagcgtatcaactcctattgttctgcactggatgcattcagctgaggatgtgcctgatagtgcaggcttgcgcctcaacagagatgacagcagagtcctcgagcacctggcctgttgctccaacattgcaaagacacattatcagtccctatttctagagggattactttgaattgagccatctataaaactgcaaggtcttgcccttttttttaatcaaaactgttctgtttaattcatgaattgtatagttaagcattacctttctacattccagaagagcctttatttctctctctctctctctctctctctctctctctctctctctactgagctgtaacaaagcctctttaaatcggtgtatccttttgaagcagtcctttctcatattgagatgtactgtgattttactgaggtttcatcacaagaagggagtgtttcttgtgccattaaccatgtagtttgtaccatcactaaatgcttggaacagtacacatgcaccacaacaaaggctcatcaaacaggtaaagtctcgaaggaagcgagaacgaaatctctcattgtgtgccgtgtggctcaaaaccgaaaacaatgaagcttggttttaaaggataaagttttcttttttgttttcctctcagactttatggataatgtgaccgggtcttatgcaaattttctatttctaaaactactactatgatatacaagtgctgttgagcataattaaataaaatgctgctgctttgacagcaaaaaaaaaaaaaaaaaa

SEQ ID NO: 28433 - DNA, 4904 bp, Homo Sapiens
gttgcgcagtagtgctagcggcttcgcggttcggtcctcgcacccggcagccgccactggtgctgagctgctaggaagcccctatcgccgagctcgttggagcttgaacccattgtcacccctccgactcaccggcccaaaaaaaaaaaaaacatggttgaagcagatcgcccaggaaagctcttcattggtgggcttaatacggaaacaaatgagaaagctcttgaagcagtatttggcaaatatggacgaatagtggaagtactcttgatgaaagaccgtgaaaccaacaaatcaagaggatttgcttttgtcacctttgaaagcccagcagacgctaaggatgcagccagagacatgaatggaaagatggcggtggatattccatgaattttaacatgagttcttccaggggaccactcccagtaaaaagaggaccaccaccaagaagtgggggtcctcctcctaagagatctgcaccttcaggaccagttcgcagtagcagtggaatgggaggaagagctcctgtatcacgtggaagagatagttatggaggtccacctcgaagggaaccgctgccctctcgtagagatgtttatttgtccccaagagatgatgggtattctactaaagacagctattcaagcagagattacccaagttctcgtgatactagagattatgcaccaccaccacgagattatacttaccgtgattatggtcattccagttcacgtgatgactatccatcaagaggatatagcgatagagatggatatggtcgtgatcgtgactattcagatcatccaagtggaggttcctacagagattcatatgagagttatggtaagatactggctaagggtctttagtatcaccagcttgagtttttaggttcgtgagccagtttattaggctgtgtggtgcttgcttttaaagggatgtttgcttgcttttaaaggggtaactttatcagctgggcttttcctagttttgtgaggggctttttttgtttttctaagtttcttttgaggctgtttgcttgctttggaggggattttgcttgcttaaattggcagccttatgtgttttcccccaacagtgaaaatacaatttaaaaattttattaacaagatcaaatatttaccattgcaatatgaaggcaagttctacagttcaaaattgcaacttatcactggaaagtggctgagtgtctactataaaataacaagctctctggaatatcctcttgaaatacacaccgtcttcagtcttttcaaacaaacattaaaatgaatccaattccatatctcagcagatgagcaaatccctgttatggccagcaatggcagagtttaaaacctcccacccagctgagaaagtaaacttttaatacaagaattctgtaaattcagatttaaaatgttgtatatatacaatttatagtgttgccatattacctgaccattgaccctgcaggtaactcacgtagtgctccacctacacgagggcccccgccatcttatggtggaagcagtcgctatgatgattacagcagctcacgtgacggatatggtggaagtcgagacagttactcaagcagccgaagtgatctctactcaagtggtcgtgatcgggttggcagacaagaaagagggcttcccccttctatggaaagggggtaccctcctccacgtgattcctacagcagttcaagccgcggagcaccaagaggtggtggccgtggaggaagccgatctgatagagggggaggcagaagcagatactagaaacaaacaaaactttggaccaaaatcccagttcaaagaaacaaaaagtggaaactattctatcataactacccaaggactactaaaaggaaaaattgtgttactttttttaaattccctgttaagttcccctccataatttttatgttcttgtgaggaaaaaagtaaaacatgtttaattttatttgactttcgcattgcttttcaacaagcaaatgttaaatgtgttaagacttgtactagtgttgtaactttccaagtaaaagtatcccctaaaggccacttcctatctgatttttcccagcaaatgaggcaggcaattctaagatcttccacaaaacatctagccatctaaaatggagagatgaatcattctacctatacaaacaagctagctattagagggtggttggggtatgctactcataagatttcagggtgtcttccaactgaaatctcaatgttctcagtacgaaaaacctgaaatcacatgcctatgtaaggaaagtgctattcacccagtaaacccaaaaaaagcaaatggataatgctggtcattttgcctttctgacatttccttgggaatctgcaagaacctcccctttcccttcccccaataagaccatttaagtgtgtgttaaacaactacagaatactaaataaaaagtttggccaaaaccaaccatgaagctgcaaaggtgcttgctcttactgtttcaaatttttgcaactctgtagtgtctcacttttaaaggaacagcttgattgcaaaggagaaaatagataagcaatgaagttatctccaacttcctaaaggcttatgacttctaaaaagtgaatctatcagcattccacatcagatttaaaacatcaaatgcctgtgaaacagcaaagatggtaagcaaagcaaactagtttttccgtctaagtcgaaattgaacacttaccttcctcatagtacagtgaaacatactgtacctcaaggcaatggaaatgccttctagattaaaaaaacttttggaaaaaagaaatattcaatagcgtattagaagtcctccaaattcaacacttggatttttttttttttttaaagcatgtgtgacacttaaaggctttattaatagagctgttgtttaccaatggcgatctggggcttgggagggggtatttttttcaaagtccatttttgatgaagacctttaaacatgcttcgtatgtttttaacatttttttcaaattagtcttttagtcaatataggaaatggcttaagtttggggtccccctttttacccctgtaagccattgcaaacttgacatttagttggatgcctgacttgtttttagttctatgaaactacactgtatggagaaaatctattgcaagtggtctttaaaaagcaaaacctgaggcagcatgacccaggtccagccatgaagttgaaaaagatgctcttgaatatagtaaacttgaagacctccaactaaaaatccttatactgcacttattccttcaaataagttttgttcgttcaacttatggatttaacgtggcagtgcaccattggaacagaatgacaatccataagccatgcaacttaacaatttaagccattccagtccatcccgagccagtgaatcttccaccacttaagacaaatagtagaacatgaaatatattaagctgcaagtctgaacttgccttttctttctggaaaagagggcagtaataggcaagttttaaaagaatttccttaagagagataactagttttcatttatttaacttttgcaggttggtgattttgctcattatggtcgtggagtgctgattgattcacagtagataaagctggcagtaagaaatgctaagagttgttgaagcagaaggcggctgattgtcaataagtcactacagttgcataagcagtgctgtcagaattggtttggtgcaggcaatagattttgccttcaggggttcctgtggatctgaggaaggcatcagtgttgattaacactcataactagggagtgactggtagttacttaaagcaagtaattgaccaaatggaaaaggggaagtaattaaggaaattggtaagtggaggtagtcaggaagttcttgtggttcttcacatagattttacagctttggctttcattttgtttagctaaagtcatggggacaactcttcaatttagaacttaagttgaattataaaaatgatggatataagtggtagctgtatctagtgaagtgtctgtcagtaagtgaaacattttttggtggtggcttatccacaaacagtttagttgtagaataaaacttatgagtgacatctggaaagtaaccatgctaagatggcaagcacactggaaacaattaggccacttggctttcttttgctgtattgttttataagcctactttacctcccagtcttggaaacaagttttagttttttattggtttggagactagagccaatagtataatgttctcaaaggaaacagacttgagttgttggattagaggaactaacccaacttatatgattttttttttgtttttgtcgtgtagttatggcactgtcttatttggaacatttgcaactagggataatacaacatttttaactctcatttgacaacctactactaatcacagaccacaagggtaatgaccaaatttatgtggtttttgcactccatagttgtcttagcccaatctttctatactcttacgattacttgggttaacgcttctgtgaggaccttctggctcttgagataccctaaatatttaagatatttagatatcttgaagatagtataggatatagagattgtaccaaataggaatataaggagtatgttaaaatgaccagatacctgtttgatagtttactgacctagcagatgtgtggaaaaggaatcagatcttgattcttctgggtttatactggttgtaaaacagaatgatacagaaaatgttttccttgtttaactggtagttgaacatagaacttgggtattatagatcacttttcactttttggaatgttttgtattgaaacttaataaaactttaacatggaaaaaaaaaaaaaaaaaaa

SEQ ID NO: 28434 - DNA, 4300 bp, Homo Sapiens
attgtaattgaattcttcctaaaaattgagaggtttccttttattaacttttaaaataaagaaataagtagtttcattacgattattttgcaaactattgccagtcagaaatgcactttttttttccctgaagttttaggagccgtcactaaaacattagtcttgtgattgttaaaacttgtttgtaatgggttggtgcaaaagtaattgtggtttttccattactttcaatggcaaaaaccgcaattacttttgcaccagcctaacaatagttgattagttagaccttttctgggttttgtattgattatcttggtgtgcatttaattatttttctgaattcttcatggataatgacatagtaattgtgattcttttaataccggttaagcagtatttggcaacttaaacttcctgggagcctaactttactatgttaagtgagtcaggtgtgctttttatttcccttgtttctcattttgccctgtcagtggatggtagatgctttgtatatcttaaatcccttaaaggatcttaaagacatccctcaggtgttctatttaacttttattttattttattttattttatttatttatttattttgagactgagtcttgctctgttgcccaggctggagtgcagtggcatgatctcggctcactgcaacttctgcctcccaggttcaagccattctcctgcctcggcctcctgagtagctgggattacagttgccaccacacccggcttatttttttgtatttttagtagaggcagagtttcaccatgttggccaggctagtctcgaactcctgacctcagatgatccgcccacattggcctcccaaagtgctgggattacaggtgtgatccaccgcacctggccctaacttttaatatacaacacacacacacacacacacacacacacacacacacacacacacacacatactatttcagaagacagtgtgttgccttacccagaatgagtgctaggattaccggcgtgagacagacacacatacacacacatacacacacacagagtctttattgcagaagacagtgtgttgccttataggcgtgagacacacacacacacacacacacacacacacacacacagtctttattgcagaagacagtgtgttgccttaccagaatgagtgcttggattacaggcgtgagccactgtgcccagccctaacttttaatgtacatcacacacacactcacatacacacacacacacacactctgactgtctttattgcagaagacagtgtgttgccttacccagaatgagattgaattgttttgcttcgttttgttttgttattcagtgttgcggtagcagatgcattatcaaaggaaaaatatttggctcctttaattcctctgaaaacatgagtattttgagttctgcagcacaatgactgtaggactaagctaagtctgctttgcagatatctgatcagatagtcccttcattctgtagacgtgtattggttggtccaagacacagtgagtaggagctctgtggaccaagacaaagctggactagagagtacagttcaaacttggcagtttctctaacgactctgtatagcttctggcttctactactgaaacaagagtttagatcactgatggagaggcatagtaatctgtttgtgctttggaaaaatatataaaagtttttttcccctattttttgcactttaaatctgttttgaaattagaactgatatacatttatttgaataatgtgtaactattatggatctattttaatgaacaatttttaccatttcccaagctgcctgtttattataagcatgacatgtttactataaaccttttgcccccataatttctttttttaaaggaaattaatattagtaaaataaacacctctttaatggaagctgcaaccttctagtgatccaagtagacaatagatggtggcatcacagactttatctacacactttcgggtctgaccactacctcccacaatacctagccattttggaaggggaaaacatgcggtggtctagctgtatagctcagggcttaatttcagcttctgagattgtgatgtcatatttcactctcaaaacataggctgaaagcacgaattactcaaaaagtaagcaaaccaatacctggtgaatctatggacagtcatacacatacatcaggggaaaatgtgtgtgtacaacccaaatttacagtatgattgtcattctttgactttgttttgtatagcctgactctgttgaacatgaaattattagtactctaggttttggacagcttgagttcatttgaattccttccttaggaataagtttttatatacactgctaaatgtgtgatgagaatcataaaacactaaccagctgaggtagctgtgattcactttccccccaccctaatgaaggactaggcaagtatttcatgttgtgtgagtggacttcggttccttcagtattgtctaggttattgagtctttctttgcctaatagtggattcccactcttaagataacttttattagtgataaatcagtttagggtatattctgtatgacaggcataaaatgttaagggtgaatgctggccttttccaagaaaaggccaccttaacttgtatgaggaaaaaatcctaactattctcttttttgtatctttttttccgtaactgttttgattgtatattttaaagaaaccacttaatttgtgatgcacgtaatatttgtgtgaacctgagaatatgtcacaataggaaaaagcagagattatacttaggggacatgttaggggggtaaaaatatttaagcctcgaatgttttactgtcatctccactaactatttttacagaaaaagctaaaaactctgttgtaattattgtaagtttacttatttatacttttaaattaggcttttcatacttaaatttttttgacatttgcttttaatatttgtttcttaatgtggaaattgtgtattttaataatcaaattattaggataatagatatatttttaaacattcacctcattaacaaatagatctttgaatttttattaggttttttggctccagacaactgtttagctttaatgatatttctaaattcccagtgacttattaataaaaacaggaaaaatatttaggtaatgtcataaaatttattttacctttctcattttctgagaaaataaatgaaaaaaaccctagatattgctttattaccaacagtgtgtaggtttttgtacatatggaaatttgacacaaaaaaatagggaatttgtatagagaagtttccctcttataaaaggactcccatttgattgttcgaaactataaaatgcacttttactttaccatatctgaaatgacaaaatatcgccctttggaaaacctgactctttgcacgtgtaattcccagagtctacctcagttaaccaggcttagttttaggcaggaatgaattgaattaaattcagttcatcatctatgcagatttgtttcttttaagcacatccttccctcctgctgttgccctcctcccattaacttttctttttaatcttgaaattgtttaaaatattccatctttctttctctagcaaagtgtttgtattccaaataaggcctctgtgaaatgtctgaattacttttcccgtctttgttatggtcagcttcattatttggatgtattgcattcaaagcagcagttccaaacataacacacatctattttcttagagttttgtaaatacaaactaacctgatgacattaaaaattgtggatcctacatgttcctatgttcattctctaaaaacctgagtaactttatgaaaacacacaaacctggaaaaacatcacatttttgtcacatttttactgacaaatgtatattcatatgatggtacggcagcagggagtggcccccagttaacatggctgtgagtggacacagtgtctcgcaggatcactgcatgttatgatggcttgtaagtgcgttgttaagacttttgtttcagtgtttgtctcccagtatttgaacctaatttaaagaaaaagacatttccaagttgtatttattaaatgtgtttttccttaccttttgtgctgctactttgctaatctcattagcttagctgtgtttgtgcataggttatatttggtaataaatttatagagtgttaaaaaaaaaaaaaaaaaaaaaaaaaaaaaaaaaaaaaaaaaaaaaaaaaaaaaaaaaaaaaaaaaaaaaaaaaaaaa

SEQ ID NO: 28435 - DNA, 4702 bp, Homo Sapiens
tgttttttttttttttttttttcttttggccttaactgatatgcttagcttctgctatactgtctcaggaattcggtagagattttatgccacaaggaaataggcacataaatgaggcctgcccatgaaggcagtttttaatcactcttttatctgaaggtattttgagaggctgcttattacagtgcttgagctcgagctcctgcatgccagagctcaaccgcttgagttcaataccatttattaactgtgtgacttcaggtgagtgacttactctcccaagcttcagttcactcaactggaaaatgggaatagaccgggtgtggtggctcacgcctgtaatcccagctacttgggaggctgaggcaggacaattgcttgaaccaggaaggtgaaggttgcagtgaggtgagattgtgccactgcactccagagaggccgaggcaggtggatcacccgaggtcaggagtccaggaccagcctggcccacatagcaaaaccccatctccactaaaaatacaaaagttagtcaggcatggtggcaggcgcctgtagtcccagccactcgggacgctgaggcaggacaatcccttgaaccccagaggcaggtgctgcagtgagccaagatcgcaccactgcactccagcctgggtgacagagttaagactctgtctcaaaaaaaaaaaaaaaaaaaaaagatacttattaaaagaagaaggaagagaaggaaaatcagttttcccagtctctataattaaactaggcagttagagacaattggaaattcttacaaatttaaataaaaagcacaactacattaattaaagaaactcaagaaatatgcacttaaattaagaatggaaatgaacagaaaatacatatctagagtttcactgaacctagagtatttaaaatgaaaaattcaggtgtcaggaaatttatgatttcccaggtctactaaactcctggaacaattgttggcatttaattgctattcatgtctcgcgtactctgtactttcactgagtgcacttggagttaatatttcaattaaaaaactaatacatcagtaaaaacgcccagatttgagctaatcatttattctcaggctcacagggaaatactggatattcttcgagttaataaagtgtgaaatgattttaattattcaagggaaatatagtataccagtcttgcaaatggtttttttagacagcatggtctgtcttatcccatcctacatcagaaaatttaattggcttagttatttcctctttcccaaatccctttttatggcaaagagaaaatgaggacctacagcagcccacgttgctgaggacctaaaccagtccctgtgaaaaccaaaacagggatgggctggatttcagtttgtttctcataggttccgaagtcagagttttaaaagatttaacaggctgggcacagtggctcatgcctgtaatcccagcactttggaaggctgagatgggcggatcacctgaggtcaggagttcaagaccagctatggccaacatggagaaaccctgtctgtactaaaacagaaatacaaaaattagtcgggcatggtggcaggcgcccgcaatcccaactactcgagaggctgaggcaggagaatcgcttgaacccgggaggcagaggttgcagtgagccaagatcgcaccattgcactccagcctgggtgacaagagtgaaaactccgtctcaaaaaaaaaaaaaaagatttaacattaatttatttggaatttggacagccaactgccaatgtcaagcattccaatgttgagagcctaatacagaatcttgttcatgtggggagacctctgagaccctgagttgcattagcatggcactactgtcatctccaagcccgtcagagaacagcgcccgtccagtgcagacatttgaagctaggcgaggcgggttacacagcctggggagtctttgtacttttcaatattctccaagggaagtctagacaggcttcacattttgttaagtacagctaggttctgtccacaataaaacagaactaggacaactgttttggaaacatagttagcacataattgtagctaatttagtttttttctctgaagcagcatgaaaagaaatttgtttttgtacaaaagatgtttttatcttctatagcccacaattcccaacaacagagtgtcctctctccttccctctgctgcaaatatatgcacctacataacacccacatgcacgtttttttctagcctaagccactatctacccctgctgttctctttttggggatttcttcaagcatatttacaaaacacttgctgagcccaactgccgcctcactgctgtatcctagttacatgagccatcagttccccaaacgcttgctttcacctgtctgttgggaaaccacctaagcctatacgaggaagaaaaatcattcagaacaaatgttggcttgaatactcatgtcgttttcttaactgcttgatacaggctttcaccgagatttggtgggaatcaaaagtacatctttaaaagaatcctggcctttaccttacactatatataaaaataaactcaaatagatcaaagacctaaatgtaagagctaaaactataagacttggaagaaaatacaggggcaaactttcatgatactggatttggcaatgattttttggacaaccccaaaagcacagcaacaaaagaaaaaatagataaagtaaacttaatcgaaattaataacttttgtgcaccaaaggacactgtcaagagagtgaaaaggcaacccacagtgtaggagaaaatatgtgcaaatcatgtctgataaggaattgatattcagaacatataaagaactacaactcaataacaaaaagcaaacaagctaatttaaaaatggtcaaaaaagttgaacagatatttttccaaggaagatatacattatacatccgcaaagatatacattatacatctgcattacacatctgcaaagacccttgaaaaaataaagaagacacacagatgccccttaaggacatgagaagatgctcaacatcattcatcattagggaaatgcaaatcaaagccaccatgatataccgcttcacactcactgtgatggcaattatcaaaaaaacaaaaccacaagtgttggtgagaatgtggagaaactggaacccttgtgcactgctggtgggaatgtataatggtgcagcttctgtgggaaaaagtatggtggtgcttcaaaaatataatcataataaacagaagtaccacatgagccagcagcttctcctgatgcacagtgcaagaaatgaacataagtggtaataataaatattcagtgaatgaatgtaggcctcacatatctttttcccatagagagattgaggttggtaagtaataacagatctggtgacactgtcttctactttagagacctgatattggctagaggtggggtaggtaaaggggagggaataggcttttattaggttggtgcaaaagtgattgcagtttttgtcgttacatttaatggcaaaaactgcaattacttttgcaccaacccaaatattttttgagtatctataaaaatatttctggttttaaaatcttcctaaattggtaatacagtttttacatgtgccctgtgaaacgcacattgccatatatgatgcgtggggataggtgggaaggtgggtaaaatttgctgtttctgaaagagttggacaatatcaagagctttacagtgttcattagtcaattctcattagcccaatgattccatttatagacatgtataatcaaatacccaagcaaagatttacattcaaatctgtttactgaagttctatttataatacaatgcaatgaacataatagtatatatttacacgtaatgtaataaacacaaatattcaatggtataaaaatggtcaataaattgtggcatagccacagcttagagtacctgtttaatgttctcagctattttaactttgctaaataatatttaaagatatgcggtagtcccccttcatctgaggaggacctgttccaagacccccagtggatgcctgaaacctctgatagtaatgaaccctatatatactgttttttcctatacatatttacatatataatacatacctatgattaagtttaatttataaattaggcacagtaagagattaacaacaacaataataaaatgtaacaattatagcaatactctaataataaagttatgtgagtgtggtctctctctctgtctcaaaatatcatactgtatgcctctatttttggaatacagttgacaacgggtaactgaaaccgagaaaagtgaaactgcagatgggggctgactactgtatatgaaaattaaacaatcagccaggcatggtggctcacgcctgtaataccagcactttgggaggccgaggcgggaggatcacgaggtcaggagatcgagaccacggtgaaaccccgtctctattaaaaatacaaaaaaaaaattagccgggtacagtggcaggcacctgtagtcccagctactcgggaggctgaggcaggagaatggcgtgaacccgggaggcagagcttgcagtgagccgagatcgcgccactgcactccagcctgggcgacagagcaagactctgtctcaaaaaaaaaaaaaaaaaaaaaaaaa

SEQ ID NO: 28436 - DNA, 2623 bp, Homo Sapiens
gttttgtcgacgccgctgccaccgcctgcctgagagaagtcgtcgcggccgaccccgtcgcctccgccggctaccatgtccgcccaggcgcagatgcgggccctgctggaccagctcatgggcacggctcgggacggttcagtgtatctttgcctgcctacatcaatctgcaagggagttgcagaaagcctcatgttcatcgagccgtgagtcacaaccaatttctaagctgttataacaaaaaagtgtttgctttttttcacaagtaactttaaaagtgtagtttagaaagaaaacattttcaataaaaagacactacattaatcctggatgcttgcaaatcctaaaatatattcctcctctagcgttgcacagctctgtgttgtatacacagactagctttaaaatttgtcacataccactttacctttacttttatgtatcattcccccgacttccttactgcaggtgtgggcaagaaaacttttcctttaacacttttcaacagcgggcataaaattctgcagctgaggtcttgaagaatgcagatgggtacagtatgtgttggagctcacagtgtgtattgactaacctagttccttttttgctttttttggtattgtcttgttaaaagtgactcccaggtagcaactctcttttttaagggtgggaacgaaagggacgtaggaagaatagatctagattatttaacagtcttcgatagagtttgaaagctttcttcttcattcaattttgggcaaaatactgcctctgcatttgttcataacaaaaagattagattaataagtagcttttgttggtggaaattaccagctctataagtcacccttggtggttcatggacctctgattagcttgggttttgcagtctcattgccacatgtatatgtggagccaatggccttttggtgctcagctgtttacgtctgactccttgacttctttggtacagtgatggagtcagatctcattaagtgtgattctccatgatataactagcctcaaaaaaatgtgtattccactccagttgtaaatatctttagatcagcttttcattgcatttgatggggagaacacagaaatgatagtctgcaaatcatccaggtgaattgttatactagttattttttggtggttaatgtgataatattgtcttatttaaaaccacaaatgaatttcaggagacgaaaccagacagagggtcaagtttacagatgaccgtgtctgcaagagtcaccttctggactgctgcccccatgacatcctggctgggacgcgcatggatttaggagaatgtaccaaaatccacgacttggccctccgagcagattatgagattgcaagtaaagaaagagacctgttttttgaattagatgcaatggatcacttggagtcctttattgctgaatgtgatcggagaactgagctcgccaagaagcggctggcagaaacacaggaggaaatcagtgcggaagtttctgcaaaggcagaaaaagtacatgagttaaatgaagaaataggaaaactccttgctaaagccgaacagctaggggctgaaggtaatgtggatgaatcccagaagattcttatggaagtggaaaaagttcgtgcgaagaaaaaagaagctgaggaagaatacagaaattccatgcctgcatccagttttcagcagcaaaagctgcgtgtctgcgaggtctgttcagcctaccttggtctccatgacaatgaccgtcgcctggcagaccacttcggtggcaagttacacttggggttcattcagatccgagagaagcttgatcagttgaggaaaactgtcgctgaaaagcaggagaagagaaatcaggatcgcttgaggaggagagaggagagggaacgggaggagcgtctgagcaggaggttaaagcgattttcctgcctcagtctcctgggtagctgggattacaggcacccgccaccacgcctggccaggttttgtgttctcagtagagacggggtttcaccacgttgtccaggctggtctccagctcgtgacctcaggtcgggatcaagaaccagagatcgcaggaggtcacgctcccgggatcggcgtcggaggcggtcaagatctacctcccgagagcgacggaaattgtcccggtcccggtcccgagatagacatcggcgccaccgcagccgttcccggagccacagccggggacatcgtcgggcttcccgggaccgaagtgcgaaatacaagttctccagagagcgggcatccagagaggagtcctgggagagcgggcggagcgagcgagggcccccggactggaggcttgagagctccaacgggaagatggcttcacggaggtcagaagagaaggaggccggcgagatctgaacccgtctcccgggtgctgtaaatagtctgataaacgttcacacagtctaaaattaccctttatatttgctgaatacaactcatcttttgtagtttaaaatttctattgttttggagctagctgtgagtttctagaagtgtacagagttgctcctgtgttcccgggtcatgttgagtaggaataaataaatctgatgctgcctcctgaaaaaaaaaaaaaaaaaa

SEQ ID NO: 28437 - DNA, 3211 bp, Homo Sapiens
cttatgtgtttaaatgcaattaaatatgtaggaaaataaaaattacaaaatacttttaaaataataataatgctttagttctgcttatttcgacgttagattaactctctgtgaagttctgtacattagaatgacccataatatgccaagatcatttctctcttctggttctcttaaatattgattatcctttagggcaaagagagatcataaataaagatagttaaggggaatgtaaaagtgataaatattaacttgtaatctctagaggcctcatgtaatacatgatctggggtaatgctgttttaaactcaagccagtccatcttttacttttctttctgtttttaaaaggaaaagggaatttagttgtgatgattattcaagaatatatattaatattggtatttcttggaatttctggaaaacattctggcccttctaccatttgcttctcagaaaaaaacattttatacaaattttcagttttaaagacagaatagtagacaatgaattccagaaatggatttttaaaacaaaccatttcagtgaaaggcactgaagatctggtaataaatctaggaaataaattttaacatatttacagtcgggtttttattttttaacaagagtgatagtgatgttgtatataaggacttgtatcttgcaccactgtattgagagctaatcccaccacagaggaaggcaaatttagtgtgcattcttgaaagtgcttagtactttgaggttggtccattgagccaactgagaagattcttctctaaaacatgaggatcttgtgtcggatcttgtagcctatttatgttgccttccttatcataacaaatttaatataatttgattaccaagtacaatttatttttctgagtactttaccaacattctccaattactcttggaaaatgattatactgggtggaaatgtattaagttttagcagtgtcacatgttgagcaaaaacagttgaatctgaaacagaggaattttgattcacaaatgagtctgccagtgagaacatacttacctatagtctttgaagcagctggttagagcttattgcagattcttggtctatgctcattaagtttagtacacagttcagcctgtgcctgaatgttaaattggaagtggtgtgatttttaaaacagttcagaacaggcctgagctacctctggcatggagttgttgaaggctgcctgtggcccaccttcagtcccaccagactggttcttccctgctgggacacaggcatcataatgcaagggcaggttgttacttgccacatcaggtggtgggattcagcattgaagctacttaaactccagtgacatgattttagtttctcatactgtgaagctagaatatttgagactgttaccatcctaatttaggtttcttcatataaagtacttttgcttttctcatctcagtgtcatttgtctctactcttgagttgtatattggttttctacatgtcagacagattcatctcttcagagttggaatataattattatttgtataggtgcataatcttgtatgtttacgttgaacagattttcagaaataccatttacatttagaaaatacatagatgtatctaaggaatttttctgttgtgctataatacatactgtttcaaatatgtggtaaaattctgtgacctgccatattggatttaaaacttcatcttcatcttaaaacttcatcttttgaaatctctgaaaatcattagtgtgcatgtattgaacaccagtctttattctgtaattaacaccccagatttctttcccctcaccttatgccatccatctgtgtgtttggtttccagtatgccatgtggaagaggtgtgagcctttcttcagcccaagaaggaaactttaaacatatttgcacaataaaatttcaaattaaacatttcaaaaagggtgctcagactagaaatacatgctcttctgaaattccatgttgcaactgtaactcctgtcatatatacccagtgtatgaggaaaagttcttgcagttttcacactgcccttctgtattgctgcctggctgtgctctgttgttggaactgaaatatgaaatttttactttgaagtatgttaatgtcaaagttgatcgtattaagtttggaaatcctttgaggtttatctaataagtgtgttggagcttctgtctcttctggtaatactgtaccctgttgaaccaagaacagttttattgtttgtgggacttcgttggttttctaataccataacctgtgtccctgtgcagtcagggggtcacttctttaagatcatgtataatacggcccgtcatatacacgtagatagagccatgtgattccagaaattagaagactggatctgtggaatccatacatgttaaaattttgccaaaatgagatgattaaaatttttgtgagttttataaactgttgcagttcgccttactgatttttcaatgataatcacttttatgggaagggggcttaggaacaaaaaactttgccaagaatgcaaaatcttactggtttttaaagcttgtaacagttgtgtgtaaaacttttatatttgaaacgtaaactcaccctttctgccactgctttcattgcacttttcataccaagttctctccaacgtggtgtctgaaagatttttattatatacactctttatggaattcaatgaagtgtggttatgctgtgtttctgaagtttttaggcttttcttcattggcctgcctaatactagtgtgtttctataacttcagatgattcaaaagtttagtgcttcattgtagcaaaaaatgtatataactcataatatcctacatgtagtattcaaaatcaattattaataaccaataaaagactcaacacattttcattgcgtgttcttctttaagacacctaaactcatatctcataatttctgaatccgcaatccctattcattaattgattacagtttttgagttgttggaaagcctagccctctcagattcagggttcagaaagaattaccaggtctggtaaaattgtctgactagcccttagcctcagaatggtcaacttcatagtataagcaaagaaagtggtgatctcatatagtcagctttttcatgaacattaattcatggtgaatgcactcacagcaaccaaaatccaaaaaaaaaaaaaaaaaaa

SEQ ID NO: 28438 - DNA, 5431 bp, Homo Sapiens
agccagaataatgcttttgaggcttatctaaaaccctagtctaaaatcaattgtggatggaaaataaaccgcagtgtgactggagttcgatactatgctaatggttggttagagaataccatgggtctcagaaagaaagtgagaggaggagaggggggctgaggaagcaggagagggcccttcctagcaatgaggccttcaggaagcccaaagagccatagcaattaatgccagtcctatggcttcgggggcagccagttcaattaatcagcaggcatttcttgcaggcccgctatgtgcaaggcactgctaaaatttagaaacaggaaagtagaggcccaggatgagaatttggagagggaagatgctgccttagaattcatacaactggataatgcttttgtcagaggacagacacacacagaggaccttacggacttggtgaccaaaagaaccacaaaggaatctagtttgacttgttggtaaatgtgaaagcctgaactctatacgccacagatgtttttcatgtgggtagatttggtaaccccaccttaaacagctcactaaacaggtaatgctagaatactgtagatgtgataaagattacttggagagaacagtaatagaagaatagctaacatctgttgagtacacaatgtctgcaccattctaagtacttacgtgatgtaataacttgattaatttttgcagttgtcttataaaggaactattgttattaactctttgttacccatgaggaaactgaggcacaagagattataccttggcccaaatcacccagttagaaagtacctttaggaggattataaacccaggtggttgtgctccagggctccaaccactttgttatagaggaaggatggggtggtcattgaaggagaagtttccgtttatctgaatggcccatgatgtgaaattagcaactaggccaggaagttggctgcaccatagttagacctgtacttttcctttttttctcatcagaagggtggcatagatcacccatcctagggtgagcttgtgttgcccacagtgccagcaccttccagaccttgggtcagctgacagaacctaacatgttattaccaagcacactgcccagaaggcaaacccatcactcgcctgtagataggcctgtttcctagctataaagtggaggggtgggtctgatgcgctctaaagtcttttctaccctaacaatccaatctgggagaaatgcactctttctggggggcaagaatttcccctctatttctactcccattttctttgcatgcttatattgtagccttagaattactctctcatgtatggtttacttcacattttgatctgaaacagggaaaatcaaccttgagtgatcaaaagaagggttgtgcctttaagcctggaggggcgctgcctccaaaagcataagcaactgccatccagggctggaaaaaacatgttgcagctgtgccaactccatctgaggctttgaatgaaagcccataatgttttcagtttgtagcaaaagctagaagagctatttttggcattcctttctctactggtatatactggatagtcttaatattgctggtgctaaaataaacataaccagatggggtcattatatctaacctgtttcgacactggattcagataccccgaagtcatgatgcatcagtagtctctgaagcaggctgtactttgggaactttgctattgtggttggatcagccatgacctcccaacctaaacacaggatgctgggccctgttttaagggagggccacagaatgtgcttgggtggaatctttatgtcccttttagctggagatggcaaaactctgaccatgtgtctgcccaaagagacatattacagagccatgccacgttgttctcccaccagaaaggccgtatggctgaattagagcgtgtggggattagaaatgcgctgctttcttgaaatggccaccagccttgtactaaacatgtttgaccggggccatctgtctgcccgtcaaaagtgtggtccagtttccatcagataagtctggaagaggacggtttttgttgttgttttgttttttgcatccagcttgttaaaagatatgaagaacgagaaagttttagctcagcaagaaatgtaacaatttaaagtttttattctgtcatgattctaaaagcctctagaattgtcatctgccttttcacctaattatacgcatatatacatactctttatatatatacactttgtatatattatgcatattatgtaaatatatacatatgtacacatatataatattcatataattatacacgtatacacatactatatagtatatgcgagtatatattatagcatgtattcagcatggtataatataaaggtctctaaagacaggcagacctatgaaaacatagctcttatcacctattactgagtgacctggggtactatgcttaacttctctaaaacttaaattatcatgtccagtccactggaaaataatagggcaaaatgatataatagtgacaaaacacataagcattcagtacaactagctcaataactacttattttaaaataaagtccctctggctctagaggatggaataaggaatacaaggccagctctcctgatggttacagctgcttagcagtggcaaagcctacctgtggaggagtgagcgcagggccagagagaggatgactggaagctgggagaggaccattgagaaaggtcgtaaagtctttacggcaggaagttcaaccacgtcatctccgtagcttccaggatttttttaaatggcaggttactcttaaacctacaaggcataggggatcatatactgtcatgaaaggtatacaggcggaaaggaaagtgtgccgtttagtaaatcaaatggtacctgacatggggcaggcattcagataatgtgtgttgaatgagtaggtgaatgaacatgaaacatcagtaaaactgtcctgtaagtcccatgatagaaataatcagcattactaccacatcagcttcttgtttctcaggtcactggactgaggggagggaaatccaaataatttgtctgcaattaaaaggcagaaggtcaggtgcagtggctcatgcctgtaatcccagcactttgggaggtggaggcaggctgaccacttgagcccaagagttcaggcccagcctgagcaacatagtgagaccccatctcaaaagaaaagttaaaaaaacaaaaaaacaaaaaaaaacctccaccaacaaaaaaccagccaactgaaattccaaaggtctctagtccacaggtggcactaggggtcactcagaagataaaaattaaaaagaaaattacttaggaaagtctaaagcactatattgggtacttcattatatctgaagcaagttgatgatggtgcccagaaaaacaaggtagggaagctgcacatttataaagcgtattagaatattctttgatttatgcactattcgaagcttgagcctgggaactaaggccatacaacaaagcaaggattaaactatcaacatgtgggacccaatcagctttcccagcaatgaggccactgtgactttccttattgttataaaatgtagatatttagccctacctcttaagacaagatagaactcaccacaaccagttttcactactgtagtatctagtggctttcaaatcaggtaaactaggtgttttatcccagtctggcctcatgctaacttcaggcaaattacacaacttttctcagtttttaacttgttaagtggaaataatagtcattgtcccagaggttattgggtagataagataacatggaggagtgtttaataagtgttccctccctccttcccctgccttttagacaaagcaatcattggagtaaaaactggctttggcatgatgtgggaagagcagagaaggcgtgggatgttttaaattatatgtaaaatacatttttttatttttttgagacggagtctccctctgtcacccaggctggagtgcagtggcgtgatctcggctcactgcagcctctgcctccaggttccagcgattctcctgcctcagactcccgggtagctgggattacaggcacatgccaccacacccagctaatttttgtatttttagtagagatggggtttcctcatgttggccaggctggtctcaaactcctgacctcaggtgatctgcccacctcagcctcccaaagtgctgggtttacaggtgtgagccactgcaccaggcctaagatacatgttttttaattacttgtggattgaaaggattattattgccctcaacagtgctgtgaataactggccaaaatatggacaaaagaccgtccgtaagttactagctgggtgctaggctggaatcgattcttatttaagatggcctagtaggcaggcctccaaatttgttttcattcctttaccttctacatcttgcctttgaatacacgtttaaaatgttatttctcccaactcaaaccccgtcactgcaataaaacttcctttacttttagaaggatctaagttccaagaaaagaagaaggaaaaaaagagagttactctcattttcctatttcatagacagttttgaaagcctttagtgtttgggtggggcccagtcacaccctttgcaatctgcagaccagtggtttaaatttgtcatccttgtgggctgtaaaatgaaaccatgtaccaaagaaaaatagtgaatgactcactcacatgtgatcttccagcgaagggaaggattcagtaggaatgtgccacaaggctggcaggtcccttcataataggctcaggtggcctgttctggggtgggtcaatgttaggaacctgaatggaggccgccaagttgtggtggggtctgaaggagagcttcagttaccggggtgaattcaccacaatgcaacatccagcagacccagagaaactctctctcagcacgacaagaaagggaggattcctattcaccaggctcattaaacctgtacgcacacacacatgcaaacacacacgtgcagacacacacacgtgcagacacacacatattgctaatttatttatattaagaaatacagtgccaggcatggtggttcacacctgtaatcccagcacgttgggagggtgaggcaggcgatcgcttgagcctaggcattcaaggccagcctaggcaatgcagcgaggccttgtctagaaaatttaaaaaaaaaaaaaaaaattagctgggcgtggtggcacgtacctgtagttccagctactcgggaggctgaggcggcaggatctcttgagctaagtagttcgaggctgaagtgagctatgactgtaccactgcactccagcctgggcaacagggcaagaccctgtctccaaaaaaaaaaaaa

SEQ ID NO: 28439 - DNA, 4712 bp, Homo Sapiens
tttagaagatgacacataactttaattttgtaagctctttagtttctaagtgcctcctgagtggctcagctttgaatgccacagaggaaaaaaaatatatatgtatataagcgagagggtgggaaagaagttaaagttaattattttaggagtggtgtggaatgatggcaaagtcagtcaggttttgttatgtcctttttgtagaagaaataagatttgctgttcttgtggtgcagaggttggcaaagtctgacctttgggctaaatctggcctgctctctatttttatatttataagcaaagtgttactgaaacagacacacctgttggtttgtaggatgtatattgctgcttttgccttatgatggcagaattgagtagttgcaacagagagtatatgagctgcatagatgaaactatttactctctggcccattacaaaagtttaaccctgatctagtgaagaaaaattacctaaatttttccaagttgaagacgatcaatgtatgaatttttatagaagtgttacattttttacaaagggtacgtcatatggttaaagctactaatttgaatctgtttcatttttcatttgatttctgataaaaggttatctttggagtttaccaatttttgacattcgtgattttaaaaatattttctctgaatagaccactttgcactgaattgtgaatttttttgctatcctctttcactcggaaacacgccatctatgagttcagttctttctagaatgaagcatagaattttctatgtgtctattatcataatgaagaattataaaatatatttgatagctatttctaataatgtctcctggggggctttgaattgaactttgtctttcagcatctcagccatgtgaactaagtgtggattgacaggttatacttttttttttactttttgaagacaacaatatgcacaggttttggcccaacagcagaaagcagcactgtcttcccagcagcagcagcagttggcacttcttcttcaacagtttcagaccttgaagatgagaatatctgatcagaacatcattccctcagtaactaggtctgtgtccgtgccagatactggctctatctgggagcttcagccaacagcttcacagcctacagtttgggaaggtggtagtgtatgggatcttcctctggacaccacgacaccaggccctgccctggaacagcttcagcagctagagaaggccaaagctgcaaagctagagcaagagagaagagaggcagaaatgagggcaaaacgggaagaggaagagcgaaagaggcaggaagaactccgaagacaacaggaggaaattcttcggcgacagcaggaagaagaaaggaaaaggcgagaggaagaagaacttgcccgaaggaaacaggaagaggctctgcgtcgccagcgggagcaagaaattgcattaaggcgacagcgagaagaggaagaaagacagcagcaagaagaagctcttagaagactggaagagaggagaagagaagaggaagaaaggcggaagcaggaagaattgttacgcaaacaggaagaggaggctgcaaaatgggcccgggaagaagaagaagcccagcgtcgattagaggagaaccggctgcggatggaagaggaggcagccagactccggcatgaggaagaagaacggaagagaaaggagctggaggtccagcggcagaaggagttaatgcgccagaggcagcagcagcaagaggctctccggaggttgcagcagcagcagcagcaacaacagctggcgcagatgaagcttccttcttcttcaacgtggggccagcagtccaatacaacagcatgtcagtcccaggccacgctgtcgttggctgaaatccaaaaactagaggaagaacgagaacggcagcttcgagaagagcaaaggcgccagcagagggagttgatgaaagctcttcagcagcagcagcagcagcaacagcagaaactctcaggttgggggaatgtcagcaaaccttcaggtaccacgaaatctcttctggagatccagcaggaagaggccaggcaaatgcaaaagcagcagcagcagcagcagcaacaccagcaaccaaacagagctcgtaacaatacgcattccaacctgcacaccagcattgggaattctgtttggggctctataaatactggtcctcctaaccagtgggcatctgacctagtcagtagtatttggagtaatgctgacactaaaaactccaacatgggattctgggatgatgcagtgaaagaggtgggacctaggaattcaacaaataaaaataaaaacaacgccagtctcagtaaatctgtaggtgtgtctaaccggcagaataagaaagtagaagaagaagaaaagttgctgaagctctttcagggagtaaataaagcccaagatggatttacgcagtggtgtgaacagatgcttcatgcccttaatacggcaaataacttggatgttcccacatttgtttctttcctgaaagaagtagaatctccttatgaggtccatgattatatcagggcctatttaggagatacttctgaggccaaggagtttgccaagcagttccttgagcgccgtgccaaacagaaagccaaccagcagcgtcagcagcagcagctgccgcagcagcagcagcagccaccacagcagccgccacagcagccacaacagcaggactctgtgtgggggatgaaccacagtacactccattcagtatttcagaccaatcaaagcaacaaccaacaatccaattttgaggctgtgcagagtggcaagaagaagaaaaagcagaagatggtccgagcagatcccagtttattaggattttcagtcaatgcatcatcggagcgactcaacatgggtgaaatcgagacgttggatgactactgagcacctgccagtggactggccatccctctcctgtctgccgactatggagtctccacctttggacacaacacttactcaccatttactctttatcactctgcaacaaatcacagaaccgatcatctcaggctttttcttctggccctttgtgtccaagattctttaatccatttttgttggtgaacatctcagactatagataagtggactggaccctgtgtcttgggggtggcagttgggattactccccaacaaggctgattttaggcagcatgtgttcactgtgctgtgatttcatctactgtctcccagaaagtgtgttgggatcggccattagcagcttgctttctcttgtcactttttttcttctattttgttttttcttcttctttttccccccatcagggcaaatggtctaactggtgcaatcatgaagagagttaatggttaacagacattggccaataacaaaacaccccatggactgtgactcgagtatccaacaggcagtcagagctctcccggtctgaaagttgcattgccactgctaactttgggattgcatcagagaggccctgagtggggttgagatgaggttggtttggtttgatgttacacactcctcacctgttctttctgagtgtcctttctctgaaaggatttatgtttttcttcgttagatagtgacttctgagcaagctgatctcccctggcatgctccaacctgattggacaaaggaagctctatggcctgggagagagactattcttaatttttctttcttacaaaaactgatttttcccataaatatttttacttcagaggactaggaccattttgttttgggcccttctgctgaaaatttgtctcgtttaagaggcagctagaatctttaccatatgtatgaatttgtataatttcatttttggatagggataaacttttgcttctgataaaagcctggaatttcatctggtcctcagagcattgcgtgtgtgtcttgctgtagcccggaaaaggttttgtgtaaagattctgggatggcaagttgtttgccttttctgaaaagagaacatacagaacctgtccatctttaagaccttcatccatggaatctactatacaggaggatgcagtgggctggaggggatgggcgaaaatgggagcaggaagcctggcctggcttctggtcatggcctcctaaaaccttaaacttcaagtagaaatgtactcaagccctatttataaacaaatacttttcctgcctccaccaaacccctacagaacatcacctggaattgccactcacactgggttggagtcattgggcagctgtgcctgtgcgagaggtgctgtggtctgggcagcccctggaaaagcacctttgctgcctgtcattgttgcctgaagaaggctggagttgctctgagagcagtttgggtttggagtattatatttggcttctatttttattattttggatcaccattctccctatcccttcttgcctccctcccttctaaacatgtgtaataactatacagagactgctacaaaattgtatatagtttttggatcaaatagcatgaggggagaggaaaccattaaaaattggggctcctactctcctttgctttgtaaattcaaaagttgggggtgggtaagagggatagttaaaatgtttacaaaactttaggctccctcggaacttttgccagtgtggaggaaaataaaaaagaacttaaataaaaaaaaaaaaagaaaaaaaaaaaaaaaaaa

SEQ ID NO: 28440 - DNA, 2033 bp, Homo Sapiens
tcccctccaggacctgggatggctctgtcccagcacccatggggcactgctcaagcctgcctcggggaggggctgcccggccccacaggaaaagagtcccggccattcccagggagggagggaggaagggttcttggccgggggtgggcctttctggaagccctggctcaggctgctgctctcccgtcccagcatcagcatcactacctcatgctacccactcccctccatctgtgtgcgggaccccgtgagcgactggtttgagagcctcgcccagtgcctgcattggaacgtccggaagaagcaagcccacttcgaggaggaggaggaggaggaggaggaggagggctaggtcaagcccctatccaggcccgaatccttccgctgccctccaagcgccctctggggacagaccaatctgcgtgtgtctgtgaccgcctgtctcagtggcacggccacttcctttctgtagctgggttagagcctgggtctgccttttgtccagatcagctgtttttttaaaatctctgactttttttgcatttctaaagaagcgtgagaaatgggctgggagtgcttctgtcctgctgacaccccgcggtgggtccctggagcgcggcctccagctgccgcaatttccatgccaggatatttttccgcaaatcagtcggttgaaattcagaggagtcagaatgactcgacctgtccttcaatgttgataataaatgtctcagccaaaaaccttccttgagctgccatgcttttccccttgacctgcacctcttcccctaaaatttctgcagggaagcccctggcggaggcgccattgaaagcatggtcttgccagtggctggcaaggcggttttgttctgctcagtttctggagagggttggatgcgtcccctgccatccagccctccccgcttgaggccagcactgagtctgggacactcagcgggaagggggctggcatcgccagcgacccacacattcctcacgtagcttctgctcccaggaaggtagtttaaatcctgtatatactttttagagactcttttaaactttctgaagtgctgatgtacatactttctcgtacacacttttgtgaagatttcaaggggaagggagtcgtctgccattcaatgtttacatttatgttctgcaagacgctgtcctcagggaccattaggggaccattctgttcagtgcgatcctgatggtccgggagatgagggtttccggggctagtgatcgtgatcccttttatttgcaactgtaatgagaatttttcacactaacacagcgagggactcaacacgctgattctcctcctgcctctcccgtgagtctccagcctgcccagcaccagcagctgtggagcacgtggatgctgcctaccccggcgcccgcgtcttccacgggcacaggtgtgtggaggccgtggtcggaccctggtgtcctggttactgctgcccgggtgtcttttttttgagtaactgctctctgagttttgcacacgaagttgccctcatctgctggagatcgataaggaaggcacaagacgttctcctctgcccgtgaggagcttcccgcagccgcctggcccagcctgggcacgttctccgaggcatgtgtctccctgctcaccctcgtctgggcacctcagcatctgtggacttgagcgtccaaaaaccctgagtgtgattctgggcagccggcctggcttgaagtccgccatgaccctgggcacaggggaagcccagccgtgggcttaggagagagggaccagcgcccagcgttagggctggaagacggcagtgttcagaattccagccgctcatctgaacacagaaggtgtgaactgacctctaaagcagcgtgagatgggaatgatctagaaaactttggatttttgaagtaaattttaatgtttcatattaatttcttgaaaatgtattaaatgtcattgaaagccttattacgcttttcagatcctttcaataaacaagacttgtaaaaaaaaaaaaaaaaaa

SEQ ID NO: 28441 - DNA, 2745 bp, Homo Sapiens
atgagaagagaaggaaaagatgggatattcagaggatcagggaacaaagaattttacagcgactgcagctcagaatgtataaaaagaaaggaattcaggaatctgagcctgaggttacctcatttttccctgagccagatgatgttgaaagtttgatgattacccccttcttgcctgttgtagcatttggacgaccattaccaaaattaactccacagaattttgagctaccctggttggatgagcgtagccgatgcagattggagatccagaagaagcaaacacctcaccggacgtgtaggaaatagctgtgctggcaagaaccctgtcttcagatagttgtagcatgccattcccgagagtggcagagacctgtatatgtgacctttgtcctcacatatgttatcactcgctgataataccctttcatacttccttgactttgttttcattactctgatttcacaaaaactctttcattcggctaattgtgagttatggagggtgattgggatttcttttcccttttttgggaaatgggctctcaagctaaagctataggatggcagattcagaagtttcaggggtctgtttctatacatttgcctatgttaaaggggtaaaagggctctcttcattagacatgtggaagatgaagcagccccttcctttagagctgtgcctgcatggcactcttctcaccctggtacaccctccttatagtgggtatagtgatttttaaccctaaaataaaacaaacaacctcaccatgagctttaggaccagaagaggaatgacaagtgaagcgatgaagcaagccatcttcacagagtagaaaagacatcggagagttggtagataactgtctgaaaagatagttgttcatttgaaactattctgtgatacagtcatgtgggaagggatgtttggctgtgattattttttcagttaatggataacaatttccttactgctcaaaaaccaaaatctttggaaaagaaagtggggatggttagtttcagaacaagttacagctgtaaacaaaagcacttagtatttgggatggcatgccaaaacctgtataaatgtccttgtatcacatcacttctcaagtattccttcattgggcttcatccttttagcagaactcttggtggtgggatagagacttagggagggtagggggagagtgtggaaataggtgcttcctttggctggcaaatgtctacatcttgaaacaaacagatgtacctaatgagcttctccattcactttgtaaaaataatttgtatgtgtaccatcttggtcctctcccctcccgttttgttaaaatatcaggatagcactcccaggccactttggtctcagtgtaagatccctattaactatctgaaaggaaaatagagccaagacctctggtctcaaatatataggaattgcctttctttagtcttcaggactattgtgtgaaaacaagtaggggtctaatctcctagaaggtaggggcttttatccttaaagagaatatgtccccagattattagcacttttagaggagaagccaaggtatgtagggtgtgtggctggcccatcagtggagcacgaagagagaatgggataccattgtgggaagagaagaaaagttcctcaggggcctcccactgctaaagttttttgtgagatgttgatctgtgcttcctggatttgacttttaaaggaattattctggcagcacatgtagtattcttggatgatcttgctgctcttatttctccttttgtgtgtgtgtgtgtgtgtgtgtggctatgggttttcatttgtaactccatctgcttaggagagtgggctctctataagggaacctgctgtaaacttcattgcagcaaggatgtagagagaaataggacttaattccactaggggctctcatctcacaccttaaggaggagatttctagaaaaactgggccagattttctttgttctccatcattttaatgtggcaggctgttcagttttcttactcttacctatgtgatatttcttcgtaacgtgtccaaaaagaaaaaagacccaatcagtgtctcttgactttgttctttgatccctcagtttcttcttgatttcagcatgtgtcgggttcctaattttgggtatgagttagcaaatttaaccattgtgtttgtgccctacccaggggactccccagtttctgacttgaagtagactgagaagaatccacgaggtgctatctggccagatttaagtagattctatttccttggttctccctctccctgaggacctcttattttattgtcccctcttctaggttaattctcctttgatttgactttgttgagaaggaggttggacagtagattagcaaagtcccaagtgcaaaattacagtgtgttagagtgtggggggaaaattagtcttatttttccctacatgggatacaacactgtgaattcaatcttcaactgaaggccctgcagttctcctaaaacatagttgtttgtttttctttaacaaagtttaagctagtgttaataaattaaaaaaaattgcttgtctgtctacttcagctttgttttatgcccatttcatattgttgtctgtgttgtaattcataacttttgataccatttctgatgtgtaaaattggttgtcttgtaaatatcttataaagagttcaattgtaaataaactattgtggctgttaaaaaaaaaaaaaaaaaaa

SEQ ID NO: 28442 - DNA, 4728 bp, Homo Sapiens
tgcccaggggtttagattctctgtgtccatcgctactaattcttactcattcctgacaccctagtatccctttcagcatattttgacaaccccatctctgttttaaaattcttccctgcaggattcatatgtcagggaattgcgttctggtttaattggaacaagccatttggaagtcctcctggtctggagaacattctgtgaggtagagaggctgcaaccccaggataatgtcctcagtgggagggacaggaggtcttatgtcaagaagaggtgatggtccctctcctcaccagtgatggctagtccgaggacatcctttaattccacatctgttcaagttttgtctttggatctcagaatgtgcctgcctgcagggaaaatcaaaggagttgaaatgacagtaaatattaaccttgaaagagactttaaaaaaaataaaactactttcagcctagaattggttgcgggagaaaactgggcaaaagaggaggacagaaagcctaggggatcacccagtttctgtcaggacagttttccagaggcaggataattatattataaatcagaagtgaaaccacagcacagtcctgtaatcatatgtaaatgtttaaaagaaatagattgtcatttggaattattcattcttatttctcttcatcagcataaaggcttgagagagagctaatttttaaagcacattagattatacttcacatctcctagtttttagaagtgattttcattcattcacccatccattcattcatgtgtttgttcaacacatttttattgagcgtccttgtggacgtggcacagttccgagtgcagtgaataaatgtctccccctccttgagcttatattctatttttatttttgatgtgtcatagttacttctgttaatcagttcagtagaagtgctgagatactctgtgacaaaacagatcccatcgacatcatttttacaaataagaccagatgtcctttagccttgtcaacaggcttgggccatggtgaacaatgtctgcctctgaagtgctcagcagaccgtgtgaaagaagaaggtccgggtgtttggaaacaatggctgagtggcggtagtggtgcattgtgacctcattattctgcttttggtttctcgccttgtaatatgaataaggcacatgaggatttagtgtgtgtcataagataagtgactgtcacgttaagcttaatgtctctgtttctgtaactttctccataatctggcagtatctcatttcttcgtggccagtgtttgggcactgaaaaggtcaatcaatacatagaattgtgactcaactcacgctgaaaaaaaaaaaaaagcatctgaatcatggttctcctgtgaattaaatttagtagcaagaatcttgttttaatttggaagaaagggtgggtcaggaaaactcaagatagagactttcaaaagggaaagtccttaggataatgagtagatttccccccccagttgtttcatgatataaactgatgtggaccaaataaatacctgtctcacaggggtactgatttccagcattagctgtggcagctggagcattgctggcctaggtggcagcaactggccttcccttgggacctgtagttactgaccagtgccaccctctgccatccaccccaatgctgctgcatctccaccgaagataaagacttgggtggagacttggaaaacatatgtgcgttggagttgggaagtaggtaggagcagctgatgagtactaattttcctctttaaataatgtccatgtaatatgaaattgaagagcacaagttaaagaaggaaaatgcttccaaggcgaacatgcaaatcatcagcgatctttggtaggtgggaataggatgtgcaagggggtgagtggggaagcagctctatccaggccagtagagttgactctcaccacaccctctgaacacctcacagagtcccttgagttgtagcagcacaagcttgctttagcccttgcaagatccaaataattgcccgaagaatgagatcagccttattttcttccctgtttttcgtaattctttcctttgtctttcctgcaaaagttaaactgtgattattggaaaataaaaataattatgcagatcaacttaacagttttgtggatgaagaaaaacaacctgttgtcctttatgtactttagtcctcccctgcccaagggaaccggcaagagagtactgtgtcattcaatccgtatgagccagaacttgcaccctgggctgcagacaaaggcccccagagagaagccctacccatggacacagaggtgtacgagagcccctacgcggaccccgaggagatcaggcccaaggaggtttacctggaccgaaagctgctgacgctggaagacaaagaactgggctctggtaattttggaactgtgaaaaagggctactaccaaatgaaaaaagttgtgaaaaccgtggctgtgaaaatactgaaaaacgaggccaatgaccccgctcttaaagatgagttattagcagaagcaaatgtcatgcagcagctggacaacccgtacatcgtgcggatgatcgggatatgcgaggccgagtcctggatgctggttatggagatggcagaacttggtcccctcaataagtatttgcagcagaacaggtattgtcaggtgcccccacacatctggaagctatcccctaagggacagggcccacccctggatgggccgagcagcctgatttccttgggaagccttcccaccctcctgtgccttcctttattggtccatactcagggaccttgacagagggacagggagacatagtctttggattcagctctgttagctctagttgttcagagaagaactcatttgacagttttgtcttttttttcttcctgtagtcattcagtcttggcctagtgatagactcagcctcagaatatcttgacatggaatctcctttctcactgggaagaacactttctttttaaagaaacattttaaataaatgcttttctaagaggtgacagttaagtcttatctgtttggctgaccttatgttctcatgagtgatgacttctgaaaataccaatcactgctaattgattacatccatcaagggagtaattgtgttcttctcatctaaagctgttgttgagatgaagaaactcacttggagtaagacagaatgatggccaccgaggagcttgcctcatttgctgtgctacgtttgtacttagattgtctctttagtctccatggaagggaggtgttcttaccctgactttgtaggtgagaaactgattctcagggttagttctgtgacctgtgtgatactggaacaaggatttgaggtggtgcctggctatctgtgagccaggcctgactactctgttatactgcttttcttgcaattccaagcatgccaggaaactcaatcccattgaacaccaggagaatatggcattgagtcctgaagagctatatgctaacaaagttatttgtcaccactcgtgagttttgttgtttaagaagagggaaggagtagattcacccactgcctgcgtgaggagcatggttgtttgttgtgaaatgggtcactgtctgttatagctgatgagatcattatgactttcagacatgtcaaggataagaacatcatagaactggttcatcaggtttccatgggcatgaagtacttggaggagagcaattttgtgcacagagatctggctgcaagaaatgtgttgctagttacccaacattacgccaagatcagtgatttcggactttccaaagcactgcgtgctgatgaaaactactacaaggcccagacccatggaaagtggcctgtcaagtggtacgctccggaatgcatcaactactacaagttctccagcaaaagcgatgtctggagctttggagtgttgatgtgggaagcattctcctatgggcagaagccatatcgagggatgaaaggaagtgaagtcaccgctatgttagagaaaggagagcggatggggtgccctgcagggtgtccaagagagatgtacgatctcatgaatctgtgctggacatacgatgtggaaaacaggcccggattcgcagcagtggaactgcggctgcgcagttactactatgacgtggtgaactaaccgctcccgcacctgtcggtggctgcctttgatcacaggagcaatcacaggaaaatgtatccagaggaattgattgtcagccacctccctctgccagtcgggagagccaggcttggatggaacatgcccacaacttgtcacccaaagcctgtcccaggactcaccctccacaaagcaaaggcagtcccgggagaaaagacggatggcaggatccaaggggctagctggatttgtttgttttcttgtctgtgtgattttcatacaggttatttttacgatctgtttccaaatccctttcatgcctttccacttctctgggtcccggggtgcatttgttactcatcgggcccagggacattgcagagtggcctagagcactctcaccccaagcggccttttccaaatgcccaaggatgccttagcatgtgactcctgaagggaaggcaaaggcagaggaatttggctgcttctacggccatgagactgatccctggccactgaaaagctttcctgacaataaaaatgttttgaggctttaaaaagaaaaaaaaaaaaaaaaaaa

SEQ ID NO: 28443 - DNA, 4631 bp, Homo Sapiens
gggtgatgctgggccaggagctttgtgtacacccctccacttcagctgagccagggcatgtctgcggcccaggccagggcgcagtgtgtgccctgggggcccaggcctgcatggctcctctgggtagggggtcgggggcacccccaaggatggtcccttagggtgatgttttggctttggggtgacttcagcaatgtccctgcgagacaagggcggggaagaagaatgttttgaatacgactgccaggatgaagagaggaagccaacccacaggcagcatgacacccaggacctcttggaagaggttttatgtgctgaaagagttggccagatgactaagacatataatgacatagatgctgtcactcggcttcttgaggagaaagagcgggatttagaattggccgctcgcatcggccagtcgttgttgaagaagaacaagaccctaaccgagaggaacgagctgctggaggagcaggtggaacacatcagggaggaggtgtctcagctccggcatgagctgtccatgaaggatgagctgcttcagttctacaccagcgctgcggaggagagtgagcccgagtccgtttgctcaaccccgttgaagaggaatgagtcgtcctcctcagtccagaattactttcatttggattctcttcaaaagaagctgaaagaccttgaagaggagaatgttgtacttcgatccgaggccagccagctgaagacagagaccatcacctatgaggagaaggagcagcagctggtcaatgactgcgtgaaggagctgagggatgccaatgtccagattgctagtatctcagaggaactggccaagaagacggaagatgctgcccgccagcaagaggagatcacacacctgctatcgcaaatagttgatttgcagaaaaaggcaaaagcttgcgcagtggaaaatgaagaacttgtccagcatctgggggctgctaaggatgcccagcggcagctcacagccgagctgcgtgagctagaggacaagtacgcagagtgcatggagatgctgcatgaggcgcaggaggagctgaagaacctccggaacaaaaccatgcccaataccacgtctcggcgctaccactcgctgggcctgtttcccatggattccttggcagcagagattgagggaacgatgcgcaaggagctgcagttggaagaggccgagtctccagacatcactcaccagaagcgtgtctttgagacagtaagaaacatcaaccaggttgtcaagcagagatctctgaccccttctcccatgaacatccccggctccaaccagtcctcggccatgaactccctcctgtccagctgcgtcagcaccccccggtccagcttctacggcagcgacataggcaacgtcgtcctcgacaacaagaccaacagcatcattctggaaacagaggcagccgacctgggaaacgatgagcggagtaagaagccggggacgccgggcaccccaggctcccacgacctggagacggcgctgaggcggctgcccctgcgccgggagaactacctctcggagaggaggttctttgaggaggagcaagagaggaagctccaggagctggcggagaagggcgagctgcgcagcggctccctcacacccactgagagcatcatgtccctgggcacgcactcccgcttctccgagttcaccggcttctctggcatgtccttcagcagccgctcctacctgcctgagaagctccagatcgtgaagccgctggaaggttccgccacacttcaccactggcagcagttggcccaacctcaccttgggggcatcctggacccccggcccggtgtggtcaccaagggcttccggacgctggatgttgacctggacgaagtgtactgccttaacgactttgaagaagatgacacaggtgaccacatttttctcccacgcctagctacctccactccagttcagcacccagagacctcaggtgagaggtcccaagcacgtgtgactgtctcaggcagcagaagttacccgagccggcctcaggcttccccagaggagatgcaggagccgccagcggccacggaggaggaggaggaggaggaggaggaggaggaggggtctggtgagggcaccacgataagtcctgtaaacttggcacctttcccggaggcagagttttgggccattctcacctctgttccaggcaccatccgtagtggttctctgtctgtagcttccgctcgtctgtgtgggtgatgattaaagcattctcattgcacagttctgtttttaaatacagagtctgatgcctcctatttgtaacaatgggtgtagctcccctgcccatcttggaggtgcatggcccatcagggatctttaaagtgggagcaggaaaggctgctaaaaaaaaaaaaaaaaaaagtgggcttttgggtccctgaaaacatcagtgcccttcttcctggtctgggtgtctccctgagtctaaggggaagattctcaagtcccctggtgatttccaagtggagctgagcagttttagggaaattgagtgctgggtcattcagaaggtaaatgagatcatctgttacctgtacgctgtattaaaatagaaccaggaaaggctcaggatttcagacatttcgtcagccttttcactttcccagcttcaatggaggtatatatgtcattttcttttcagcttacacatgtgttcaaagtggatttttaaaaagtgttttagcaatactccttaaccaaataaaccttcggagaacatcactaagcttttccagagagaagaccctagatgaagttggaaaagagctctggctgactccacccactgtccccaagcattaaaggttgtggccatgagtttacagaattacccacattccagttgccactgggatgaaaagctttgtgctcagagctctgggaatcatgggatcacatggttactgtttaccccaacagcatgctctgtctagactggacctcccagccccttgtgttgggaaggcaaagcttttgtggagtcaggggggagactgagaaaaaatgaattaaccctgtgttgtcatcctcatgacattcctgaggattcaccaggttagaagtgaggacgtttatctttgtgattcataattttcatttgtgaaggccacaacactccccttgaaatacagggcaggaaagagctgaggttcttggtggtgtctcccattcccctggctaatttcagacagctgtggtcaagggattttacttgggatcaacttttccttttttccttgacattaattttagagaagtcatcaagtcatgtgatttgtttagcacataggcttatttatggtttgattttttttaggcagttatattactagattaagcttgtgagggaatgaaaatgttttttatttgttatctacacactcgaaaaagagaaaccagctgcggtactgtcccatttttgtcatcagcaccagtgtccgtcaggaaggcaggtggtggtgcagaaacatgatgcctggctgattttcgtggctaaaggggtaggccttatgttgattgggatgctcccctacagccttacaggtagaatagaaggtgagttctggaagtgcaaagaagcaccattaagtgcatcttctagaagttgtacagaaggactaaagcttatcaagtcaacaaagaacttaccttggaggatagagagagagaagggaccaattatgaggactgacatcctggccactctccttaaaataaacactgacatttttcttgcttgttctctctgtactcaaacctgtggcaaattcatcctagcaacgttatttgacgaggggcatgaacatttatagttgaaactgtagaaagggtcaggttggaggtgtgtaataaaaaagaattacctaggttgccaaaggtaatttaggaagggtctgatcatttagatgagagttctttggggcttattttctgggtaaggctcatctttaaaaactggcttcagaggggagaggggagaacaatgaattggctctattttctctattgggaattacaggaccattttgattcttagaatgtaaaaagcatatcgctaagtaaatcatcctggaggtcccaagtagctctatgcctgcaatcatggagacacaggcagacagataagcttcatggggaaggcatggggcatcctctgtcttgggatttgtatccatggtggtctggtccctgccttttaatccgtcctctacgcttgggcttttctgttaccaaacagcactatcccaggaactattgtctgcctgggaacactcagtagggagacactttggagacaggaggtgatgaacctttttatgtgcagctggtatgatagaaggaaattgggaaaacttgtatgctaggcacttttgtccagagcctgctgtcccatggagaaaaagttttaagcactgaaaaaatttgattaatgtatttaaatgtattatttgaagcatcattcacttgttgatttttacaatcccatgtcttaaaaaggatgaatccatgttattgtattgtaaataatttagattattaaaatggattgtttaaaaaaaaaaaaaaaaaa

SEQ ID NO: 28444 - DNA, 5597 bp, Homo Sapiens
tgctttaagtcctttttgtaagcttgggaatgtatccacggaaaggatttttcatagacggaatttccagaagtgaatcataactactgttagagcataagcatgcatgattgtgctgtgtagatcagttttgttgaaagtttagattgttgtgtttgtcaattataatttaatgtttcagtttttatatgaaatgttgtaaatgtatacctttttaaaaacttgaagttccaataacttaaagcattgaaatataaaatgaggtaaaaggtgttttgaatttagtaaaactgttatttaatgcttaaaacttaattgaattgtataattctcaacattaagttgcatagatatgtgttcttaagttgttgaattcttaatgcatcctgtgttcagcaagttttttttaatatatactgtaccatgggtgtgttaagaatagttatactttataataatggaacttcatattattgcaatgcatatttaaagagtacttgttgaaagcataccattcacctaaagttaaaaattctggtttatttaaagctataagaagaatcatttctgggcttgtgatgttaatattgcccccctactggggttatttgtccttgggttgaagggttggaaatcgtgccaaatgggataacattgccggtggacttccaggggaggagtacgggggaggccttcgtgcagtttgcttcacaggaaatagctgaaaaggctctaaagaaacacaaggaaagaatagggcacaggtggggatggatggttggttggatatgtcacttttcttatggtaaacaattaaatccatattctctctgcttaaaagaagaaattaatgttttgtagtcctaggtaattgatgttttgccatgatttccaaacttgtgtcagtcccacgttacacgcaaactaaattttaggtttgaaatttgtccctagttaattggtctgcttgacaattttgtgagtcttattaaccccaatcaatagagttgagagactatggctttaaaaaattaatgcaaacctggctttagctgtaataacacccacctagaataaattaatattaccataagaaaatgtgatactttctgatcttgtttttaaagttgaaatgcaacaaactttttcttgctgtatataaatattctgcatagtattaataagcatagctttcaagaaattgtcacaaaaggttttattctccttgcttgtgactatttttcattgaagcatgcgcttacctatgctgattcttactaaaagcataggctggggtatttattggcgaaaggaaatgtgtagtgtgggctggactgttggtggaggctggctttttagcccacttgctatacatgctgccaatggatttaagacttgaaatgttgaaagttgagtggaattatttccctcctaaaacatttatttacagtactcctctctacccctaaggttgggctctgcctcagaggagtgagttttttttttttttctataaagtttacattgtcttactatttattgagtgaatttctggtcattgcctatgcaaatataagaaatctggctttaaatattagtcagtttcatggctatgactagattgttttcttgtataactaaatacctgtataaaatgaactaatgttttctctcccctccctaccccttccttatgaacaatgctttaggtatattgaaatctttaagagcagtagagctgaagttagaactcattatgatccaccacgaaagcttatggccatgcagcggccaggtccttatgacagacctggggctggtagagggtataacagcattggcagaggagctggctttgagaggatgaggcgtggtgcttatggtggaggctatggaggctatgatgattacaatggctataatgatggctatggatttgggtcagatagatttggaagagacctcaattactgtttttcaggaatgtctgatcacagatacggggatggtggctctactttccagagcacaacaggacactgtgtacacatgcggggattaccttacagagctactgagaatgacatttataattttttttcaccgctcaaccctgtgagagtacacattgaaattggtcctgatggcagagtaactggtgaagcagatgtcgagttcgcaactcatgaagatgctgtggcagctatgtcaaaagacaaagcaaatatgcgtaagtgtgattgagcatttgtgggctcttaacaggtgattgtgtgactaacatttacaatagagaaatggaaaaataaggatatatgagaagtttcctctccagtaatagattaattcttgggggatgcgggggcagtgtgttgaaggtttgggttttaaaaattagtataacggatttgtgatatgcacatcttgaagtgtatatccttaattgacaatacggatgaatatgtaaaggctagattttggagttaaagtagatcacctaagagaagtagctagaatttctttgccaaagtatttgaagttcacagatctgcttgtttaaaaactttataaaagtgcttattctgttttgtttcaccaacaaacattttcaaactttttttttctcatttcagaacacagatatgtagaactcttcttgaattctacagcaggagcaagcggtggtgcttacggtagccaaatgctaggaggcatgggtttgtgtaaatatcactttagtgtcttttttttaagctaaccttttgtatgccttttctctcatttcagaacacagatatgtagaactcttcttgaattctacagcaggagcaagcggtggtgcttatggtagccaaatgatgggaggcatgggcttgtgtaaatatcgttagtttttttaaaaaccaaaacgtttatatctgtataagtcaattataagttaagttaatctatttatttaataagtttagcataagaaacttaggcaaagcagtttcttgatatttgagttttgtatctggcttacttaaatccttgtgagttatgaagttccttaggatagataattcaaattaggtttaagtagtcttgggggaggggcctacggagtgaaactacttaaattttctgagtataaagtttaaatcaatagcaaaacaggattaagataaatgtgggcataattaggtgtattgacatgcctttgatgtatcaaactgagggggaacccactaaatccagtcaagcagtttcataagatcttcacaaaatgcctctacttatggaatcatgttgattttagtcctgctgatgtgtgtaccgttagcactttggtttatcaatatttgactggctcaaatgatggatagaagggtggcctggttatagacagtaggcagaaggaggcagagggttacagtaatgtaagatcaagactggaaaatgatagctatagaattacaagcccggtaccaccaggtaccacatcacataagaaaaaaggttctaatgttttcttaacttaacagcaaaccagtccagctacgggggcccagccagccagcagctgagtgggggttacggaggcggctacggtggccagagcagcatgagtggatacggtaaagcctgtttgttactgtacttagagtaagttatggtaaagcctgttcgttactgtacttagagtaagttatggtaaagcctgttactgtacttagagtaagtcgcaggcaggtgcctttagttgggaagatgcaggctcctttcggtgaaattgggttatgaaatgtatgctttcaatccaaatgtaactgtttttactagctaattttcagaaacaatcattgggagggggaagtgttctttgaattaagaactagtcattgcagctttggaatactgtcgagccagaaaatatctgcctccatgtattaaaacattaaataaagttgttcacttttttgtcttttggttagcattaagtcagttttagacagagggagaatttgaaatagtagaatggtggttgggttcaggatcgtatttattagtcagttaacctaggattggttttatttattttttttcaattggtctaaagaatggtgattttggtattatagtcttaccctacaaaatccttttgcagaccaagttttacaggaaaactccagtgattttcaatcaaacattgcataggtaaatattttctcaaaaaatataaattcccaatagcaaatactgatatgttgtaataatgctttctatagcagtcaatggctctgacttaactccatggaggctgccatttgggcacagtgagttgcctttagtccagcttggttgtctcacttcctgcccaccatgaataggaaaagcaagagacttcccctgtgctcccttttctcaaatgccattcgagggacacattgtgaatgtttatgttaaattttttttaaaaatgccttgtttagctttaaaaatacgaagtaattttgcaatttttgaaaaacactagttttcctttaaacttaatttttcatgttgatcctgaagaatccgttaaaatggtagcacaagagtctggcaagttggtactgcagagaaaaggggttaattgaggcttgtttggagtcgggattcccctttcccaaacatgcgtctcgccacttggacagcagccatttgtactcgtatactttttaaactttttcttggaatactatattttatttgactggtagtctgatattactcctaacttgtcaaattgatctctttgcaggtaaccaaggagcagtgaacagcagctactacagtagtggaagccgtgcatctatgggcgtgaacggaatgggagggttgtctagcatgtccagtatgagtggtggatggggaatgtaattgatcgatcctgatcactgactcttggtcaaccttttttttttttttttttttctttaagaaaacttcagtttaacagtttctgcaatacaagcttgtgatttatgcttactctaagtggaaatcaggattgttatgaagacttaaggcccagtatttttgaatacaatactcatctaggatgtaacagtgaagctgagtaaactataactgttaaacttaagttccagcttttctcaagttagttataggatgtacttaagcagtaagcgtatttaggtaaaagcagttgaattatgttaaatgttgccctttgccacgttaaattgaacactgttttggatgcatgttgaaagacatgcttttatttttttgtaaaacaatataggagctgtgtctactattaaaagtgaaacattttggcatgtttgttaattctagtttcatttaataacctgtaaggcacgtaagtttaagctttttttttttttaagttaatgggaaaaatttgagacgcaataccaatacttaggattttggtcttggtgtttgtatgaaattctgaggccttgatttaaatctttcattgtattgtgatttccttttaggtatattgcgctaagtgaaacttgtcaaataaatcctccttttaaaaactgaaaaaaaaaaaaaaaaagaaaaaaaaaaaaaaa

SEQ ID NO: 28445 - DNA, 3532 bp, Homo Sapiens
gaggcgcaggggtcaggacgactctcggcagcgccattgcgcgccctctagtggcagccggttttgaggccggcctccggctttgaagttcctcaccgcgtctccttccctctccccaaagcctggatcaccgcccagcgtcaggcgaggggcgacgtctcgaggtaaaacggaggaggtgcgggacgcggagactgcgcgggcccggtagccctggagaggccgaggctctaggccgcgaggggcgggtgcaatggcggaggaacaggtgaaccgcagcgccggcctggcccccgactgtgaggcctcggcgactgcagaaactacggtttcctcagtggggacctgtgaagccgctgccaagtcaccagagcccaaggactacgacagcacctgcgtgttctgccggatcgcggggcggcaggacccgggcaccgaactcctgcactgcgagaatgaggacctaatttgcttcaaagatatcaaaccagcagcaactcatcattatcttgtggtgccaaagaagcatattggaaactgcagaactctaaggaaagatcaagtagaactggttgagaacatggtaactgttggaaaaaccattcttgaaagaaataatttcactgacttcacgaatgtgaggatgggttttcatatgccaccattctgttccatttcccacttgcaccttcatgttctggcaccagtggatcagcttggcttctaatccaagttggtttatagagtcaattcctattggtttatcacagctgatcacttgattgaaaaactaagaacatgaaaatgtcaagagtggaagatttttctaatcttggttcagcatgaagtggtatttaggtcccttttaagtctaattgcaattttaagatttgttgggttttatgagaggctgttacttagtggccttaaatcttttctgaatgtctgtttcctaagatctgtgatacagttatgtgaatatttcgttactgacttgtttcaatggttacttgtataaggattttatatatatgatactatagataaaatcctatttaagacaaattctgttaatcaacaagggctctgtatttttttaagttaaaatattttcatttctcagtaagtagtcagttataatagtgatttatttatgaagaataaactactatagaaagtactttgtgggaacctttattactgtgaaggagaaaaatagctatttcttgacagttctatagttttacacataaattttcaaaataaagaataccatactacacaatgatctctgattttgctgagggaaggaattatatatgtgccactttttcctcaaatttcagatgccagttttcactttttgaagcattgcatctttttaataaatctatcctgaaagctatataatatatataatttatatcaacgaatttacaataactatcaaattggctatcagaattcactgtaatggaattttgcctctaataacataaagggggaagaaacataaagtggttctcttaataaaactagcagaaaatgttgctttatggcatgtttttgtatcaaagagaaatcagaggttaaactttgcttttatcatgaaaagggcctgatttgaaggtagagataggcttagatgagaaaaattgataacgcaatgttaatactattgatatttcataggtatattttgttagaaattggttttttggtgctaatctataggcacaatagtgaatatgaatgaagagtaggtgctgcaagttaatcctacattgtgccagtgtatattagtaccatgtaaatgaatatgaataaatgaacatgaggattaacgaactgttgaaaataggctgagatactagttttctttcttttttagagggggcatgatattaaagatagttttaagtaacaaattacttattacaaagttacaacatgtggaatcaatactgttttatttgttcattaatttattcattcagcaaacatttgttgaacatttaatgtgtaccagatattgccaggatcaggaaataaagaactaaaaatggacattcagactgcaattgctagtacaggggtcaaacaaaatcagtgattagaatttagtgcgttaagttccctgatgccttcacagccagaagaggctgtgaagggataaacacttctgagagtgggtggtagtagaactgagtattcaagactgaatgttaggcaggtagacagtgactggttaagctgagaaacttacaagtattttcgttgagttctgcttccactattatttactttacaatggatatgaagttcagatttcatcttatttactgaaggtggagaaaggatgtggaagtaggggttatgggctctcaaaagtagatttagagagatttttttatcactgttttatgatatagttcactgagcacttacatagattaacagttacaagtttccataaatcagttagaatatgactagcttcagggaaggaattttcaacaactgcaatctttgattgttttactgtgggaacttgcagtgatataattgacaacattatttaacaataataggtaaagtaggccgggtgtggtggctcacgcctgtaatcctagcactttgggaggccgaggtgggtggatcacaaggtcaggagttcgagaccagcctggccaatatggtgaaaccccgtctcttctaaaaaaatacaaaaattagccgggtatggtggcgcatgcctgtagtcccagctactggggaggctgaggcaagagaattgcttgaactcgggaggcggaggtcgcagtgagccgagatcgtgccactgcactccagtctgggtgacagagtgagactttgtctcaaagaaaaaaaaacaataataggtaaagtatttaaggaattctcagatgccttatggacctcttcaagaatgtggttagccaattgattcaacttttataggtttatatgctctcatgtaaacctatttgtttccgagatcagacgagatcgggcgcgttcagggtggtatggccgtagacaacctatttgttaaaaacccttggaaacacatcttttagtagaggttcttatttacttataaagattaataatcaaattactacaattaatatccatttagccttttcagtagtctaaatatttggtaactccctagccatctataacactagttcaaaacaaggctaattcataacctgtcttaaaaatgtttgaagtggtatcaagagcattgtttatgcatgttgtgatactatttgtggaactgtttaatgagctatttcaaactgctagaagaaaatgaaataaaaatggaaaaatactgtcaaaaaaaaaaaaaaaaaaagaaaaaaaaaaaaaaaaaaaaaaaaaaaaaaaaaaaaaaaaaaaaaaaaaaaaaaaaaaaaaaaaaaaaaaaaaaaaaaaaaaaaaaaaaaaaaaaaaaaaaaaaaaaaaaaaaaaaaaaaaaaaaaaaaaaaaaaaaaaaaaa

SEQ ID NO: 28446 - DNA, 7024 bp, Homo Sapiens
acaccaaaaatggagaagagtgcctccaaggaagagaagcagcagcctaagcaggacagcacagagcagggcaatgctgattctgaagagtggatgagctctgagagtgaccctgaacagataagccttaagagtagcgacaacagcaagagctgccaacctagggatggtcagttgaagaaaaaggagatgcactccaagccacaccgccagctctgtcgatcaccctgcctagatcgtccaagtttctcccagaatcacttattaatgatgtattggcagagcttgtcagacttgggaacaaaggtgattcagaagggcagctccagagagattgcaagccctgaattgtctcttgaagatgaaatagataacagtgacaatttgaggccagttgtcattgatggaagtaatgtggcaatgagccatgggaataaagaagaattctcctgcagaggaatacaacttgctgtggattggtttctagataaaggccataaagatattactgtatttgtgcctgcatggagaaaggagcaatcccgccctgatgcaccaattacagatcaagatattctacgaaaactggagaaggaaaagattcttgtcttcacaccatcccgaagagtccaaggcaggagggttgtctgctatgatgaccggttcatagtcaaactggcttttgattctgatggcatcattgtgtccaatgataactaccgagaccttcaagttgaaaagccagaatggaagaagtttatagaggagcggttgctgatgtattcttttgtgaatgacaaatttatgcctccagatgatccattaggacgccacggcccaagccttgaaaatttcttaagaaagagacccattgttcctgagcataagaagcaaccatgtccttatggcaaaaaatgcacctacggccacaagtgcaaatactaccatccggagcgggccaaccaaccccagcgttcggtggctgatgagctccgcatcagtgccaaactgtccacagtgaaaactatgagtgaaggcaccctggccaagtgtggcacagggatgtctagtgccaaaggtgagataacctcagaggtcaaacgtgtggcccccaagcgccaatcagatcccagcatccggtctgtggctatggagcctgaggaatggctgtccattgcccgtaagcctgaggctagttctgtcccctcgcttgtgactgccctaagtgttcccacaatcccaccccccaaaagccatgcagtgggtgcactcaacacccgttcggccagcagcccagtgccaggatcctcccatttcccccaccagaaggcctctttggagcatatggccagcatgcagtatcctcccatcttggttaccaacagccatgggacccctattagctatgctgagcaatacccaaagtttgaatccatgggggaccatggctactattcaatgttaggtgacttctccaaactgaacatcaacagcatgcataaccgagagtattacatggctgaagtagaccggggggtgtatgcccggaatcctaacctctgttctgacagccgtgtgagccataccaggaatgacaactattcctcttacaacaacgtgtatttggctgtagctgatacccatcctgaaggcaatttgaagctgcaccgctcagcatcccagaaccgacttcagccttttcctcatggttaccatgaagccttaacacgagtgcagagctatggcccagaggattctaagcaaggcccccacaaacagtcagtcccccacttagctctgcatgcccagcacccatcaactggaacacgttccagctgtcctgcagactaccccatgcctcccaatatccatcctggggcaaccccccagccaggccgtgccctggtgatgactcggatggatagcatttccgactcccgcctctatgagagcaaccccgtgaggcaaagacgacctcccctgtgccgggaacagcatgccagctgggacccgctgccctgtacaactgactcctatggctaccactcctatcccttgagtaacagcctcatgcaaccatgttatgagccagtcatggtacggagcgtgcctgaaaagatggagcagctttggaggaatccttgggttggaatgtgcaatgattccagggagcatatgatcccagaacaccagtatcagacctacaagaacctctgcaatattttcccttctaacatcgtccttgcagtgatggagaagaatccccacacagcagatgcccagcaactggcagccttgattgttgctaagcttagggctgcacgttgatatgacatagtacttatttctttatacaaatatgaatattaatactaataatacactaatacaataattatagtaactaataatttgtgttgcgctttacaagttagagtgtttatatcatttaagcgcttaacaaccctgtgaggtacgtcttactaacatcctcttttatagagaaggaaggtgaaggtcagtgaaattaagtggctagccagggtcacactgctagcaaatgactaagtcaagacacacacccaagtcctctaaatccaagtcccatgcccctttgcactgcaccatgcaggtaatggaggacaaaacccagggggagaggtctagatgtaagaaatcccagaggattccattaccagagttttcctttttctcttttcgtttctttctttctttctttattttttttttttgagacagaatctcactctgttacacaggctggagtgcagtggcactatctctgctcactgcaacctccacctccagggttcaagtgattctatggcctcagcctcccaggtagctgggattacaggcgtgcaccaccatgcccagctaatttttgtatttttagtagagacgtggtttcaccgtgttggccaggctggtctcaaactcctggcctcaagtgatccgcccaccttggcctcctaaagtgctgggattacaggtgtgagccactgcgcccagcctaccagagttttcgtagtcacatattctatattacaaagtatggatgatatatccaatttagagagcaaaagcatcaggatcagatcatatgttgaattaaccttttaggttttttctaatagaaatatttaaagctatttaaaagtaaatgcatactttattgcatggatatctgatcactcaatctatattaatgaaactatagggtcacattgaagcttctagaactatattttaaagctattattagcaattatattgcatgtatgaatatatatatttggtttgagatgtgtgtgtatctctgtataaccttttatatagtgataatgagagggtaggctctacacagtccttcgtctatagctgtataggtcactaatctgacttgatgattttaagtcacatttcatagttttaactagttatgagagagaaattatatggcaatatttgaacattgctttcttaggcaccagagcaaagcaactctgtttcctttgcacattttacctgccaacatttattaacagttcttaccttccaagtctcttcaccttagcaaattagggatcaggttgcagtcttctgcagagaaactgatggttaagctcaagttccaagcatagtatgtgtgtgctacacaagctcagaagagtttgacaaggaccaggggacttactaccacaatccacttcccttatcccaggagagatggccaaacccatgtggcattaaatggtgaatagaaaagcttcactcaaggagggactattggatgctctttggacttctgacctatgcagtattcaacatcattggatgaaatgtaatggaggacagtgcacagccatgtatccactttctcttcctgtccaccctttgggtaataaggtcaatcattggtggaacagaatttctctaggaaacaaaaccaggggattttatttgtggaaaaaggaagtttccaaaaggggatactgcatctttactaatagctggctcagttactcactttaaatccatgcaaagagtgcacttgctgttaaataattgttaaatgagttattagaaggcaggacttttggtttgggcgacaccatttgcgcaacttgtatcttgctcagggtggaaaacttcatagctaaatgcctctagaagaggtgtttattgttttttttaagctgcactaaatgaattccctttttgaatccattgtatatttcaatatttcgaaccatgatcagctcactatttcctgagctggaacttgctaacttctatgatcgttttttcatgaaagttgagaaggccgggccttggccttttgtttcttcatgagaaggtgtgacactgcctataaatgtttcttactgtgaaacactctgaatgtgaggctgtagtcagggttgtttctggtggtttgacaatggcttgcatgctgctttctggctttctgtctctgttcaagttgatcaatactgcatcttaaccaatgtttcacttgagttaaccacagctttacattctatctcctatcttctgatcttcgtataccccagcatattgaaaaagagtaaaagtattttctatcaatcaggtagatccacagagtgacagttgccactgcagtgcttgctatttcacacaaacaccatttcataccttcaacttcttggactttctaaatcggactcgtgtctaaatcagggtatttgacaatctcagatgatgctactgcctatgtgccagttagttcatcttcctaccaagatcatgaatggcaccacactatccactagctgtacaatttacagagaagcacaagattcatcttgtcacctacaattcgtcttgaacatgttcatatttagtactcagaaactgtgtaagctcctcccaatacagaaaatattttttaaggcagcatatgtatttctgatttactaaaaacgattgtcattctcctctcattcttctttttggtatgaaccaaaagcggctaggagcaatgcctcaaataaccagaaatgaccttttgttgatacaaattgtatctctttttttcctgattgtatagaaacaaatgtacaaaactcatctgaagctaggtttggcactgaattttcaccatgaggtttgtggcactgtgtgtcacagggaagtagctcaggggttgtgagggagcttttatttctaaagggcagtagtaatttatagacaaaaacaatttttcaaggcctctttattaccactgcacagctatcatgtgtaaaatttcaagcattatattgcataagttctctttagcctattaaatttaatatgtccttgcaaaagggattttgtgtaaaaagtgtcagtgttagtgactcatctgcaagaatctacaaatggagctatacaactatgaatacataaatacagcatggttcctagttattagagaaacattttctttatattgaggtctacgcacttcttgactttccattttgtctgtaattataaaacagcaaataacaaagaagcattgggaccccctcggctgccttgataataaaatcaagcttccttcatgggactaagcatgtgtccttcaggatacttacctctaagcactcagcaggggttactacaaagcgttttgtgtggttttcaaaaaacagtgtattttgcaagaggtgctttgtaattttaattatttcactgattttctgacctcataggaagtctgtgcctgttgaggccttcaattttgtagcttttctgattttttttcttctttttgtgattttgttgttgtttccattttgatctaaaggagaagtgtgaccccggagtggcatggtcaatccagggcaccctttctgtaagacaactcaaaggaaaagaagccttttcaaaggtaatatcgagccattgcactctctcttaaggtgccaggtatgggagaatgacagatgccttatggaaatggtctacaaaacttttcttcttctaagtaataaaacacatagcatgattctctctccctctctctctctctctctgcccaccccctgctagtttccaggagaatacttctctaaaattcatttttttctattttggaataaattatctttatacagtaattcaaacactgatttccattaacctttggccctgagttttcttctaacatagaagagttcattttgagaggcactcagttaccattcaatctgtgctgtaagtatgggactttgtacaaatgccctttttgagggccaaaaatttcaatacactttgttctactttgtgaaccaggtctggatctgcacagagaaagtaatgctgagctgtccaaagagtccgctcaggtctccctcctaaccctcctctgccttcccctagtttgcttatcctcacgtctgacactgaggagtgcatagtcttcaactgaaatggcactacagttagttctcattggaaacaaacaagtgtatttctggaacctgctcgtctaaaatagtcaatgcctttgtaaagactcagcatattcaatatctattgtatggtagctagctatatacatagattgactatttttagtcctggtttgtgtattgttgagctatagtagtttgctttatccatttgtgggattaaacaatactgtttaatggttgtaaacttttataaaatctctttgggttttttgtttgacccaaacataatgtaagtcttaatgacaaaatacacaaagttaaccagaggtgagtgaaaatatagcccttccccagttttgtctgcccctataatgcacgtgcattgctttgtaatatgctctcgctagcatgaatgtgctatgactacttcatgaggttttgtttcacctataattgtgatggaaaatgctgtattgctgacaacaatgaactgtaaccacagttatttactgcataaactatttgtgtactaaccaaaaaaaaaaaaaaaaaaa

SEQ ID NO: 28447 - DNA, 6219 bp, Homo Sapiens
ggcaagctgcgccgccgcttcgggttgcttccggatctggtacttgggcagagctccccggggttcattgtcttcgcttcacaggatctgtttgagtcctgtccaccggatcctacggggggtaccttcgaaaaaaaacgggctatgctgctgttgcgtggacaattgataaaacaaagaataataagcaggttcttgataaattgcaagtggaacaagaaagaggaatcactgttaaagcacagacagcatctctcttttacaattgtgaaggaaagcagtaccttttaaatctcattgatacaccgggccatgttgattttagttatgaagtatccaggtcactttctgcttgccagggtgttttacttgtggttgatgcaaatgagggaattcaagcccaaactgtagcaaacttctttcttgccttcgaagcacagctatcggtaattccagttataaataagatagatctgaagaatgctgatcctgaaagggttgaaaaccaaattgagaaagtgtttgatattccaagtgatgaatgtattaagatttctgctaaacttggaacaaatgttgagagtgttcttcaggcaattattgaaagaatcccccctcctaaagtgcatcgcaaaaatcctctgagagctttggtatttgactccacctttgaccagtatagaggtgtgatagccaatgtagcattatttgacggagtggtttccaaaggagataaaattgtatctgcacatactcaaaagacatacgaagttaatgaagtaggagtcttgaatcctaatgagcagccaactcataaattatatgcaggacaggtgggctatctgattgctgggatgaaagatgtcactgaagcgcaaataggagatacattatgtttacataagcaaccagtggagcccttgcctgggtttaaatcagcgaaaccaatggtatttgcaggaatgtatcctctagaccaatctgaatataacaatctgaagagtgctatagaaaaactgactttaaatgattccagtgtgaccgttcatcgggatagtagccttgctctgggtgctggctggaggctaggatttcttggacttttgcacatggaagttttcagccagcgactggagcaagaatataatgcttctgttattttaacaacccctactgttccatataaagctgtactgtcatcatcaaaattgataaaggaacatagagaaaaagaaattacaattatcaatcctgcacaattccccgataaatcaaaagtaacagaatatttggagccagttgttttgggcactattatcacaccagatgaatacactggaaaaataatgatgctttgcgaggctcgaagagcagttcagaagaatatgatatttattgatcaaaatagagttatgcttaaatatctctttcctttgaatgaaattgtggtagatttttatgactctttgaaatccctatcttctggatatgctagttttgattacgaagatgcaggctaccagactgcagaacttgtaaaaatggatattctactgaatggaaatactgtagaggagctagtaactgttgtacacaaagacaaagctcattcaattggcaaagccatatgtgaacggctgaaggattctcttcctaggcaactgtttgagatagcaattcaagctgctattggaagtaaaatcattgcaagagaaactgtgaaagcctataggaaaaacgttttggcaaaatgttatggtggtgatattacccgaaaaatgaagcctttgaagagacaagcagaagggaaaaaaaagctgaggaaaatcggcaacgttgaagttccaaaagatgcttttataaaagttctgaaaacacaatcttctaaataattggtgggaaaacaaagaattttcattgcaatttgtaatatgctgacaacagaaagaaaattataaaatttgcttgttactttcagggtattcaggttcaaataacctactagtctttcgttgaaagggagtagttagtgggtaggcaagagcttagattttgaagccatgttgcctgttctcaaatatctgttccaaccactcactagtaaggtgaccgtggccagattaacctttgtttcctcttcagtaaaatcgagattatactactacctacataagttgttgttgtgaagattaaatgaggtaatacgttaaatattcagaggtgcaagacacatagtaagcactcaattgtaactacagttaagtccttaaatgccatcgaaaggttcttagaaactgactttaagcaaagtgacacgtagcacaatgttcttgaatgatgtcatttccttaagtggtttgtaacatcgatgaggaaaaaaaattggtttatgcgtcatttcattttatttttatttattttttgagacagagtcttgccctgtcgcccatgctggagtgcaatggcacaatctcgactcactgcaacctctgcctcctgggttcaggagattctcctgcctcagcctccattacaggcgtgcaccaccatgctcggctaattttttgtatctttagtggagtcggggtttcaccatgttggccaggctggtcttgaactcctgacctcgtgatccacccaccgtggcctcccaaggtgctgattacaggtgtgagccaccatgcccagccatgtcatttcatttaaagtcacaatttccatgaatctcaacaagtgaggacctgctatattttgttgcatgcagtttttctttacggacactaaaaggccccatacttaagattccatctactttaagtttaaaggattttcagaatcaccttaagtgtcaaatttgttagcaggattaattgatatgaattcacttattaaacagtaaactcaaataacatagacatcaaataacagacatctgctctagttaatgataaaatgtttatagattttatcaggtggttagtttgaaactaaatggtttacatctaaattaagggcaggagctgtctttcagacattcaaaacgcatttgtgtaaaatgacaggtgtttggtattaccaggaactcataatgacattttaataattattgtctaaatttcataatcgaagcgattttagagtagttaacttgagatttcacagccagtaaatggctgtatttctccagagctctcagctcccatgtttattcagccaacgaacaaaccagactgcagactgtattagagcaagacaacatcatttagccattgatttttatcttctaccttgaatgaattgaatgaagaaaatgtcttttagggataaacactatcaaggatgaattttatactaaggttatatgaaagaaaaatcccaaaaccactaagccaaagggaagtcaagctgggaactgattgaggcaaacctgcctcccattttattcctaaataagacagccacaaagataaaatttgctcacaagggaattccttatggacaaagaactcaaagtcttcacatgaaacaaatgcataaatgattgctttctctgtttcatgtttcactaagccagattaaggtataactgactattcctctactctcctctcacatgtaaattgtatattcagtgaaaggctaatcagaaactcaaaaaatgcaaccctttctctcttacctgcctatgcttgaagcccccgcccctcttcaagttgtcctgcctttcaagaccaatgtacaccttacacatactgattgatgtctcatgtctctctaaaatgtgtaaaaccaagctgtgccccaaccaccttgggcacatgtggtgaggacctcctgaggctgtgtcacgggcacaccttaaccctgggaaaataaactttctaaactgacttgagagctgtctcagatattctgagcttacagttattgtgaaatcattttaattataaattaagtggagatttactttagacaacaaagtattttttataagacacagtaagcctgtttagttcccatcttgatatagtcaagtttattgaaaaagtacaaatagaaatgtttcagaatgtcttaagttttatctacctagcaaataccaatttataattatgtaacagtgcagatctagaatgtgtacaggtactttgggagtaaccagaagagcatttcttgtcttcaaagagattaagcatgacaaatttgaatactgacttagataataggttttaattatatctaaaagtctatgttgatattgatcctctggcagttcctctactagactccagccaggggctcagaactgctgtctcactcttaatacattaccctatccattcgtctggtaaattactttccaatagtttggcatgtgtatttatgacaaaggttgattgcaaattctacactgagggagggttactaaaacaagacagaaaacaacctgtattaaatcatttaattcagaatagaaattacgattttaaatccggtagattataactttcattttgtaattggtacatatacttgcagactgctcttagctatggaagctgcttgggaaatagctgatcttccagttactcctgttttaatgcctcagtactatatttctttggggagaaaaaaagttctaaaaagactgacccagttaatgaaccagagattttatattttggagggtaaagaaatgagttaagttttccaggtattaagaacatgggagggtggggaaaggcacttaatgcggttttgcaggaaatgggattactggattggagagataggttgcttgttagtaaacagatgttccttgtcagaaaggctgcaaaaaggactctaaaatcccagctttgagaaagacccacttttaagggacaagcaaagagtactgggaagtgtttgtgtagtaggagaaattctaaccataagaatgggactctaaaggagggaagggggaagcattccattcactagtcctgcaactgctcaacagcctacttgaaggtcacctgaaacttcatgtccagtaggagaggggacaacaaagataagggtaatatcagctgtatgatttagaagatgcaacattttccagagtatcactttgtagaggatcatttttctacttaaatagtatttgaaattaaaaaattgtaaaagtgttctgttctatcactgccaaaggataagttacaaattggttcttggaacgtaatatgtactatgtgcttgctatttaataatttaccagtcttagtcttttttattcagactaattttacctttttttaacctatgactctttagttatagtagtacaaaaaagtagttttagttatagttttagttgtagtacaaaaaagcattttctgtaagcttaatttctttccccttcccgctttcccagtcagatgactttagtgatttggagttgtgtgctttataagtgcattcctcagaggacttaatattactaagattttagcaaacactgaaatatgtttaaacactgttatcaatattaaaatagcaccgtttattgactttaatatgtgacaaccactgtgctgagctatgtatgcttcccttattcaatctatgtaaaaattttggggaagtagctgagacttttttatttccctgacagagctgggattcagtggttggtttcttgaaaaagctaggttctttgcctaacagcagcttagctcctcaatttagggaatgaaagcaggaatgaaaatggccagagttttcgctcctcagcttgtggaggagcttgagtacatgaacctcaactaagcccctaacatcaagggaaggaaaatggaaaggagaatttttagacctttaaagcagagaaattactggtgaatcatgtagcacaacaggtacctttagctttttcactgtgatgctgtatgactttctaaggtagtcagcatagtttgtagtaaatgattcttattactggaagtgtaagtggagtgttactcactagttatttaaaaaacatttataaggctattaaaacatcatctggaattaaagcagcataatttacctcatcccccacttttaaccataaaaccctattaccaattttatttcattaatttatttgctattttaatattttaagaaactacattttaatcacatagacaagcagataagtaaggcttcttctaccaaaaaaaaaaaaaaaaa

SEQ ID NO: 28448 - DNA, 6447 bp, Homo Sapiens
ctctgtcttcatcagaagaagaaagatttatttccatcaggagacctaaaacaccagcctcaagtgacttctccgaccttaatactcagacgaactggaccaagtcgcttccactgccaacaccagaagagaagatgcgacagcaagcccaaacagtccaggctgacgtggtgcctattaacataactgcatcaggcactggccaagatgatgctgatggccactcagtgtacacccctgatcactactctacactaggaaggttcaatagctgtcggtctgctgggcagcgctcagaaaccagggactccagctgtcagacggaggatgtgaaggtcgtaccaccttccatgaggagaatcagggcacagaaggggcaaggcattgctgcccagatgggccacttctcaggttcctctggcaacatgtctgtgctgagcgattctgcagggatcgtattcccttcccgccttgacagtgatgctggcttccatagtcttccgcgttctggagcaagggcaaacattcagtcccttgagccgaggctgggtgccctcggccctgcaggagacatgaatggcactttcctctaccagagaggtcacccacaagcagatgaaaacttaggccatttaggaggtgcctcagggactggaacacttttgagacccaaatcccaggagctgagacacttcgagagtgaaaatataatgagcccagcgtgtgtggtttctcctcatgcaatctactccaccagcatcatcccaaatgtcacactgtcttcctcttccgaggtcatcgctattcccactgctcagagtgcgggacagcgggaaagtaaaagttctggctcatcacatgcaaggataaaatccagagaccacctcatctccaggcatgctgtgaaaggtgatcctcagtctcccggtcgccactggaatgagggccatgccaccattctttcacaggacttagaccctcattcccctggtgaacccgcactgttgtccctctgtgactcagccgtccctctaaatgctccagcaaatagggagaatgggtcccaagctatgccgtataattgtagaaacaacctggccttcccagcccacccccaagatgtggatggcaagagtgaatctagttattcagggggcggagggcacagcagctcggagccctgggaatacaaatcctcaggtaatggaagggcatcccccctgaagccgcatttagcaactcctggctattccactcccacaagtaacatgagcagctgcagtttggaccaaacgtccaacaaagaggatgctgggtcgctgtattctgaggaccacgatggctactgtgcatctgtgcacactgactctggacatggatctgggaatctgtgcaatagcagtgatggctttgggaaccccaggcacagcgtgatcaatgtttttgttggaagagctcagaaaaaccaaggggaccggtccaattaccaggataaatccctatcaagaaacatctctttgaagaaagcaaagaagcctcccctgccaccctcccggacagactccctccgcaggattcccaagaagagcagccagtgcaacgggcaggtgctcaacgagagcctgatcgccacactccagcactcgctgcagctgagcctcccaggcaaaagtggcagctcgccctcccagagcccctgcagtgacttggaagagccctggctgccccgctcccggagccagagcacagttagtgctggcagcagcatgacttccgccaccacccccaatgtctactccctgtgcggggccacgccatcgcagagtgacacaagcagcgtcaagtcagagtacacggacccctggggttattacattgactacacgggcatgcaggaagatccggggaacccggcagggggctgttcaaccagcagtggggtgcccactgggaacgggccagtccgccatgtccaagaagggtccagagccacaatgccccaagtgcccggtggttcagtcaaaccaaagatcatgtcaccagagaagtcacacagagtcatttctccatccagtgggtattccagccagtcgaatgcacccacagcactcacccctgtgcctgtgtttttaaaatcagtgtcaccagcaaacgggaaggggaagcccaagcccaaggtaccagaaaggaagtcctctctgatatcttcagtatccatttcctcatcgtccacttctctttcttctagtacttctactgaaggaagtggcactatgaagaagctggatccagccgtgggctctcccccggctcctcctcctcctcctgttccctctcctccattcccttgtcctgcagacaggtctcctttccttcctcccccacctcctgtcacagattgctcccagggctctcctctgcctcactctcctgtgttcccccctccgccgccagaagctctcattcctttctgctccccacctgattggtgcctttctcctccccgccctgcactgagccccattcttccagattcacctgtgtccttgccattgcccccacctctcttaccttcctcggaacccccacctgccccacctcttgaccccaaattcatgaaagacaccaggccgcctttcacaaattctggccagccagaatcctcccgggaatccttgaggccgccttctaccaaggaggagaccagcaggccccccatgcccctgataaccacggaagcattgcagatggtgcagttgaggcccgtgagaaagaactcaggcgctgaggcgacacagttgtctgaacgaacagctcaggaacaacgaactccagttgctccacagtaccacttaaagccatctgctttcctgaaatcccgaaatagcacaaatgaaatggagagtgaaagccagcctgcctctgtgacaagctcgcttccgacgcctgccaagagctcgagtcagggtgaccatggcagtgcggctgagcgtggtggccctgtgagccgcagccctggagctccaagcgctggggaggcagaggctcggcccagccccagcaccaccccactcccagactcttcacccagcaggaagccaccccccatttccaagaagcccaaactgttcctggtggtaccacctccgcagaaagattttgcagtggagcccgcagagaacgtgagcgaagccctccgagctgtgcccagccccacgacgggagaggagggctctgtgcacagcagggaggcaaaagagagttctgcagcccaagctggctctcatgccacgcaccctggcacctcggttcttgagggaggagctgcaggatccatgtctcccagcagagtggaagccaatgtccccatggttcagcctgatgtctcaccagcccccaagcaggaggagtcagccgagaacagtgcggatactgggggcgatggggagagctgcctatctcaacaggacggagcagctggggtgccggagaccaacgcagccggttcatcctcagaggcctgtgacttcctcaaggaagacgggaatgatgaggtaatgacccccagtcgacccaggaccacagaagacctttttgcagctattcacagatccaaaaggaaagtcctcggccgtagagattcagatgatgaccactcccgaaaccattctccctccccgcccgtgacacccaccggcgctgccccaagcctggcctctccaaagcaagtggggtcgattcagagaagcatccgaaagagcagcaccagcagtgacaacttcaaagctctgctgctgaaaaagggcagtcgttcagacaccaacgcccgcatgtctgcagcagagatgctcaagaacacagaccctagattccagaggtcgaggtcagagccttccccagatgcccccgagagcccgtcaagctgctccccaagcaagaacagaagggcgcaggaggagtgggccaagaacgaaggcttgatgcctcggagtctgtccttttccggccccaggtacggccgcagccgaacgccgccttctgccgccagcagcaggtacagcatgcggaaccggatccagagcagccccatgaccgtcatctcggagggagaaggggaagccgtggagcctgtggacagcatagcccgcggggctctgggcgctgcggagggatgttccctggacggactggcgagggaggagatggacgagggcggcctgctctgtggggaggggcctgccgcctccctgcagccccaggcccccggccctgtggatgggacagccagtgcagagggcagagagccctccccacagtgtggcggttctctgagcgaggagagttagggccaagaacgtaactctcccaggtgacacggggggagacgagcaatgcagcactctaggaagcctgctaggcgcccttccctggctcacccggggagcccactctgcttctgtgctgtgggccccggggttgccagccctgcagtgtgagtgaacggttatttaggactcacctggcacttgccctgtggcttaagaacaagtagaagcttaaacttctgaaagtgcttcccggggaagattttttttttttttttttttttgctaaatgctgggtgtgtatgtgtgcattttccacactttttaatttttaaaaaatacacatatacacaaacaacatgtacagaaatagaagaaagcaagccagacttaagcttggtagagtaacggagtcctctggtctaggcggtaattgctttcagagaattacgtttatagaaatcagcgagttttgtaagaaaggagaagatgttacttcaagaaagaggcagtagagttgctggttcttaatgcacagaacacacagatatatgcacacgtgtgctgctgaggtgaggcaggtctggtgagcacggagaggctgggaaggggctaagtgactaattggttcaggtacttttttctgggggaggtagactttgcttcttttttgtaaaaatgacaaacgtagaagtggcaatgctgtaacctggtgcctgctgctgtgcagccacatacacacaattgtagcctgattttcagaagtgtgggtaattttttaatgaatttcctccttgagtagcagctgaggtcattgacaactgaagtgatggtgtggacatagagagaggggaagggttggaaaggagtaagtgatacactgctggaatttgtttcctgcctatgaaataaaattatttttcagaattaaatttgaaaacttgcactacagaactatgggtggagcttttccttttacaacagttttttttttttttttttttttaaccagagtttaaacttccattaggcaatttcctgtcacttgaaatgtcaacatttgctaacttttggatatccttttggttacaccaaagaaaaagttatggctatttttttttccttgaactgcctacagtatcatgtcctaattcagaaagatttatcaaaatctattatatattatcttactttgaagaaaatgctgaatagctcttgttagtcaaataaactgataaaaattggtagggcctggctatcaattagccctgggaaatgaatttttagattaaaaaggtttttttgcatcatttggtttgtgcatttttatatttgtttataaataattgagttgctaattacttctaatcttctccaatcagattttcaacaattttagacatgggacacacgtgtgtgaagtctttattttaatgtaataatctcattacccccacccttactcccttaacttccatgtacttagactcctttatttgttaaataaactagagtattgtcttcttcattagaaggacctaggatgacaatgcggagagtcttggtctgaatctagtgcgactaccacctgccagcttttggggggtatggaaatactatctaaaagttggactgcatgggtcaaatcattatgagacttataaactaaaactttagatacccatatagaaatgtctttgaggcaaaaacaaacctaaagaatgaaggctctttcccttctctgaaaaaaacaaaacactgctcttcacacaaccggaagtcaagaccagagatttggagcaattgtctactaatttggcacaaagatcgtttctttagaaaagtggcattggcttttgaatatgaaatcttctcatagctgcctaaaaaagactagaatgtatatggatatcagaaacctttaataatacataatttatgcaaagataagataaagcaacataacactaattataaaactatttttaaatccccatttttaatgaaaaatatacatttgtatttaatttcctttgaataaaacaattgtaaagtaaaaaaaaaaaaaaaaaaaaaaaaaaaaaaaaaaaaaaaaaaaaaaaaggaaaaaaaaaaaaaaaaa

SEQ ID NO: 28449 - DNA, 2053 bp, Homo Sapiens
gttcagaaatagggcgctggctttgccaggagcggctcctctccaagcctggcggtcactgccctgtgtccccttttgggcctctcctggtcctcctggttggattaggaggcctctcagcccggagtctgggtcgccgaagtacaggccccttcactgaagcgacccacggcgcaggggtttctggaagccatcgccaggctccgagtgttcagatgcagctgccaggctcaggacgcagagaactggcttccagctcgcaggagcgcctgtccgtggtgggtagggtcgcaggcgtggggtgtgcaggagcagtgggacagcactgaaacgcagtcggaagagataccacggtgtgcaggcacagggaaaaggccacgtgaggacacagagagaagacggccgtctgcaagccaaggagagaggcctcaggtgaaaccaaacctgcaggcaccttgatcttggacttccagcctccagaagcttgagaaaagaaatttctgttgtttaagacacccattctgtggtatttgttctggcagccctaacaaactaatatagggatctaaagattccttgtcttcattttgagtaagagactataaactcagaactgtggagatctagttaggtattgtacagctagcctcattctgtcttaaactccaggtaaaagagaaaaatatggagacagcccctgactttggagaacttgcagttttgtggaggtgaaaggaggcagccacaagaaaaacccctgacatcaattcaaaactataaataacaaagactaacttgttctatgcacaacaggtactacagcactgtccaacatggggacatgtgagtggcctgaagcagcacaagaactgggcaataaacttgagatgaacctcaaagcatcaatattattcatgactaaactgggttctaagaatttctatttttactctcagtgttcagtagaggtcattaaaaaaaaatctagcaatttttttttctaaaatgaatatgtaataagaatgaaaaacaaaaagcactataatgtttttaattaatgaaatgcctttacgaaccaaggtgccatcttggagaagctaggcattatgaggagctatcaggagcacatttgctaacagcttggcatgagcaggattttcttgaccaactggcaagatggggctgctcagctcctgctggcagatttttatggagcatagttttacaaattcagcctacaattctgatacgttccaatgtattttaaacatctattcagttgcaactctaatcccaggaacctgtggctaacagaaggcagatttaactgactagcagctgtgggattttcaaagtctaaactgaaatgaacatgcgaaacagttggactaccccaaaagctgaattacaattccagcactcaccagctctgaaacctcacttggttacctaacgcctctgtgcctcagttccccagctataaaatggaaaaggcaacaataccaaccttgtagattatgttttggattaaatgaggcaacacatacacagcacttagaacgtgcaaggcacaatggaagcatgcagtgaacatgacttgtaatgatgctgactgtcataactctcatccatagggatgctgcctctgcttgtcacccttgacctatatattttcaggcagtcctcacccagtccccatttgtgtgttctagatagaaaaggctccatactatgaaatgactactgtccttctgcatgaagcctggtgaacctgataatgtagccttcaagttcccttactgagccttgagctcccttcaaagtatccaagccaaccctgtcttgggaaactcacctagataatgccctgaaccccaataaaggctccagcccacaggtccctccctctctcttggtccccaccctttggctgggcatgtgtgtcctcaatgtctccaagcccttccagtaagccctgcaaggtgtgctggccactgttctctggaatctgtgagtaataaacaatctttttgccaaaaaaaaaaaaaaaaaa

SEQ ID NO: 28450 - DNA, 3571 bp, Homo Sapiens
taagcatccagcatgctgggcgagagccttgcagccgagccttggagctttcacttcctcagccctccacatcttcatgggggggatcctgtctgttgcctcaggccccctgccatgagatgccatctcttcccgtccccctttcccgcacacaagacgctgccgctctaaatggcagtcgtggcagctgggtgcaggctgaagcacctgccactctcctccccactcgcctgggggagggctgagttcacgtttcctctgagagcgcttcatgagccagaaccgtgaacttctcagcttccccatcggggaggcaatatgggagggcttggatggctcacagcagcgtgccgctgggggcatcaggttgcagtgccctctgcggggaggtttcaaatgacagcaaggtagcccaggaacaaacctggagtgacgtcaatcttgagacagcccccacgccgccttcctgctccaggagccctgggtggctctccattcttgcccttggctagagtgaatcctctggttcggacatcctctgactgtcacccttctccccgcagtcaggtatgcctggggagaggatgtgcctgggtcagggtatgtgcagtcataatcatggcctgtgggtgttgagcccttgccgtgtgtcaggcggtatccaaagcacttttgtgctgctatcatttggtcctccctcccagcagatttggggggccgttactttcaatatcatctcaaagaagaggaaacggaggctctcagaggttgaaacttatccaaggtcacaaagacactttgacttcctttgaacccatgtctagtgactccagaaccagtctcttacctagtatgcccccctccgtgaggtagagctctgtggaagaggtagcattttaggctgaatttctttgtttcccaaaaggaagttggtttctatctttatcctttttttaaattaaacttttatttcctccaaggcaattattctaaatggagttccatacctagagctccctttcatattgtaaaaatagcacaactgatggcgtttcatggtgaagctgtgttggatcatcccagagaagctccgagacagggcaagtgaacaccagaccacaaaggacagctacagtgtcaccatctgtggaaactaggcttttcccccatgcacgccttttcctgattcttcctctgcatagagacatttggctactttttccatcatggtggttagaacaagaaaatttgggcggaaaatgggagttctcaggagccaagatttgggcctgggaaaggaaggatgaagaggagcagtttggagcggggcatgaggttagactctcaaggccaggtgggcttgctgagggcagtgatcctctgaggttgttgactcccagtggcaggtgaccccttatcaggacttgcctggtagaagtccctggactgagccagataactaaattgggaccattggtgcttgtgttgccttttgtaccgggtaccctttacgccttgtttgctttttgttggagatatttatctccttgtaaaaagtgcagttctttccctaccccagtcatgaggctctggctcagaggaggtacaagattgtagcaaaaaatttgagagctgggccaccctggggcctgccggaccaggggcatactggggccagtgtgcactctctgaagggacaactgtgacttattctggctaatcattgtcgtgtaggatcacaggctgattgctagcacatttgccagtttttcaaaagaaattagaacctatatttttaatcaaaagtcttttgatttgtaaatagtggcaaccaattcatatatgtcttcaatgtatagtgaaatctggtcagtaggctgcccctgctctctctgacgtagaacataccgattcaccctttgttttctgttcagagcagactacttcaaattaaggaaaagagtacaaaaccaacaacaaactctccatggcccttgaggttatcttcctcttccagtggcttccagtgggaatcagaacaggtcaggcagtctcctctttgccactaaatgctttgcccaaagaaagaccagatttcatttggctttgggatcaaagctggggctggagggtggaggtgtcaagccaggccaggcaaagggagatttgaagccagagcaggtgggcgcatctcccaggaaaccctgcatcattctttcctggtgattctttccttctttgttatggttcacatgagtctatggagtgctcattctacattctccgttcttatcttcatcctatgcaactttagaccgctactgttttttaaaagtgatttgatttgggctgtaacctttttttattgttgttagctttgactttgaaatgtgtaataaagattcaagtgagcattagaagtttttttaaaagtagtggtttaaaaaaaaaaaaaagaaaaaagtgatttaatagctggtcttcttttttccttaaatcgtcactttcttgtcaactgaaaaactaagtcgagttactaaaatggccgcacatttaggacttagaacagctgccctggaagttagaagaagtgcgtcaagtatagttacagcttggtctggttggcagtgagatgagtatagaacatgctgcttttgtggtgtataactctagaagggtttaggggaggtggacatggcttcccaagaaggtggaagatgggggcaggaggagatggcgtgcttcctcttggtgaggggttggggtagcatccagattggctttagagatcggattaagcttgagtgtgctgagtgtctaaggagatgaacaggaagtgaaagattctcccagaagaaaggaataggggaggaaaggtatacatgtgctggagtgggtggcatctgagtcagagggttggggagaaaggttagatccaaatcttgagggtctccttgcctgcactcctagagccatactgaagaggagctggaccttcatcctggggtggcggaaaagccccgggcactttaagcaggggaatgaccattgtttttcagggtagtgtctgaacattcattcatgctgccctggcaagagcagttggcaatgatggcaagaccgggcagtgtggaggtggcccagggacacggggtgcctactgtgttttgcctgaactgtgttttaagaggctgcataaccaagcagttgctgtgcacgtacagcttggcatctgagtctcccaccccccggcaccccatgtttgttacctgcctggtgcctgtaggcatttgagtttgtagcccctggttgaattctgacggtacagccctttggctggacaccatgcagctcagccaggggagtagcagaagatcaactatggacaggtgtgacttaggaagaggtggagtttggggtgctggggagagggaccgaacatcccagggaggggaaatggcataggctgaagtaaggaggggggttgcagtgagtcgagattgtcactgcactccagcctgcctgggtgacagagcaagaccctgtctcaaaaagaaaaaaaaaaaaaaaa

SEQ ID NO: 28451 - DNA, 4703 bp, Homo Sapiens
ggtgctcggcttgtagcaggtcccgcactccagcctctcgctgccagggtttgctctctgcttgtcctgggctgaggtgtccatgacggagtcatccaaggaggaaaaaatctgttccgggttgggtttcagaccaagatactggattctcctagttaagataaagagctttgggtgcctgacagtgaaaatggtgtaatctgcgttaacagttcacagcttgaaggcatgacaattaaagaacacacatggacttgtggcacatggaaatgtgcgcacagaaaaaggaaatctataattcttttaaagtaggaaggcattcttccttgccaaaatgggtacattctgttcggttatcaagtttgaaaatctacaagaattaaagagactgtgtcactggggtcccatcatagcccttggtgttatagcaatatgttctaccatggccatgattgactctgtgttgtggtattggcccttacatacaactggaggaagtgtgaatttcatcatgttgataaattggactgtcatgattctttataattacttcaatgccatgtttgtcggtccgggctttgtccctctggggtggaaaccggtaagaaagattctgtaagacaatgaactttaatgataatcgtatatttggtttttgccttatctactaaccaataataccaaacacagcctactgtttgtcctcacagagactaagtatattactctaatcactgatcatttaggctcggagactttatttcatatctgtttgaacacattgatccaaaatagcattttccaaagcaattttattgaatatttgctctgcattaaaaaaaagatggaggtggggtggaggtgggataggttcatggtcaaaagtttaggaaacatcacatgtcatacacagtgaggtttggctgtagtaccttttttcatgtaatacattaacatcccttagaactgagaaaaacgctttagaaactgctggtttaaatcataaagttttaaaatcattgcactgaaaatataacattgggaagtatagtccaaatccatttatagcttaaaaactactgggaaatttatgcttatgaatgtccatgtttcctgctaagggaccacacctgatggcttgtcagaaaggcagaatcttgggctccacttcagacatactgaagcagaatctttattttaataaagtgcccaggtgatgcttaggtatattaaagttcgggaagcactggtgtatatcatgtgctatgtactattcaaaatgcgtacagaggagggtaagatgtaatttgaactctgaaagagcttataacctaagcaagaaacaaacgcacttgtgcaaatcactaaactataaagtagaacgtgatgggtgctgttaaagttagaagaattgagcattgttagttggggacctgagggaggagtgggaatttccaaaggagatggggaagagggcatttcaggttgaaagaatggtgggaccacgtattcagaaacagtagacagccctgtgtgactggggaaaagatcatgtagggcagagacagctgaaacaaaggcagattgtgacagtcttaaatacatgagaaattgtagaccatagaaagttgtaggggttttcaggcagagtctgacacagtcagaggtgtattataggaatattattttgacaatacacggtttgtgctgaagaaaaactacagtaaaggaaactagttaggaagtgattaaaatggcccaagaaaggggtggtgacgggtaatgtcaaggagggagcagatttcagtaggactatcaactcacgattaactcctcactctaaaatacctgctaagttgtcagctacctttttctgaactcctgaatccactaagatttggggtaagtagaaccaactagtgacactgaatttagatggagcacaaggaagaaaaatttaaaaggacttctgggtaattgggaaagcgatgctgctcttaccagaaaacttatttaaaaatattttagctcaaataagaggactggaaatgcaagttaagattctctccttcccctatcgcccataaaagaaaatcataccgtaggaatcatacttatattcaagtatccgatgatgcatttttgtttctgttttgctgccaaggaaatttctcaggataccatgtatctccagtattgtaaagtctgccaagcatacaaggcaccacgttcacatcactgcagaaagtgtaacagatgtgtgatgaagatggaccatcactgtccttggatcaacaactgttgtggttaccaaaatcatgcttcgttcatactgtttctccttttagcaccactgggttgtatccatgctgctttcatttttgtgatgactatgtacacacagctttatcatcggctctcctttgggtggaacacagtgaagatcgacatgagtgcagcccggagagatcctcttccaattgttccatttggattagctgcatttgctaccgctttgtttgccttgggattagctttaggaacaaccatagctgttgggatgttgttttttatccagatgaaaataattctcagaaacaaaacttctattgagtcatggattgaagagaaggctaaagatcgaattcagtattatcaactagatgaagtctttgtttttccatatgatatgggaagtagatggaggaactttaaacaggtatttacgtggtcaggggtccctgaaggagatggacttgagtggccagtaagagaaggctgtcaccaatacagcttaacagtgagtatttttgttcaaatagcccttcctttttgcctcgccttctttcccttaactccccctcaactcaagtgacattttgtagtaaaataagtaatatgaatgttttcactatgtcaaaatgaatctaataattctaaagcactccttgtatcatgtatctccccttatttcaatatctccttaattctctatacctgtgagataaagtcctgatcccttaacatagttttatgaaatctggccaaaaattaccttccaacttacagtagcatatgaattccttatacattcctgtcacccaactttgcccacaattttttccatcttatatgacctccactctatctaaaattattaagactcgttccagtcttacctcttccataaagtctaacctacccccatagactcatctgaatgtgacatttaatcacatactactctatggtagctcatgaagtctcatatttttatttaattctgctatcttatatctgtaactccataagattctaggacagagatcatgagttatctttatttctcctattatatctaatatagtgctatttaatagtagctatgtcaaattaagttatgatgacttttattcattcaacttcattattaaatgttcttcattattcatttgtagtttgtctgccatgtctctacagaatcagtgaatctcagtgttttcacctgagaagcttcatgagggcggagaatatactccctgatccctgggccacagtaagcactctaggaatatacacagatgaggacattagagagtgaatagcgagaagaaaacctcactctcagcctctggttcttagcatagggcctttttttccatgctaaaacaacctgtggcctttaaattatcagcaacttgaaatgctggaaaattggggttttgccatatcactctgacagttgatgaggaaaggcgatttttcaacattgagacaagagacttcattttttttctttttatttcttccaaacagatagaacagttgaaacaaaaagcagataagagagtcagaagtgttcgctataaagtaatagaagattatagtggtgcctgctgccctctgaataaaggaatcaaaaccttcttcacaagtccctgcaccgaagagcctcgaatacagctgcaaaaaggggaattcattttagccacaagaggtttacgatactggttatatggagacaaaattcttgatgattcctttatagaaggtgtttcaagaataaggggttggttccctagaaaatgtgtggaaaagtgtccctgtgatgctgaaacagatcaagccccagagggggagaagaaaaatagatagctgctgttaaaacaaaattatcctttaagtctgcttaattacttgaaaattgtacatattactaaagaattatgcaatgagcctactctggttaagatgttcttttcctcaaaggtgccctagtgccatgatttaaatatttttattaccattttgaaatggagaagccattctgcatatgcctttgaattcctgcccctctttaccacctcttcctccccctcaaaggaaaaacatttcatccaagtaagttaacggcattttctgtaggattttcttatgcactgcacactctggacctcacctgcagatacagttccccccttgccaggagcatctgcatgtggtacttctcttttccctcagttgatatttcttatatgatattctagatactatagaactcaatttgtcagattcagtataacctcagattttgttacctgtcttttaaaaatgcagattttgtcaaatcaaataaggatcaatggatgttgggtataaaaaaaaaaaaaaaaaaaaaaaaaaaaaaaaaaaaaaaaaaaaaa

SEQ ID NO: 28452 - DNA, 5146 bp, Homo Sapiens
gacaaaaaaacggagcttctccagccacatgcctaccatgcagaggctcttcatgacccagtttacacagggcctgaaagggttacggtctccagcctccatagcagacaaggtcttctgttctctgccctactcggtgggcagagtcctatccatttggagccagcatggtccttctgtctgctccttcgaaatctcttctcttcattcccctcactgcaagcggcaaccaagtctgggcaccacaagcagccacaccatgttaccatatgtgcctcttccaggcatggaagctacatataacaccagcggcagtcagacgaggctggagcctccattccctgccttggtaccaaagtcttgcttggtagcagaatcagctgtcagcaagctcctgctttcagcctctgagttccaggttcgtggattggatgagctggatggtgtgaaagcagcatgcccctgcccacagagcagccccccagaacagaaagaggctgagccagagaagaggccaaagaaagtctcacagattcgcatccggaaaaccattcctaggccagatcctaatcttacccccatgggccttcctcgacccaaaaggttaaagaagaaggagtttagtttagaagagatatataccaacaagaattataaatctcctcctgcaaacaggtgtttagagaccatctttgaggaacccaaggaacgaaatggtacactaatctcaatcagccaacagaagaggaagcgagttctagaatttcaggattttacagtcccgcgaaagaggagagctcgaggcaaagtcaaggtggcaggcagctttaccagggcccagaaggcagctgtgcagagtcgagagctggatgctcttttgatacagaaactaatggaactggagaccttctttgccaaggaagaggagcaggaacaatcatcaggctgttgagaagcgattcagtttgagggtctcaattttagggtttttttgttttgttttgtttttgggtttttttttttttttggacctccttggaaaaggttgcctaattttgccctaccgccaaaccactcaaaaatgcacagtccatgaatttttacctatttcaaggtgcaacctttttagaaactggtgaaggagggtcctctacttttactgctgagtatagaacctcaggaatgctccctttctcctggaaatggacctgaacgacatccagccacctcctcagtctctgccatccacaggaggaagcagcagcctatcttcagtaacactaggattccaaggacacacaggatttgcacgtccatatgaaagttccgctttgtttacggtggtgctagaccaagattattagaaacgtggcctagggagggggacctggcgtcctgtcctgtgtggtctcactggctcatttcagtagttgaggaaagatgagctgttgtgttttcttatcttttgtctgcccaggacctattgatgtgagtgtatgtgagagtgtttgtgtgtgtgtggctttttcccatcgttttctcccctctgtgactgggtcactagtgccagaggagcccgtccaggccccattcgaagtaagttgcactttttaatgttgtggtgtggattattttcatttgttttattttcttttttgttgttgtttttgtactattattgctgcatgtgtggagcctttaaatgtgattttaaaacatttttttaaggagaaaaacaatacatgtcttaagaatacatgataggcatttgacccagttgatcgctgcatggaagagacatttttcctattcatgtgtttcaggcaatcccttccccatctccagcttctagtgtaactcattagagggagcactttttttcatctgggttctcattcttgcccaccaaatacatgtatttattttagtgatttaagtaagagcaggtttctctcccgatcattgaaaaactactatggttgggtgtggtcttaatggcttttatctgaaatggtgttaggtaacaaaattgagtacaacggcttgggcagtgatacaggctgacccacagtatttgtggctttccaggcagcccgcttcaagtgtggggagagagtcggggtcgtgtttcagacccagagatgtgttcctgcagtgggatctcaaaaatccccagccagccttctttgagggccacctcattgtactctgggctcctacgtcacatctaccggaactgtcaaatgctggagttagccgagtttctgggtttgtgcctgcaggagtctgtgggcagagggatgctgtgggtcagcagcctcgaggtcttgttccttttccactgaagtcctgtgtgtccatatcctgctccccttcccctccttctctaggggtttctctttctctctcaaaacaagagtttagagaattaacattccatggctagtgagtgggatgcaaaagtcatcgtcaggacaccagcatcacctcttcatatcctcctgggagccactggcatggagcagccgccgatgggaaccgtcagagttctagggacatttccaagtcagtctattagagaagagtgagtggcacgtcctggaatgttggccaactctcctaggtttcttttgcttccccatttgctagtggatggggagatgggttgggggtggggggtctctatgtgccttgcttttgcaggttgacagtctatgccacactggagcagaaaaactgacatgagccagagggaaaagtgtgccacggctatgttctaggcccactgcctcagacatagcattgagacgagtgaaatacacacttggtcatccacggaggcttccaaggccatggccaaatacagttagaagagagccaggcttccgtaccagctctgaatgatgctaaccagattctgtcattctacatccactttgcccagactgtatagacacgacctatgtttcacctcaatacctctcccttcctgggacagggttcttagacactaaatgcttctctctgacttttttgcttaagggagtgggatgagtagtacattttgcccttgtccaggcatgtttaaggagctcctactggacaggttgcagactagcagtgagtcaacagagccctgtttgccagctctgttgccagtatagatgcagtgatgtggcggctatgtttcccagagacaacagtgggcacagctatagtgtcaccaacatggcagagatagtttcaactgtgcctgttacaggtgtggcactcgaaggaccagaagcagcggtttggaacatgggtaactgggagcagaggactggaagaaacagagctgggctccttccctgtcctgacaatgtaggagaggagttgttgtgaggccagccctgcccgtcgttgaaattctggacctaccctctagctaggtcccttcccctgctccaaagttgagaagggggccccactgcaaacttgaaattacttacctgaaggtgatgtatatacctaggctccagctgcgctcagccacacctgtcttaacattcagtttcggcactgagccagctgcagtgttgtcaggggtccccaggcccgtggtccctaaccacgatgggacatggtaatcggctgctggcacaccacctgcccagagctacaggaggtctggttctggggtggagttggtacagtttctgagtatgggaacttccctccccaagtggtgggaagttacagttaactacagcttactcaactatcacttccagaggtttagtgtttttaatatgggaaagaggagaaatctcaggtctaatcagggttctgcccatcagcttttcactgaaactttcaactgtgttttgttttttgtttttttttccatctttcagtttctagctgtgtttgccttctccctccgcgttccctcctctttttttgcttttggtctcctttccagcttcatgtctccatgagttcagctgtacctcatctcctgttaaagcagatcatgtccactttttcttactgaccttactctaagctacagtagctgagggaggtacggtgaagacatgtagcgtttgccttattcggagcctgaggagcccagaaacccatgctgtgaatcccaaaactcagcgctcctcaagagctgtgaaaatcatgatactttgtcacaattttgcctgaaagggtctttggcacgggctccagagccaacctgaggtccattccagatcccactatctgggcgtgagacctcccccgtggctccttccttgcccactgagccaagagcagcagggagcgtacaggacgggagcagcagatccaaggccgcggtgcagccaatgaatgcacggccgtcgctccgtctccaggctggaattccgtctcataatcaatgccatgtacattaagatctgcgaaagaccaacttttaggcagtgatacttttctcccattccctggggtggggggagtatgcagttggtgctttctgtaattcccttgttctgttttgtttctgtaagcttttcccctggtgtcatggaaaggacttcttaaataaccacattgtgggtggctgtatccaaagtttaaataattggccagaagtgcagagtatcctttcctggattcgtgtcagaaaagggctccttgccacaactgaacttactgtataaaaacctggctagggagatttaattttactaaaattacagtttaatgttaccgtctagccacaaatcaagcagcaaaagctattttgatgatgaaagggggtccccgttgagctggccatctagtgcagtgtgctctcagattccatgtttgttgattgtgtgtcttcacaagcccctctctggtgctgaattggatttgaattcttggtgagaggcctcagcatctccttgggctggtctgggccagtaaaaatagctgcctgacatgtttatatattatcatggtcagtagttcaatgaaatttgtacatttttggtaacattggtatacatgatgcccctgcagttccttttctgtttggtagtttgtgactctaagatttccactgttatgtgtgttaatttatgaaaataaatttttttgaaaacctttcaaaaaaaaaaaaaaaaaa

SEQ ID NO: 28453 - DNA, 5141 bp, Homo Sapiens
ctttattgactcctgcttttctattttttttcccagattgaccccaaagttgcatttcctcgtcgagcgcaacccaagagggcttcccagagttagcagtatttcctgggtttggaggaattgctgtttcttccataagtgtgaatcttcaaatttccaggttagtcatttgatcactcagagcttggatcagattacccaagagggaagctggaaaaatcccttacttggtaaaaccatgggtttgacctgtttttctctcccctttgttgtcccccttccttaactttgtttttaaatgagaaaagcaatatttcactttaatacactctgcagtgatgcattcaacttgaaaacgagacagaatgtttctcaaacttgtcaaagtgtgcattcctttcccaaccctcaactccacatctggaatgtttgtaggtgaattaacatgaaaccacttgggggagaacatctttccatgaattctagggatttaataataacaccttactgtgtatgacatacttcactttacggaggacttggctgttcattatctccatctgaattccatctcctggggcatttggctgttgtccctaaccttctctcagtctcagtgtgctcatctgtaaagtaggagtgatgacatagctctcccagaaggtttttgtgtagagtaaaagagcatggtctgcgacaaaggtctccgtcattgtcattatttttcttgtcggttttctcatcattgttccggttgttgtttgcaagtgggacagcctgggttcggatgctggtggtgccactccttagctgtgtgaatttgaacaggtcgtttaacttccttgaaccttcgtttttccatctcatagagtttttctgcagattacgtaaattaataaaggtaaagagactgaaaaaaaaaagacgttgcatggtaatgccatagaagcgttaacctgctatcttatttatttatttatttatttttgagatgggatctcactgtgttgcccaggctggtcttaaactcctgggccaagctatcctcccacctctgccccccagagtgctgggattataggcgtgagccactgtgcctggccaacctgctattttttttctgccatttttattaagtcctcacatcaatcctgtgagaggttgagtaataataatgatactagttgaatttatatgccaggcactattgcagagactttattaatccatttaattctcatgcagccctatgaggagagtactagtatgagctcattttgtaaatgaggaaacggaggcacagatggatgtccaggagccatacccaggcaacctggctgtagaactgggcccttcaccactgtgccatgctgtgggggtacctcaggggatggcccctctgctatgcgacaggagatgggctcggagaggtcagcgggctgtgctgagggaaccatagccagaggcccagtactttgaagttctgcgttcctgggcctaggtgatttgccttgccccatcatgttataccagtgtgtgacactgtcttgtatcttttgatctgacccctcaggccatcttttcagatggttctggagttactcaaccccagtgaggcaacagagtaaatgccaaggttgtatggtggttgggaattgggacagggtggggagaaagtgtcttccctgtctacggttattttccaatagaatttgagcctggccaccgggatttcagactggagttagcgctgggggccaaaacccaggagcatagaactttaagtcgaccctgatttatttatcgattatctcccttcaataaaacttctgtgtttttgtgttcaggtcacagtggcagagggaaccctgcccctcctcgtgggatgggcgaggagcttgtaaatgatatgtcagtgtgtgtttcagttaaaatgagtttctctgctttctggctgtccctccttgctaacgctcgccagagaaatattccgtggaggtgttaaaacaagactagtggaaagaaatggtaacttaaaaagaaagaaaatccatggcagtgaagaacagattcatattagtactgtcataatattctctaatgtatcatataaataaaaatctgtttagaccagaattttaataagtcaccaaaggaaggttttgaatcctacagtttatgtatccccctttgcgatgtaaatgttcacatctcaagtgaagtagagtggggagacgcttcggagactagaggctgttaattagtgaggtatattttgatcagggcaagaagactggttcattctatatcttcgtatttctctggatgattatttcattttgtaaaatatgtaagagttcccccccagccccttatctttttaaaaattaaaatggtcatgctcttctaaaaagatgacttaatttgaaggctttggagacatgaggatgatggggatccatcactccctgttctttgctccctttggactggagtgttggctgtctggaagagttttgcttgagctcgtgggttattttcttctatgtggaggaaccaagagactctttagcatctttcagcaagagcgaggtctgggtgtactcaccatctgtcttaattatccttgtgtataagaaaacattcccatcttttcccaattgccatttccttccttaacttttagaggccagaacctcatctgttgatgcagggagatctcacttctttaacctatttctagttgccttcagtcacagcggggtggccaggggcgagtcacttaagcctccccaaggctcagtttcctcctttgtaaaagagggagaattatagtactcactgcctgcagttagttgtttggaggataaatgcaaaattcttcactgggagtctggcataaaacagcactccgcaaatgtctgttgatcttattattatagaattattatttttattattattatttttaagacggagcctcactctgtcgcccaggctggagtgcagtggtgagatcttggctcactgcaacctccgcctcccgggttcaagcaattctcccgcctcagcctcccgactagctgggattacaggcacctgccatcatgcctggctaatttttgtatttttgtagaaatggggtttcaccatgttggccaggctggtcttgaactcctgacctcaggtgatccacctgccttggcctcccaaagtgctgggattacaggcatgagccaccgtgcccgaccagataattattttaatagaataaaaaaaagtacaatggtgaaatgactgaaggaaaatcttaattggaatgtaagctccctgagggcagggaactgttggtggctgctgtttggtaactaaatgaacgaactgagtccagcctgcttttttcaccgtggaggtagctgctacccagtaaagttacgttggttgcttcagatccacacttaggttgtagcagggctgagctagcagtcaggttttcctgttcctgtcttgtcctctgacgtggcttcagggccctggaaggttctctgctaagcacgcatccagatgggtgcaatggcagcccgagcgtgtacacgcacacctcctgttctgggggagtggtttcttggcagcttctcaagggcgaagggtgagttttcggcatctggccttcccttgctgctgtgggtcgggtcattctagcatcttgccatcttggatgatctgcagctgtcatctcggcagccaccatgaactggcctgccagtgggttttctcgttcccagcgaggatgtggtggtgtgtctgcagcccttttccacagcagcgaggacctgggaggattagtggcttagcttctttcttgtcggtgagcaccgctccttcctatgttccaagtcagtagcaggtgtcagcttaaggaggaggggcaccttgtcctacaaatgtcctttccctggattttgccgttcctcacatgctttcgtttcattgttgaggtcagtctcctaggactatgaagctcctgtgttctttgtcagatgatttttggcagacaggtgagcctcctctgctgcccgggaagggaggagaaggcagtctcggaggaaccagctgaccatctcaggtgccgcttggggcagcgtccattctttgtgtcctattttgtatttttaaacccggacaatcttcggccgaaaaccccgagaacacacaggggagatgtagttcatcatctctctcttcccgtttgatctagtgtgttcatttaacaagagctgggttgatccttgttcattgccaactgtatgcgtgcacccacttttggagggattcaggaaatactcggtgcttcctgatgtgcatagaacacagtctcgacgtcttagcttggtgcttaattaaggtccttcaaaatctgtaccagggtcttttccaccttatctctcaattcttctagtttttgctgccttgaaactgaatgctcacccttctttgagaaacctgtccttttgcagatttccctctctgcactgcccttcccttctctgtacacaacagaccctctttgaaagcccagcttcatcattatcttttccacgaagctgtccctgcccctttgtggaaacagtcatacttctttggatttccacagcacttaccttttctttggttaagccccttccaacaataataaattagcagaaacttgtggagcacatacatctgttgcatgttgtgctagacattcactcattcatttattcaccaaacaagcaccgaccgtttgccagatactgtgcaaaattcgggggatagtgtggagaatatgacaaagttcctgctgtcaccaaacttttgctctagtggggcaaataagcagtgagcaaacagataagtttatgacatgctctcaggtgtgatcaccaaagccagggaggagcgatggcgggagtggggtggaccatatctatggtacagtcagttgccactttcagtagttcagaaattatttaccaagtttctgctcagcaccggggattgcgttaggtactttgttctgagttttatggtatttaggttcatgccttatcttctccattggacacaagcatattttactaaaaaaaaaaaaaaaaaaa

SEQ ID NO: 28454 - DNA, 5817 bp, Homo Sapiens
ggagatagcagctgcgattgaggaagagcgagccagcgcccggagcaagcggagctcccccaagagccggaaagaccaagcggagcagccagctggcagtagcgccctgtaggacccccaggacccgatgggaagaaaaaatcccaggaaaataaaaacaaaggaaacaaaatccaagacatacaactgaagacaagtgagccagatttcacctctgcaaatatgagagattctgcagaaggtcctaaagaagacgaagagaagccttcagcctcagcacttgagcagccggccaccctccaggaggtggccagtcaggaggtgcctccagaactagcaacccctgcccctgcctgggagccacagccagaaccagacgagcgattagaagcggcagcttgtgaggtgaatgatttgggggaagaggaggaggaggaagaggaggaggatgaagaagaagaagaagatgatgatgatgatgagttggaagacgagggggaagaagaagccagcatgccaaatgaaaattctgtgaaagagccagaaatacggtgtgatgagaagccagaagatttattagaggaaccaaaaacaacttcagaagaaactcttgaagactgctcagaggtaacacctgccatgcaaatccccagaactaaagaagaggccaatggtgatgtatttgaaacgtttatgtttccgtgtcaacattgtgaaaggaagtttacaaccaaacaggggcttgagcgtcacatgcatatccatatatccaccgtcaatcatgctttcaaatgcaagtactgtgggaaagcctttggcacacagattaaccggcggcgacatgagcggcgccatgaagcagggttaaagcggaaacccagccaaacactacagccgtcagaggatctggctgatggcaaagcatctggagaaaacgttgcttcaaaagatgattcgagtcctcccagtcttgggccagactgtctgatcatgaattcagagaaggcttcccaagacacaataaattcttctgtcgtagaagagaatggggaagttaaagaacttcatccgtgcaaatattgtaaaaaggtttttggaactcatactaatatgagacggcatcagcgtagagttcacgaacgtcatctgattcccaaaggtgtacggcgaaaaggaggccttgaagagccccagcctccagcagaactggcccaggccacccagaacgtgtatgtaccaagcacagagccggaggaggaaggggaagcagatgatgtgtacatcatggacatttctagcaatatctctgaaaacttaaattactatattgatggtaaaattcaaactaataacaacactagtaactgtgatgtgattgagatggagtctgcttcggcagatttgtatggtataaattgtctgctcactccagttacagtggaaattactcaaaatataaagaccacacaggtccctgtaacagaagatcttcctaaagagcctttgggcagcacaaatagtgaggccaagaagcggagaactgcgagcccacctgcactgcccaaaattaaggccgaaacagactctgaccccatggtcccctcttgctctttaagtcttcctcttagcatatcaacaacagaggcagtgtctttccacaaagagaaaagtgtttatttgtcatcaaagctcaaacaacttcttcaaacccaagataaactaactcctgcagggatttcagcaactgaaatagctaaattaggtcctgtttgtgtgtctgctcctgcatcaatgttgcctgtgacctcaagtaggtttaagaggcggaccagctctcctcccagttctccacagcacagtcctgcccttcgagactttggaaagccaagtgatgggaaagcagcatggaccgatgccgggctgacttccaaaaaatccaaattagaaagtcacagcgactcaccagcatggagtttgtctgggagagatgagagagaaactgtgagccctccatgctttgatgaatataaaatgtctaaagagtggacagctagttctgcttttagcagtgtgtgcaaccagcagccactggatttatccagcggtgtcaaacagaaggctgagggtacaggcaagactccagtccagtgggaatctgtcttagatctcagtgtgcataaaaagcgttgtagtgactctgaaggcaaggaattcaaagaaagtcattcagtgcagcctacgtgtagtgctgtaaagaaaaggaaaccaaccacctgcatgctgcagaaggttcttctcaatgaatataatggcatcgatttacctgtagaaaaccctgcagatgggaccaggagcccaagtccttgtaaatccctagaagctcagccagatcctgacctcggtccgggctctggtttccctgcccctactgttgagtccacacctgatgtttgtccttcatcacctgccctgcagacaccctccctttcatccggtcagctgcctcctctcttgatccccacagatccctcttcccctccaccctgtcccccggtattaactgttgccactccgccccctcccctccttcctaccgtacctcttccagccccctcttccagtgcatctccacacccatgcccctctccactctcaaatgccaccgcacagtccccacttccaattctgtccccaacagtgtccccctctccctctcccattcctcccgtggagcccctgatgtctgccgcctcacccgggcctccaacactttcttcttcctcctcttcatcttcctcctcctcttcgttttcttcttcatcttcctcctcttctccttctccacctcctctctccgcaatatcatctgttgtttcctctggtgataatctggaggcttctctccccatgatatctttcaaacaggaggaattagagaatgaaggtctgaaacccagggaagagccccagtctgctgctgaacaggatgttgttgttcaggaaacattcaacaaaaactttgtttgcaacgtctgtgaatcaccttttctttccattaaagatctaaccaaacatttatctattcatgctgaagaatggcccttcaaatgtgaattttgtgtgcagctttttaaggataaaacggacttgtcagaacatcgctttttgcttcatggagttgggaatatctttgtgtgttctgtttgtaaaaaagaatttgcttttttgtgcaatttgcagcagcaccagcgagatctccacccagataaggtgtgcacacatcacgagtttgaaagcgggactctgaggccccagaactttacagatcccagcaaggcccatgtagagcatatgcagagcttgccagaagatcctttagaaacttctaaagaagaagaggagttaaatgattcctctgaagagctttacacgactataaaaataatggcttctggaataaagacaaaagatccagatgttcgattgggcctcaatcagcattacccaagctttaaaccacctccatttcagtaccatcaccgtaaccccatggggattggtgtgacagccacaaatttcactacacacaatattccacagactttcactaccgccattcgctgcacaaagtgtggaaaaggtgtcgacaatatgccggagttgcacaaacatatcctggcttgtgcttctgcaagtgacaagaagaggtacacgcctaagaaaaacccagtaccattaaaacaaactgtgcaacccaaaaatggcgtggtggttttagataactctgggaaaaatgccttccgacgaatgggacagcccaaaaggcttaactttagtgttgagctcagcaaaatgtcgtcgaataagctcaaattaaatgcattgaagaaaaaaaatcagctagtacagaaagcaattcttcagaaaaacaaatctgcaaagcagaaggccgacttgaaaaatgcttgtgagtcatcctctcacacctgcccttactgtaatcgagagttcacttacattggaagcctgaataaacacgccgccttcagctgtcccaaaaaacccctttctcctcccaaaaaaaaagtttctcattcatctaagaaaggtggacactcatcacctgcaagtagtgacaaaaacagtaacagcaaccaccgcagacggacagcggatgcggagattaaaatgcaaagcatgcagactccgttgggcaagaccagagcccgcagctcaggccccacccaagtcccacttccctcctcatccttcaggtccaagcagaacgtcaagtttgcagcttcggtgaaatccaaaaaaccaagctcctcctctttaaggaactccagcccgataagaatggccaaaataactcatgttgaggggaaaaaacctaaagctgtggccaagaatcattctgctcagctttccagcaaaacatcacggagcctgcacgtgagggtacagaaaagcaaagctgttttacaaagcaaatccaccttggcgagtaagaaaagaacagaccggttcaatataaaatctagagagcggagtggggggccagtcacccggagccttcagctggcagctgctgctgacttgagtgagaacaagagagaggacggcagcgccaagcaggagctgaaggacttcaggaacttcctgtagaaaagcccccaaaacaaaacaaaccttaattgactaaaaagtattgcatgctcaacttaggataagcactacggcaaaggatacgaaatctaccaagcttgcaagaccagttgaagctgactcaaaaatcctaacattcagctgattgccggcaggcttagagtcaggcatctgctgcttcggtgggggcccaacgcgcatgctgggcgcccgggtgattgagatccaaagagaagggcactgtaagacaggccagatgaactggctcctcgtcatgggactggtacctcagatctgagcatggcccttgtttttggcacgtagcagagaaaggattgatttgaacttaaccttgcaaagcaagttgcctgttttagcagtagtttgttgtaggtttcagggatgacagatttggatgcactcatttaaaacgttttggtcacatatcagctcttgatgcctttcttttaaattaattatagacagagagaggcatttagctgatctcttacccctggtatttctttttttttgttgttttcgtttttttaaatcacaagtagattgccagcgtaatggagaggaaaccagattggatatggactcttttttatgcctattctggtgttgcgtttgtatatccaaatggacgttatcctctcagattcttatctggcactaatttataactattatattatcagagactatgtagcaatatatcagtgcacaggcgcatcccaggcctgtacagatgtatgtctacacgtaagtataaatgaatttgcataccaggttttacacttgcatctctaatagagattaaaaacaacaaattggcctcttcctaagtatattaatatcatttatccttacattttatgcctccccctaaattaatgactgagttggtggaaagcggctaggttttattcatactgttttttgttctcaacttcaaaagtaatctacctctgaaaaatttgtagtttaatatttgtttggtgaatttgtgccactttaatccttccactatcattcccattttgttacatttctgttatggggactttatgttgaaatattgtataaagcatttgtagcaatttaaaaataaaatatttaaaattaaaaaaaaaaaaaaaaaaa

SEQ ID NO: 28455 - DNA, 6072 bp, Homo Sapiens
atctgtgatgtcttcagtgacatctttagtcttctaccagctcaacacaatctttttgaaaagagcagtgaaaatgactgaaactcacggactctttttttcccctccttactcgacttctgccaaatatctgtgtatgttccttcaattactaaaatatctcaattgtggtaatataagaaaagatgaaaacaaaacattcatcatctcaaataaaatttttgatgtccaggactataaagctttcagggcttccacaaacaattttgttttagtgtcataattctatagaacactgttcagtaaaaggttttgctttacatttttttcctcaaacatgtacatacaaaattatatccgatggttcaagagaaatcacttggtaagtgctttgcaggaagcatgcaaacgtttggtaaaggaagtaggaatgtgcattctagctagtcccagcatgttcaacaatagaaaaaaatccaaagagcaaccacgtatctgctacaaactattttcttgccagaaaaggctgtgcactagttcataggtataatcatattatgtcttcgtcagtgcagaggagcacagaggtatgaaagataatcagaatgaattagtactttctgagagttaaattatttgcatgtttgtccttattttataggacaatttgtagattttttttctttttctagtatgattaaactagaaaaaattattcagcagaatattaatgttatctgaataatacttccatcatatatgtttagtaagcttcatcctttaaaagtattcctttgggtgaaaacaatatttatcactccttctatatcagagtttctcaaccttggcagtaccgatatttttgaaccaataattctttacagtggaggggtgctgtcctgtgcattataagatgtttagaaacatctctggcttctaactactagacaccagtagcaaccctcccctgaacccacccccaagctgtgacaaccaaaatgtctcaacattgccagatgtcccctggcgatcaaaactgacctccactgagaaccactgctctaaataaatgtacaaaaactgagaggaaaacgttctcagtcaaaccaaattcttggtcaagtttggaatagaaactaactcttctcacttccagatcagtattgttcatactagaacacaattccttttttatagataaagcatatgtctaaaagacatgttttttaaaatgtacactgatttcatacgattctgtcactggactactaaattattccataatatacctctcatgacaacctttagaaaactaatagggtagaaaaaatgtataagaaaattgaatcaaaagaggagaaatgtaaatcattaaattacttttaaaaggattctttatattaatgataaacatcacctttaaaaaaattatctagtataacacatttctttgaaaaatatcatggccctctgtaacaagtctttcaatgtttcatgtaacctgtaaaattaattttaccaatgtttattaattatgaaaatgcatgatgaattattatacctgtagaagaaatgtcagtatttgatgtggagatcccaatgtgcttggctatccaccacaataagtgtcatattctagaccaagttaggcctttaccttacaagtttttgtgagaaaagtaaaactgctgttttatcaaggcttcatgttcctgttaagattccttcagagagttgatgcgtgcacagatcttcagggctgggcctagcttgatattcattgcactcatgagatggtcttctttcagcaagagaagggcctgtccatcaatctcctgtgctctgaattcatctgcgatatcctggcagcctggaatttgaccagaggacagaagttagaattaaatatacaacaattagacattactcctgacagtcacagttatgctctcactgggtctgagaatctgaaatacaggctgagaaacaaatgaaatttatttatggtagtcttgagttcactcttgaagaatagagtatttgcattctgaaaataagaattcaaaatccaggtaaagcaatttgctcggaattcttgctctaaaataatgttatagaaataattcataagagggaagtctagatataatacttccttcacaaaaaggactatggtgttacctcaaagcatgccacataacaggtttgggttaactagttatacctcatgcacttatctctgtataatatatccttcacatataggtaaagaggaaacaaaaatatgttttgtcatttaaataacaatctagaaatattttctcaagtaagtaccactttcattatcatttgtaccttatcctaatttatgaccttcacttgaaaagtacatttaaaatatttttattgttcactcgggacatatcaaatttctcaagactgtattaccaatctattgcaatgctgctgaaatgtattacgctgcttgacttgactatcactgggcttgtctccacttttgttaagaaaacaattctcattgaaattatgagcttgctggcgaatttcctgccatataaccaatattttagctctcagtctaaaccaggtgctttagcaggtaacaatgctagtatctacctgaaactcaaatgtttttactgtctaccaaattttcacatccaaattactcaataaacttacccattaagggtaaagaaaccaataggaaaggtaatcaattaagtagctgagatgagagaatataaaaatatggaagctttcttgagagacagtaaaattttaagatgaatttaagaatacacataaaaactgacagcttaagtttttctattttattcaaatcagcattctaagggaaaacacaaagaaaaagataatgaaaaatgaaaatagttacattacacttttggatgccacaattttgctagttcaattatcctttctacttgcaaatgtatcatcctcttgtttatgtaagattatgatgtcttacaaccccagcacaaagcacaaagcattataggtactgaatacataatatttgtcaataaggactgaattagtgaatacacaataaacaaaaatataatctgctatagaagagctatctgtaagagtaatacaaacattttttcctgtgtacagctgtgtgtccattttttctcttgcttatttcttttctcatgtcctctgttacttgtatctttactgtttcctatataacaactagcttttcaatttctattttaataatttctcagactttgaaaaattgacatttcaataccctctacgaaattattatgcttttgcacatttatcttataaaagaaactatagttgaaatgggattactcaccatagaaaagccccttttcttttcccagaggtagctctcaacaaaactgggcagacaaaactgactaatcttgcatctagttgtgacttcatccttctttttatgaaagaactaatgttcttctctcttcagtcttacttacaagaacacaggaaagaaaagaagagagagaaagatagggtgggacttacttagattcagaaaacaagagcaatgagaagtaatgagaactataagagctacatttgggaatagaaacaaggagttctccatgaggaaaatatgtagcacattcctgttcctctgtattgtgagattcctcttcaaatatcctcttgtaggtgaacagtaaatgtattagcaaaataatatagaacaaaaagtgttttgggaattagcacgatcaaataggaatgcattttagatcacaactttcttaagctaaccacaaaaaaagtatagttacatcagtatagaaatttaaaaaaaagtgacttagaaaaattggaagcaagtatgcttccagaatctcattacagaaaaatatattttaaaaacaattttaagtgctcaaggtatactgagataaggttctgagtttctgacattaacatctactttggtaaaatgcctggatcccggggatgtgtacaaaacatacaccaactgacacagccagtcagctgagctagcttcacctcaccagaagcaagtgtagtgcagctctcagcacaggcaaggacctctgcacatgggtcccaactgatctttcaagtgtctggcatcacttctccagctaaactcaaaataaaacaccctgcacaaaaattgaccacagtaaggttggtgaaaaggtatcacctgccactcaatactacagaataaacaagtcccaatactgatattacaaaaaccagtaaatagtcatgttttaaaaaatgattcctagtttatatgcctacagaaaaatcaaatctactgtggattcacccttcaataaacagaggacaaactgatctctgcaaaaggcagttcaccatagcaaggaaaggttaaagaagataacccgcagtaaattgaaaataagaattattcctgtagataactttttaatgcagagaaaattagaaggcggtaatttttcattctgttaacagctctgagattctggtctactgcatataagctctaacatagtctgaacaggatggttaacaagacgatatacaaagagaagagaaaactggaggagtaaatataaatgccctggttaaagagggaaggaagcctatctcaactggaaagaaacaaaatacaaaagagattacaaaatttacaagcttgttcatcctatgagaaaagcttgggagtagactactcagggaaaacaaacagcgcttaatgagagctaaaagaagctcaaaacgaaatttacaaagtccagagaagcagaaagaaatgaacactaaggcattttctggtatgagattaccttaaactataggcattatgcagagaaaactgtgagaaaggtgatacaactaatcacacaaataagcttattatttggcctgtcaaagcagtttggaaacactcccatttcataagtaaagaagagagtcatattaaccagactctaaaatagtagtaagcaattctaaattatataatagctgtgtcctttttatgatatataatgttttctaaatacctggcaacaaaattaagtgtctagatgaactctataagacaagcattttaagttatgaggaatattaagttttatgtttttttaactcaaatgatgcaagaatggggcaaaggaatttgcctttgttctggtaaagtagccacatggcaaaggatgctggggaaaattagcctaaataaaaaaagaagtgaaagaagaatcagcagtatccatatttgttaattatttgggcaactacttttctcaggatataaaccaactctcttctgcaaaggaaaagaaaaatttcccccaaatgaaaaatcaggctcacaaacagatcatgtgccctacctggaagagtgacactacttctgaagatgacagaatcaaagcccagccccaggtatccacatagactccaaagttaattctcaagatagctatactggtctaaaaactaaaactggtttcattagatactaaaaccacaaccaatgaagacccactgtcttctaaatacacccagtttaaaacagattctaaatccacatggtcagcaattaactcacatctaagttttcgtgggcacatgcacatgtttaaaaatcttcccatgaagtatctccactttaaacaattccatctttctttaaaagtggccatatttttttaaaacttagcatttctaaaacaagctattgataaactaatttagcaaaatctcacagaattctgtatatgaggtaaagtgggtgacggattctttacaactatcattcctaaatatattttcttgtatagcatgttagctctaagtatgcttccaagactttagttgccatcagagaaagactaattagcaacaacagctgattaattagcttattaaactgtaaaaagttagtagacaagttcaaataggatgtattcttctagaaagcttgtatcaagagaaatgatatgattcgcaataaaaccaaaaaaaaaaaaaaaaaaa

SEQ ID NO: 28456 - DNA, 2457 bp, Homo Sapiens
gggcggaactggtcgggatgagtggcggagggacagagacccctgtgggttgtgaggccgccccgggcggtggcagcaagaagagggactccctggggactgcgggctcagcgcacctcattatcaaggatcttggagaaattcattcaaggcttttggatcacagaccagttattcaaggtgaaactcgttattttgtaaaagaatttgaagaaaaacgtggtcttcgagaaatgcgagttcttgaaaatttgaagaacatgatccatgaaacaaatgaacatactcttcccaaatgtagagacacaatgcgggacagcctcagccaggttctccagagatatgaggaactaagttgctgagagataggaggaccaacaagaacagtgcctggcacaaagcacatgctcagtaaacatttgtcaaatgaataattgagcgagcaaacatgcccaagatcattcacacaactgagtgccaaatttgactaaggctcactcttaacctgcacactacatgtctttatttggataaatgcaagcagctaatgactcagtctgtagactccaacagagggaacaggaacgaaaaaagattcatagtgaccacttagtagctagtgagaaacagcatatgctccagtgggacaacttcatgaaggagcaacccaacaaaagggctgaagtggatgaagagcacagaaaagccatggaaaggcttaaagaacaatatgctgagatggagaaggacctagcgaaattttcaaccttttaagaacttgaaccacaacaatcacaaactaatgagaagatgttcacctctctcctgaaaactattcccaccagaccgtttagcctctgcttcaagcttagcaatatattcagtggcacccttatatcagaagaaagaagtttctactggcattctgattggatatttaaagaagggtgccacatttttccagctttaagtgcctatatatgattatttgaatgaagaggagtaggaaggaaaatggaatcaatatactctttgttagtcagaattgatcatcttttccattgattagctcagagaactgtaggtatagacttcttagaaagataatttcattcatttctatacagggttaacaatagtttattattgtggcttaatgggaaggtatagaagctacctgtcatagcctccttggctgttggaaggatgtataaagtgttactgcatgagtaatgtagacaaaaaaaaaaagccagctgtccttggagcagagatcacatttcagagaggtgagagtgaacacattgtctctgctgtggcaaagatggccacgctggtgtttgagctgcctcttgggaagcgttgcatattttacagtgcagcataatgccatgggcttccgtggatgggaagacacatgttaagttttgtggccttccagcacttactattttcagctttttaaagcatgcttagaaggaaaagcttaccaaaaatatattttgacatttagtttttccaagagctgtaatcttgcccatagtatttacctcatttttgtgtctgttttgctgtgggtaagctttataagataaataatgtctatacatgtttcgactgtttaatgagtaatcaacaaaatctgccagagagtccctctggaaccgtataaagttcctggctttgaatgaaccagaagtgtttgcccacacagcaaatggtccatgttaaatgtaaatcctttttagtgttaatgtctgttctcataagcaggtatattatgatgaaacatgtaccagttctgtcatcactgtgatctttaaaaacctgcatttaacagtctaatttgaggctgggtgcagtggctcacacctgtaatctcaacactttgggaggccgaggcaggcggatcatttgaagtcaggagttcaagcctagcctggccaacatggggaaaccccgtctctactaaaaatacaaaaattagcccggcatgttggtgcacgcttgtaatcccagctactcaggagtctgaggcacgagaatcacctgaactcaggaggcggaggttgcggtgagctgagatggcaccactgcactccagcttgggtgacagagtgagactccatctcaacaaaaaaaaaatctaactgaagaactaagttgattttttatttgccataaaccaagcaaaagtaaatgcaataatttcgagatttatggtaagcaaatttgaggtatggataaatctttcacatattttttattgctctttagtaaagaaaggcacaagaaagaaaatatccagctctcttgtgttatctcagtgtggcgactgcagaaaattgacaatgcctgcctgtgtaaatgtatggcttactgtcaaagcttcattcttggctgcatgttgaaaatgtgattaaagttaatagaggagatgaaaaaaaaaaaaaaaaa

SEQ ID NO: 28457 - DNA, 3203 bp, Homo Sapiens
atctagatgtgtttccctgccttaccaattctttgtgttctttcctcaaatggatgctttccaatgtgattgagtaaattaataaactctggtaaagaaattaaaagttaaaaaactggcttaatgtgtcagttctcctgtttttatgtttatacttttatgggtggcttataccgaggcaatatcaataggagaagaatcatggtatggtagcataaattaggaatttaaaaattgtttagaatctcagttctactgttataaattgtgtgactctggtcaagttgcttagatctcaggacctccatttccccatacgtaaaatggagagaattactgatgctctcacttacagagttcctaggaagataaataagataatgtgcatcaagcatttagcccgaggtatagcacataataaacatgcaacaaatggtagctatcattattttataaaaacacttttcttctattctttagttataacatgtaggcagtggttacatagggttaaaaaagatatacataaactgatcaataaatgtttgattgttctttgctcaaatataaaaattaggccccccaaagtctttttaaacataacttagagttataattagattctcttaattagtatggaaacattgcctttatccatatgattgaaccaaataggatgcactgaagatctctaagattattgacttcctgtgtcatctaattattacattgtctatttaatttattcataaaaataaaaataatcacccaatatttactttatgcctgacactgtgctaggtaatgaagaaaaatggatgagtatgagtaagtccttagtttctagtgacaaagaatactatgggaaggacaaatcaacggggagaaccatttatatttgctatgaatcatctagcaacacaaaggagtcaaaatgtctatccatgtctatcatactgctgtaagtcttaaggttttgaatcataggtttccaattgtaggtgggtaactgatcattttgcaaatgaatcaactgaagttaaagaaaatggttttgccccaattgacacagcccgtcacttcagatagattgattccaactatgcttcttccaacatgtcattactgtatcacttttctttaatgccaatgttactgtttgacagcccgtagtaaaaggggagaacaaacttaatccttcgacagaaaagctttggcagtattcaggtttgaacaaataaaccttggactcatggaaattctgaaagatgatctactggataatgtgaactcaattgccacaaagttcccccgggaattagctgttacagtaatatgaagctttgccattttcctttgaccacaaacatctggccgctttcccatatgtgctaagtctatgagttgctaggattttcacaaataaaacaaacagacaaaatgctgcattttaagtaacttagctttgtattttcaagttcttaaaatcctacagtctttcatttaggttaggaaatattaatttctcagtgtgtagatgaagttgattatcacttctgcttccccacatacttccagcttccatagaggaagctagaattaggttatgtgctatatcctcaaagacctaaaaatgcatttgttgagaggaattagtgtaataataatgaatatgaagcattaggtaacatgtctagcatattaaaacatttaataaaaggaggctattacaactttaacactaacatttatttctggcacacaatgggactatatttacatttattgattttaaggtaacattttaatttctctttcaacatgttaaacatatctttcatataataatggccaaaaaggctcccataactttccaactgacaatgatttccttattacagcttatgaactctggtttaagcaaatcctctgggagttggattctgttcgagagatctttcagaatggccatgtcagagatgaaaggaacatgcttaaggttgtttctcggatgcaccgagtgtcagtgatcctgaaactgctggtgcagcagttttccattctggagacgatgacagccttggacttcaatgacttcaggaaaagacacttctggaattagtggaggcatggctggaaagaactccaggtttagagccacatggatttaacttctggggaaagcttgaaaaaaatatcaccagaggcctggaagaggaattcataaggattcaggctaaagaagagtctgaagaaaaagaggaacaggtggctgaatttcagaagcaaaaagaggtgctactgtccttatttgatgagaaacgtcatgaacatctccttagtaaaggtgaaagacggctgtcatacagagcacttcagggagcattgatgatatatttttacagggaagagcctaggttccaggtgccttttcagttgctgacttctcttatggacatagattcactgatgaccaaatggagatataaccatgtgtgcatggtgcacagaatgctgggcagcaaagctggcaccggtggttcctcaggctatcactacctgcgatcaactgtgagtgataggtacaaggtatttgtagatttatttaatctttcaacatacctgattccccgacactggataccgaagatgaacccaaccattcacaaatttctatatacagcagaatactgtgatagctcctacttcagcagtgatgaatcagattaaaatcgtctgcaaaatctatgaagaatactggtttcacagcctattttttattttctatggattttcataaatacagtttgaatatatgtatgcatatattgttcagcaccacgatgctctgatttaattctagaaacaatttgattacctcttgtttgtgacaagactaagcattaagatgagaaagaatacatttaaatagtaacattgtacatagggtgttttcctattaaaaattcagtttcccctgagacttaatgtaaccacttaatgtaaccactatctcattgtttcatctttataaacttgtaaacttcatctatttcaaatattttatgcagtacattatattattctgtacaaaggctttcaaacaaaatttttaaaataataaagtattaatctttcaaaaaaaaaaaaaaaaaaaaaaaaaaaaaaaaaaaaaaaaaaaaaaaaaaaaaaaaaaaaaaaaa

SEQ ID NO: 28458 - DNA, 5403 bp, Homo Sapiens
cttataggaaaatcagtggctacggtttttttttttttttttttttgcatttccttctgtcatccattgcaaagacgtaccagcttcagggtagtatggaaagatccctggtctcgcagtcagaagacccgagttcaagatgtgggatctctgaacatggcccttcagttctttcttccgagagctgtgctgatggccaagtaagatgagggctatgaaaagcctctgtagactgcaaaatgagcatgggagaggctgtcattattctggaattgggagacagatttacagagggcctgaacacaggattgaaggtggtgaatttccattcggctgcctgggcgtctgcatgtataaaaagcaaacctaagtggtttttttctcctccaagtggagatgaaagtgttaaaaatagcaaggaggtgaaagtgttcaaaatagcaaagtggcctgtctcctcttctcctaagcagactgtccaaacagacgcccagtagaaggagcaccttttgatactgggcacgtggtggtgatgcctcctctctcctagcacaggccgtggctttgtcatctccagccctaactgggagcaccgagggttccaaccaggcaaatgcaggccctaacgggctctttgaaaacgggcttttctagaaccaggaacctcaagtaaaaactcccccagctacctctaaggcccatcacactcctgtctcacgcccacctatgagaaaggaaaaggtgatggtcattgagctgggctgcagaggagtgtgaggtgcagacaccatgaggtacccacagccaggaaaacgaggatggtcggggagacgcgccagcgaagagctgggcccctgcgtgggacccctcagtggttcccagggggcgtgggacttgcgcagtcctttcagagggctgtttaccaacaggaaccgtaacattaaacctgctcagaccccttgactcagcaatttcatgtctgggaatatatcttaggaaaataatcagagatgcctaccaacatatgtgatgatgatgtatgacagaattattatacaaatatatccatagtaacagggggtttgctgaaataaattatcatatattcatataatatgacattatcaggccattaaaaatcacagtttcaaagagtaataaaatgggaacatgctcatagtatagttttttaaaattgcagatggtatatggctaaaaatgtctaataatgcaaagatgtatacagaccttaatcctctagcctcctccctagagatgacctctgttaatttctcaaatatttttctggatattttacacactcacacactttttttgagacagagtttcactcttgtcacccaggctggagtgcaatggtgtgatcttggctcactgcaacctccacctcccgggttcaagagattctcctgcctcagcctcccgagtagctgggattacaggtgcctgccaccttgcctggctaattttttgtatttttagtagagacggggtttcaccacattggtcaggctggtcccaaactcctgacctcaggtgatccgcctgccttggcctcccaaagtgctgggattacaggcgtgagccactgcgcccggccattcatcttaatttttaaaaaatctaaccatgaagccttggttatcttggagagctttcctgattagcacaaaaagaaaaaaaaatccaattctttacagctgcatactattccattatttgtatgtgtcatattttatttaaccatcctgctattagtgaccattgagttggcttcctgtgttttgccgttacatggttgcaacaaacatgtttgcatgtgtctgccctcatgtgcatgatacatgattgatttgatagattttaggaattacatcattcattcatacactcagcaaatatttaatgagtgcctactctctgataggtgctgttggatgtggctaaattttaaagtgtagaatttaaaaggtggctaccaaattccatgtgcaaaatgaccccacgcatgtataaaaacacacacatccacagatttatatgcgggagagaagatgtggtccctggcctctaggctctctcagtctgtggcaagacagacagacatgtgcacgcggcactgtaaggttgagcacagtctaagtactcagcatggtctctggcacatagtaggtgcccaagaaatacatgtcgaatgaattgagggggtaaggccttctagggcaggtggcctctgacctcagccttcagtgttccgtaggtggaattatctgccagagacgtggcaaaagggagaggaaccaagacagaggcacagaggttcaaacgtacccggcacgttcagagaatccttttcagaatcacgtccccaagagcttctgtgttctgtacggtgatgttgcagtgctgtttttccgcagtctcgctccatcggcctcaatccgctgtacatcatgctgccctgtaccctgagtgcctcctttgccttcatgttacctgtggccacccctccaaatgccatcgtgttcacctatgggcacctcaaggttgctgacatggtaacacagctgtttttatttactcccgtcggactataacgctgttgtcataagggatgccccatttatgaatgacagagtttcaaaacgatgtcatgtgacttgggaatgccacggaacatccagacctgtagccattgttgacatttataatgcagcttttcttctttttctgagatgatctcaagcctcacacactgttctttctctgaggtgggttatagactctcccacctggagaagcctgtgcaggcaccaggggagtccttggaaggggtgaaggtggggctgagggactcatatggccaaggatgaacttgacaaattagcaagaaccatgaagataggcagggcaggcttaggcagcagggggatgctaatgacagtcacagagatttgtaggggtgcctgaagaggtagaagcagggagagggagagagagagcactgcctgggagtagatgatgccttggaaacaaatgtagtcagaggaagaactcttcattagctctgtcacctttgctgggagaagggcagctttgcagctctgggctgggaaagaggcaagtgtttgagcccaagaggccagaaatgtacctgggaccaatcgggtgttcgttatctcagagcctctgctgggtatctcagggactccatgagcattttcaaaaaaaaggtgggtcccagaaaccatggactgcaaacttgactccaatccccagtaaaatatttacaacagggtagtgaagcgatggttagtgaccatgagggaagcttgcagagcaggcatcagaaagagcctgaggaggtccacagggaagctggcacgtccttgtaggatagttaaggcactggggtgagcaatgaacctggactcacggaacactgggctctgtgaccgtttccctgaatggcctaagctgttgcctcctgtcacttctctgaggtcattttccaaatgcgcacgggcatagagaacccatccactctgcctacttcccagggatgccttgagcactgaggatacctgggggacatgaagtcgcactgtcctgggggtcgggacaccccagccagggacagagcatggcacagggacatcgaggcccagtgagccgaccctttgtcctcctctctgagagcactagtccccagcaggcctcagggtgctgactctgtctcttttccaggtgaaaacaggagtcataatgaacataattggagtcttctgtgtgtttttggctgtcaacacctggggacgggccatatttgacttggatcatttccctgactgggctaatgtgacacatattgagacttaggaagagccacaagaccacacacacagcccttaccctcctcaggactaccgaaccttctggcacaccttgtacagagttttggggttcacaccccaaaatgacccaacgatgtccacacaccaccaaaacccagccaatgggccacctcttcctccaagcccagatgcagagatggtcatgggcagctggagggtaggctcagaaatgaagggaacccctcagtgggctgctggacccatctttcccaagccttgccattatctctgtgagggaggccaggtagccgagggatcaggatgcaggctgctgtacccgctctgcctcaagcatcccccacacagggctctggttttcactcgcttcgtcctagatagtttaaatgggaatcggatcccctggttgagagctaagacaaccacctaccagtgcccatgtcccttccagctcaccttgagcagcctcagatcatctctgtcactctggaagggacaccccagccagggacggaatgcctggtcttgagcaacctcccactgctggagtgcgagtgggaatcagagcctcctgaagcctctgggaactcctcctgtggccaccaccaaaggatgaggaatctgagttgccaacttcaggacgacacttggcttgccacccacagtgcaccacaggccaacctacgcccttcatcacttggttctgttttaatcgaccggccccctgtcccacctctccagtgagcctccttcaactccttggtcccctgttgtctgggtcaacatttgccgagacgccttggctggcaccctctggggtcccccttttctcccaggcaggtcatcttttctgggagatgcttcccctgccatccccaaatagctaggatcacactccaagtatgggcagtgatggcgctctgggggccacagtgggctatctaggccctccctcacctgaggcccagagtggacacagctgttaatttccactggctatgccacttcagagtctttcatgccagcgtttgagctcctctgggtaaaatcttccctttgttgactggccttcacagccatggctggtgacaacagaggatcgttgagattgagcagcgcttggtgatctctcagcaaacaacccctgcccgtgggccaatctacttgaagttactcggacaaagaccccaaagtggggcaacaactccagagaggctgtgggaatcttcagaagcccccctgtaagagacagacatgagagacaagcatcttctttcccccgcaagtccattttatttccttcttgtgctgctctggaagagaggcagtagcaaagagatgagctcctggatggcattttccagggcaggagaaagtatgagagcctcaggaaaccccatcaaggaccgagtatgtgtctggttccttgggtgggacgattcctgaccacactgtccagctcttgctctcattaaatgctctgtctcccgcaaaaaaaaaaaaaaaaaaa

SEQ ID NO: 28459 - DNA, 5627 bp, Homo Sapiens
cccctatagtgcattaaattcatcctgtattttcccatataaacaagaagagactttacattttttagataaaggttcttatcttttgcatgtattgaacacattttctttgtgtcagacctcaaaattacttgatccttatatatacatctatgttaagattttctcttatgtcccctaggtcatcacatccaggcagccagtcagatgtcggatgttaagctttctctcaaacagtactttttttttaaccccttgggcactgtaccttaaaagtctgcaactttaacttcatcttctacagtcaatcgtgagatcatatttgaggtatcttcttcacaaggagcagctatgaaagtctgccaacttttctttgttaaaggggaacttggctacctcaagaacctggcccaaaccattttctgtagagataatagaggccgtaagctactttgccaatttgaaaggaagcaaatttatatatacaatttcttacaggcaatgattttgaaaggatgttcctttgctatattcataccagtatattaatgtttagtaacacaagcaggattctacatatgctgagattttagtacaattgatgtcctagggtataaaggtgatacagaactatatacatatcaactgtgttttataattcaatgatgactaaagaaagataaggaccactcttctcactgaaactaaatttgatgtgggaccaagttcatgcttttatagatgtctaaagtgttatagaatgaagttgcttcaaagtaccaaatcctagaggagaaatataatgaccttgatattgaaatgattaagcaacatttggtataccaatctgcctttgtgaaaaggtttagcctgaataatacatgccattttcaaggacatattagaggataaaggggatactggatggagatgaccaccagcatctgatgttaattcaaagcaccaccaagtctttaatttaattaaactttggtcatgccaaatgctaattgaattgttgaagacacaagttataaaatattaatttattaatcatgcaaggcataatatggtttttaaaacaagtacacttcttgcttccacgtgtatttgggttcttaattcatctatatccaagtttcttgatagtgaaaattacctcttaaaaaaggttcagcctttattagactcgtgagggcaaatggtacatattttaaagacgttttctcctttaatgtatattatgtttcattggcggatgctttatatttcctttttctttttcttttttttttggagacagtcttactctgtcacccaagctggagtgcaatggtgtgatctcggctcactgcagcctcggcctcccaggtttaagtggttctcctgcctcagcctccctagtagctgggactacaggtgcctgccaccatgcctggctaatttttttttttttttttttttttttttcagtagagacagggtttcaccatgttggccagactggtctcaaactcctgacctcaagtgatcttcctgcctcggcctcccaaagtgttgggcttaccagtatgagccaccgtgcccatcctgtatttcctttttcaaaggaatacatctgcagtattttgagagtaattagcagagggttttttgagtatttttggtaggaaaaatagatgtagttttttaatcaaatttctgaaattgaaaatatcacttctttttaaagagggataagtatagtcactctagtagaaaaacatggcttgcctatttcctcttcttttctgtttgcttggatattgtttaatgaattcaaactgtaggtttagtcttgtctttataacagttaatggagaagtgataaaattaagtattcagcataaactaaagatcactctttgtatttccccgatacattgacagtatgtatgtatatagagtttaaattgcctaatatatgcacagaaatgattagaatttgaagtactatatagaggagagttacatggttctagtggcagtggattgattgtattaaggaccaaaagaactgcaggataatataaaaacaccttgaaaactggagttagttaggtttctttttctttttcttttttttttttaaagggccttactgtactttttttttttttttggtcacccaggctggagtgcaatggcacgatctcggctcactgtaatctctgtctcctgggttcaagagattctcctgtctcagcctccccagtaagtgagattatagacatgcaccaccatgcccggctaatttttgtatttttagtagagacggggtttcaccatgttggccaggctgctctcgaattcctgacctcaggtgatctgcccaccttggcttctcaaagtgccagattacaggcataagccactgtgcctggccaggtttctgattatagttttcttaagttgtaatcatcataattaacgtgcgctagagtgttttaactgtgctggcactaatgcttcttggcatataattaactcttgttttgcaaaaagaccatgaagaatgaaaggagggctttaccttaccttagtcattttgggtgaataccgtaaactgggtggcgtaacaaaacacatttatttctcacagttggaggctgagaaaccccaagatcaaagtgccatccagcgcaattcctgatgagggccctcttctggcttcttgctgtattctcacttggcagagagagagagacatcgttactttcctgtctcttcttataagggcactaatctcattcatgagggctccaccctcatgacatgattaccacccagaggccccacctccaaatgccatcactttgtatgttagggcttcaacatatgaatttgcagacgaggaggagaacataagcattcagttcataacatacctataatctaggtcatatcataaacccagagatgataaggattgcctggtaggcctaaccatatatacatatacatgcatgcacacacacatatatgcataatctgccttgttttacattctttgagtcggacttctgtggtccatatgtagagaacatagagcaataaataacctagttcaatctttgagtcttactgaactagtccttaaacagatggtatcaagatcattttagatattagtgactctcttgtatattagttattttttacacttttaagaacagcatctttgaatcttttcaagtacagtatgccttaaatgtataggaccactgagttcaggaagaaaagcataggtattctgtaggtgaattacactaacaaaatcacaactgcagaatgtgatctgatacttttgttggacagtaaagctaatacattttatatacacagtcatacctttttttttgtaatgtgtttcgttaacgtaagcacacagtcatcacagactgagacaggactttgttagaccagatcttgtgagctaaatatttaagagcttaacatatataaatgattttaattggtattgggcgaaggaaacctaaaaatgcttaaattgacagatcttacaatttgcttactgaaaattcagaaagcttttatgaaaactttgtattttaaaatattttttgctcattctgaattagaagttagatcccttttaaagagggtctcactctatacaaatatagcctatgaagaatcaatagtgaaataatagtgtttatattgaaccccaggatgggacattattttttgaccatttacatgaggtctttctctaattaccaaagttaaccttaagagtagttaaaaactcagtgaattttagtcaacattctctgtggagacctggactagtgtttcccaaactttcatgtgcatgtatcaaatcagctgaggatattattaaatggagattcagattcaatagttctggggtggcctctgggattatcagtttctaacaagctcttaggtgttatcaattctcctggtccccagaccatagttagagtaaaagagtatagactgcatttagcttccagattttctctttcaaggaaaggagacagaactgtcattgtaattcttcctgtggtccaggcactctaacgttcatcgtctcttctaatgctcttacaaatcctgtgaggttggtgataatagaagttacctcctgaagacgacattcacaagcaggaccgaccgtgtagaccagttttctcaaactgaataatgtacttcactttttaataaggaaaaaaatctcttagctcctcagtttttgcttaatttatatttattataatgttatctaaatatatataaacataaaactaggtataaatgctttatgtttatatgtcttgcacaagtataaaaccaaaacaagtttatgggttaacacaagcaaaactataaaactaataaaatttaaaatagtattaaatagtgatgttttgacaaaatgaaattgtcacttgtaatgtgattatggtactgagtgctacagtacaggctcttttcagttcaacaggcatgtactgccatgtactatgtgatgacccaattcaccctgttttctcctattcagactattactttaatttgttcagcacatagtgatgttatttggtcctcatctagcctgaatccatcattcccctattaaaacagcctctgttctccataagccttccaccactaatgtagaactgggccttaacagggaagtcaatacaaatacaaacctaagcactgagatggttctgccaatatttggttttaatacaattatccaaataattcagagcatgaatattattttaaaatgtttcatcaacatggaccccagtttaagaagcaacaatttagtggtcagtagcattggcgctttggcttctgacacactcagaccttgggcctgtttctcaactttttctgaacctcagtgtttttgtgtattcaacagggataatattaattgaataattaggaggaacaaatgcaataatgtacataaagcatgcatagtagtgtttataaatagcagccaccactgctttgattagaaataatagcagctaacatttgaggatttactgtgtgccttgaacgctgctaagctctttatatatattacatattgagtggtagaatcaggattcaaatccagatctgactccaaagcgcatgcttttataaaacataatttaaatatagaatatcaatgtaaattgcttatttagaaagtttattttcttatattttctcaaaaatatttattgtcaaatcagtgattctgtagaggggtaaatagctaaatttccttttaaaaattgtatgatgtgctgatttcaaattgatgtgaaatacagatttcatttaaaggcagtcatgccagattgtgctacagtaaaggaatattcagacaaaaaaaaaaaaaaaaaaaaaaaaaaaaaaaaaaaaaaaaaaaaaaaaaaaaaaaaaaaaaaaaaaaaaaaaaaaaaaaaaaaaaaaaaaaaaaaaaaaaaaaaaaaaaaaaaaaaaaaaaaaaaaaaaaaaaaaaaaaaaaaaaaaaaaaaaaaaaaaaaaaaaaaaaaaaaaaaaaaaaaaaaaaaaaaaaaaaa

SEQ ID NO: 28460 - DNA, 5964 bp, Homo Sapiens
ttctagaggccgaggcggccacatgttttttttttttttttttttttttttttttttttttttttcctgagatggagctttgctcttgttgcccaggctgtagtgcaatggcacaatctcagctcactgccttttgggttcaagcaattctcctgcttcagcctcccaagtagctgggattacaggtgcccaccaccatgcccagctaatttttgtatttttactagagatggggtttcaccatgttgtccaagctggtctcgaacttctgacctcaggtaatccacccgcctcagcctcccaaagtgctgggattagaggcgtgagccaccacacccagccctttttttttttttttaattttgagatagagtctcgctcagtctcccaggctggagtgctatggtggaatcttggctcgctgcaacctctacctcccagtttgaagcaattctgcctcagcttcctgagtagcttggattacaggtgtgtgccaccatattcggccagtttttttttttttttttttttgagacagagtctctgtcacccaggctagagtgcagtggcatgatcttggctcactgcaacctccgcctcccaggttcaagcgattcttatccctcagcctcttgagtagctgggactacaggcatatgccaccatgcccggataatttttgtatttttagtagaggcggggtttcaccatattggccaagctggtctagaactcctgacatcatgatcagcacacctcggcctcccaatgtgctgggattacaggtgtgagccactgtgcccagcccaatttttgtatttttagtagagacaggggttcaccatgttggccaggctagtcttgaactcctgacctcaggtgatctgcctacctcatcctcccagtgtgagccaccgcacccagcctggattgttgaattcaatgcttgggtcgcctccagattcattttcacagtctttcatgttttggtcatattacactgttttttgctgccatatgactgatctctttttgttaaatgtgagatacttgttaaaaaatatttagcaatgaattgaggcctagtagcgtgttatcttgctgcagaagagatgggagtctacttctgggggatggtcaggggtcctccatacaggctgcaattaaggtcatcagtgcaggctcagtccctacaaaggccagggtatttcctgtccacctctattctgatgtgtgactcttctgggtctcaaccagagccagtggacttcagtacgggtcgctttcatcggcagaccctcagtccacttgttttccatctaatcccacgcatgtgtgcagaagctgctctgcttctttgcatctcagtagttccttctggaattcagcaatgaaatcagggaaatgggttccaaatgcaaggctgactttcgtcctgggttgccttcttctccatcttcacctcatgtctgtttactgccatgttagcaatttgatgtattcaatcatgggttttatattctgtttggtgtcccccattgttctcatcggagatcagaagcttcagatgcacttatgtcaactcaagagtagagtgcttccttagcttccctccagagtcaggttttgtgtttctagtttccaagtgcacagcaggagtagtgatgtcctcactggcttctcatttgcattaaactgtgagcttctttagcgtggggacaggaccctgctcccattgcattctcagcacctcaccacacactccttgttggaggccactccagacagcacgtgctgaaggatgctctgtggtcagaaacaagttcattaactttccctttgaagtgttttcgtccctgtttcctagcgttctgggaattttacacatccttcctataaaaccaagtatcaggtgagatccttaggataaggaccatgaatcaagtggtgtgagggcaacacagcaaacttaccctttttaggccatttcctttttctgccctcaatctctgtgaactgaaccttgttaaagtcagtcaacaccagggtggatggtttgcagttgtcacctattttcaggacataacaccctgacttaggagccattccgatcatttctaattcaatagatgtgcccggcattcagattgcctttcctctcaaccaggatctttcaagtcgatgacaagagttccagtcctgaatcacggcaaagtgcagtagtgaactgcggggttaatgacaccatattctggaaggatctctctatggctgatggtctcagttccggcatcagcctctgactgagaatcaggtctcacacaggaggagtcagatgaggagcaatcctctgcttccgatggagttagttgtgatgagttggtgaggtctggtttttcacaccgaactaaaatgaactttcactgtgtcaagcacaagactgaccccagagacacacatagttgcacctcgtagaagcttttaatagtctttatatttactaaagaataggactaactatggaactatgaagatgagctggaaatgacaggtgacttgccagcaggccagagtgtgatttttttttttttctccctcaatgggaggtgtccattctcccttcggttgtgagaatcagttggttcatttatgggaaggttgcagggggcatctttgaatcacagccttcagatgccagaagggcagagagaatcccacatgggctggtggatcatgtgtgtgcatttctctcccttctaacctgaggaaactaagcatgaaagaatgtgagcatgtagaaaaggagaggcaggtatcagaggcagaggaaaatgggaaattggatatgaaagaaatacacacctacaagtgagttcagaaactgaaccccaccctcctgggaaacgcccattggagtgttgtttttaacctctgtacaatgtttagacccagtaaatgcagaaatagaaacaaatggtcagaagacatatcgtgagagagagagagagttcacaaaacagaaaacaaagtaccttaatatttaccagtgaccaaaagatgtgaagcagcaaaaggtctcctgaccccattgccagctagactgtgtggaaactcggttcataccagccattctaggggtggggtgagttgttgtcatccttaggaaagtgtgttgttgtaggatcaaccacatccttcaaaaggactatgcctgtttataagcccagctgtttctgccctgtgaaacacggtaaggatattaatacaaagagaatacagctttatgataaaagatgctcagtgaaggatgaattagggatatactgagaatggggaaggaaactatcatctcagaagtcagcaggcagtaagcaagaggaggaatcaatatagcaacagtttggatcagactgtacagtttttttttgtttttctgagatggagtctcgctgtgtcacccaggctggagtgcaatgacgtgaccctggctcactgcaacctccgcctcccaggttcaagtgattcccctgcctcagcctcccgagtagctgggattacaggtgcctgccaccacgcccggctaattttttgtatttttagtagagacggggtttcaccgtattagccaggatggtctcaatctcctgacctcgtgatccatctgcctcgccctcccagagtgctgggactacaggcgtcagccaccgcgaacggctcagactatactcttatagccctctgaaatacgttttctaggtagagatagattgtgtaagggtacagttatgaggataacagaaacgtggcagattatttaaaatcatcctgaaagtggtgctttatctgatgaaagtgattgtaatccataggaaaatgtttcaacgtgcgcaagagttgcggtggcgggcagaggactaccacaaatgcaaaatcaccccctctgcaagaaagcctcttcgcaactgggtaagtttgtttgttttccttgcttttggacatagtctgccaggtcaggacatggatacatttttctccctacagctctgtgctcaagccctgcagagggagatggcagagaggaaggctgcctacaagcatcacagtcccatccctgttggtaaccgtgttgtgcaaaaacaccttcatccccacccagtggggcccctgatctaatattcaaagtgtcagaggttccatatttgtaatagcaaatgggccctgactgtaaattagtgaagagtgaatgtaacttattacccacagggacaattccaaatgaaggccttaaatgatgctcagctaagctggttcttgtgtggcctctgtaccttcaaaagctgccgagtcctatgattacacgtgatgggacttgtacacttgaagtgaaacagttttaaaacttgctttgtttagaattcccacctcatttttccatggacaaaagtattctttatgtcctagtgcacttacaatttggtattacctgggagtgaaaagaaatattacagccatgcctaactgacttcttgaggtaagattgttctgtcagaaaaccctctcccagttcccctgcagctcttcaggaatccacatctctgcagagctctttgttctcatgggtggcacctccagagtgaagaagatcctttatcaagaagggaaacaggggaaatgagatggtcctgcaggcagagctggaatcaacttccactctgcctcttgcaagctgtgtgaccccgggcacaatttctccttcctctggtaacctctgttttcttagatttggagcagggtggtcacactgaccttgcagagttccgagaatcagagacagaacataaaaggcctggaaaacattctccaaaaagaagctgcaacatgtgtggacaatgggcttttcatgcctctcttactgtctgttgacctggtgcaagaaacatgctctggtgatggctgtgagggaggaatgaggatagacatagacactcctgtgtctcaaacatgcctctttattactctgttatgactctgtcttccctggggcaggaccccagcctgcctacatttgcagacagacacagtggcatgtggagacaacagtgtgtcccaatgacttttctttactccccagctgtcggcagtactcagtggaagggtgatattatgacactgatactgctattttgaaacctggaggatggaaaggtgcaaaaatctatcaccagcaacagaaggtgcagaccgtgttggtggcggtaattttgtccatcaaatgaatatgtgtgaaaacattcccttcttcggccctacaggtcagaatggcggcagcggagcatcatcattcttcaggattgccctgctggccctacctcacagctgaaactttaaaaaacaggatgggccgccagccacctcctccaactcaacaacattctataactgataactccctgagcctcaagacacctcccgaatgtctccttcatccccttccaccctcagtggatgatagtatcaaggagtgtcctcttgctcctcttccaccctcagtggatgataatctgaaggagtgtctcctggtccctcttccaccctctcctcttccaccctcagtggatgataatctgaaggactgtctctttgtccctcttccaccctctcctcttccaccctcagtggatgataatctcaagactcctcccttagctactcaggaggccgaggcggaaaaaccacccaaacccaagaggtggagggtggatgaggtggaacaatcaccgaaacccaagaggcggagggcggatgaggtggaacaatcgcccaagcccaagaggcagagggaggccgaggcacaacaattacccaaacccaagaggcggaggttgagtaagctgagaacacgccattgcactcaagcctgggcaataagaataaatccgtgggtcgaaaaaaaaaaaaaaaaaa

SEQ ID NO: 28461 - DNA, 4218 bp, Homo Sapiens
gcacaagcagggatggcgtcgcttcagcgttctcgggtgctacgctgctgcagctgtcgcctcttccaggcgcaccaggtaaaaaagagtgtcaagtggacatgcaaagcttgtggagagaagcagtcctttttgcgggcttatggtgaaggctctggtgctgattgtagacgccatgtccaaaagttaaatctactacagggacaagtttcagagctgccactcaggtctctagaagaaactgtcagtgccagtgaagaagaaaacgtgggacaccagcaggctgggaatgtgaagcagcaggaaaaatcgcagccctcagagagtcgctggctgaagtatctagaaaaggactcccaagaactggagctggaaggaacaggagtgtgtttcagcaaacagccttcatccaaaatggaggagccaggcccccgcttcagtcaagacctgcctagaaaaaggaagtggagcgggagcaccgtccagcctccgtgcagccgtggcgtgcaggactcgggtggctctgaggtcgcctggggaccccagaaggtcagtgacaaacagtttctctctggtcccagtgaccactgagcgtgtgtgtgataattctgtcttttgtcacagttgacgaagtgtgtgattcctacccgcagaaagcccatcttcccacccgggtttcttgtcttttctgtctgaagccaactccttcctcgggtctgtacccccttttccctcccatgcctctcgtctcccatgagggtaactcaggaccaaagagcattgtgacccttggagaaactgaggttggccagcaggtcaacctgacgatgggtcagggccatcgtctcattctgcgtggagcacggggacctttgtccgggcaggagtcgtcagcgggccgccctgaatcctgggagatgcttccctccacactcgcatttgccctgctgtggactcttgtatgtgaggcactcttcacttagggtgttgtcttgttcttttttgttttctgagacggggtctcattctgtctacccaggctggagtgcagtggcacagtcatagcctactgaagcctcaacctcccaggctcaagtgatcctcctgcctcggccgccaagtagctgggaccacagatgcacaccaccacactggctaatctttaaaaaatattttgtagaggccaggcgcagtggctcacacctgtgatctcagcactttgggaggccgaggtgggtggatcacttgaggtcaggagtctgagaccagcctggccaacatggtgaaaccccatctctactaaaaataattagctgggcgtggttgtgcacgcctgtaatcccagtcactcgagaggctgaggcaggagaattgcttgaacctgagaggcataggttgcagtgagctgagattgcatcactgcgctccagcctgggcaacagaaaaaaaaaaattttttagagacatggtctcactatgttgcccaggcttgtctcaaactcctgagctcaagcaatcttcccacttcccaaagtgctgggactataggtgtgggccactgcgcctggcccatttgtcttgttcttgaagcttccagtccagcaggccccaccgcatatccagtgctgcagagtgcagggtttgctctgcctgtcagaggagccagggcacagcaagggcactgcagttgggagtccactgggcgtcagtcactgcccccacccccacatcagccaaggtcggtctccgctggccttgcaccacgcacagagcactggctcatgccaagaagcagaattcaaactttgatgttgccgccaactagttttgtgatcctgggtaagtaagtggctttgaatctccaaatcctagaagaatgaccagagagtctgccacgggccagtccctgggctgcatgttgtaatggtatcattgtgtttcatgctccctcaagcctgttgctttgttttaaaggtgaggaactgaggcttgcagtttttgtgcagtcatggcaagttcagtggcaaagccaacgtcaagtttcagggccgcagagcctcttctgtactgcctgggtggcagtgctgcagggacccactctatcgctgctttcacattgcttttccctttgtaagcagcacaacccaactgttgttttttttttttttttgagtaggagtttcactcttgttcccctggctggagtgtaatggcacgatcttggctcactgcaacctccgcctcccaggttcaaccgattctcctgcctcagcctcctgagtagctgggattacaggcacccgccaccacgcctggctaatttttgtatttttagtagagacagggcttccccatgttggccaggctggtcttgaactcctgacctcaagtgatccacccgcctcggcctcccaaagtactgggattacaggcatgagccactgcacccagccttttgtttttgagatggggtgtcactctgtcacctaggctggagtgcaatggtacaatcacacctcatagcagcctccatctcccgggcttaagtgatcctcccgagcagctgggatcacaggcactcaccaccacagttggctaattttttgtagaagagggggtttcaccatgttgcccaaactggtgtcaaactcctgggctcaagcaatctgcctgcctcagcctcccaaagtgctgggattcaggcatgagccactgctcccagcctacaacccaactttcttttttttgagacagagttcgctctgttgcctaggctggagtggaatggcgtgatttcggctcactgcaacctctgcctcccaggttcaagtgattctcctgcctcagcctcccgagtagctgagattacaggcgcgtgccaccacgccaggttaatttttgtatttttagtagtgatagggtttcgccatgttggccaggttgatctcgaactcctggcctcaggtgatctacctgccttggcctcccaaagtgctgggattacaggcgtgagccactgcgcccggccgacacccaactttcagagcatctttggttcctggggtgagagaagccagaccccagcaccagtcctatcccacagggagctcggtgctgccacctctgcagctgcagaacccggcaggctctggagagctgctccccggtgggaggtagcagaatggagccagcgcacccctttcccgatgtctcgaggcccttctgctcaaaattcttttgtaggcaccggtaacctgattctaaggtccccaggagatggatcacctgatgacatgagaatgtcttgtttttggaaagcctggtcatgcaatttagcagaaggtttgcggtgaggtggaaggcatttatttgctttgtcttgctaaccctcaaaatcaaagcctgtcccagcctgacagcttccagcagaaagtgtcagaaccagaggcccagccaaggcccaggcagggcaggcggtcctcctgggccctggcattgttcttacaaatggagggcatggccatcttctctttcagggacaggctggcctgacatggaaggtgaaacaaggcagcagcccctgcctccaggagaactctgcagactgcagtgccggggagctgaggggtcctgggaaggagctatggagtcccatccagcaggttacagccacatcctctaaatgggcgcgatttgtcctgccacctagaaaaagttcacatgtggacagtgagcagccaaggtttcttcagagggaccccaggccagctggtccagcacaggctaagcaagggacccccagagcacaggcctcaagagaaggcctcagcaggcccactgccgctgtccagcttcctcgggccacacaccccgtcacatctgggtctgagaggccttgcgggaagacctcatgggacgcaaggactccctgggcagagggtgggcccctggtcctggaggcacagaatcctcgacccacacgactatgtgacctctttataaccggggaagacttcgatgatgatgtgtgatctgggactggcaggttattaatcgagatacacttgttaggagggacagggttcccctaaggcacttttaaagatactctgtaagaaccattaacaataaacttactgtcaatcaaaaaaaaaaaaaaaaaaaaaaaaaaaaaaaaaaaaaaaaaaaaaaaaaaaaaagaaaaaaaaaaaaaaaaaa

SEQ ID NO: 28462 - DNA, 3734 bp, Homo Sapiens
agtctcgggcggcggtgtccggcgcgcgggcggcctgctgggcgggctggagggttagcggagcacgggcaaggcggagagtgacggagtcggcgagcccccgcggcgacaggttctctacttaaaagacaatgactactgatgaaggtgccaagaacaatgaagaaagccccacagccactgttgctgagcagggagaggatattacctccaaaaaagacaggggagtattaaagattgtcaaaagagtggggaatggtgaggaaacgccgatgattggagacaaagtttatgtccattacaaaggaaaattgtcaaatggaaagaagtttgattccagtcatgatagaaatgaaccatttgtctttagtcttggcaaaggccaagtcatcaaggcatgggacattggggtggctaccatgaagaagggagagatatgccatttactgtgcaaaccagaatatgcatatggctcggctggcagtctccctaaaattccctcgaatgcaactctcttttttgagattgagctccttgatttcaaaggagaggatttatttgaagatggaggcattatccggagaaccaaacggaaaggagagggatattcaaatccaaacgaaggagcaacagtagaaatccacctggaaggccgctgtggtggaaggatgtttgactgcagagatgtggcattcactgtgggcgaaggagaagaccacgacattccaattggaattgacaaagctctggagaaaatgcagcgggaagaacaatgtattttatatcttggaccaagatatggttttggagaggcagggaagcctaaatttggcattgaacctaatgctgagcttatatatgaagttacacttaagagcttcgaaaaggccaaagaatcctgggagatggataccaaagaaaaattggagcaggctgccattgtcaaagagaagggaaccgtatacttcaagggaggcaaatacatgcaggcggtgattcagtatgggaagatagtgtcctggttagagatggaatatggtttatcagaaaaggaatcgaaagcttctgaatcatttctccttgctgcctttctgaacctggccatgtgctacctgaagcttagagaatacaccaaagctgttgaatgctgtgacaaggcccttggactggacagtgccaatgagaaaggcttgtataggaggggtgaagcccagctgctcatgaacgagtttgagtcagccaagggtgactttgagaaagtgctggaagtaaacccccagaataaggctgcaagactgcagatctccatgtgccagaaaaaggccaaggagcacaacgagcgggaccgcaggatatacgccaacatgttcaagaagtttgcagagcaggatgccaaggaagaggccaataaagcaatgggcaagaagacttcagaaggggtcactaatgaaaaaggaacagacagtcaagcaatggaagaagagaaacctgagggccacgtatgacgccacgccaaggagggaagagtcccagtgaactcggcccctcctcaatgggctttcccccaactcaggacagaacagtgtttaatgtaaagtttgttatagtctatgtgattctggaagcaaatggcaaaaccagtagcttcccaaaaacagcccccctgctgctgcccggagggttcactgaggggtggcacgggaccactccaggtggaacaaacagaaatgactgtggtgtggagggagtgagccagcagcttaagtccagctcatttcagtttctatcaaccttcaagtatccaattcagggtccctggagatcatcctaacaatgtggggctgttaggttttacctttgaactttcatagcactgcagagacctttaaaaaaaaaatgcttcatgaatttctcctttcctacagttgggtagggtaggggaaggaggataagcttttgttttttaaatgactgaagtgctataaatgtagtctgttgcatttttaaccaacagaacccacagtagaggggtctcatgtctccccagttccacagcagtgtcacagacgtgaaagccagaacctcagaggccacttgcttgctgacttagcctcctcccaaagtccccctcctcagccagcctccttgtgagagtggctttctaccacacacagcctgtccctgggggagtaattctgtcattcctaaaacacccttcagcaatgataatgagcagatgagagtttctggattagcttttcctattttcgatgaagttctgagatactgaaatgtgaaaagagcaatcagaattgtgctttttctcccctcctctattccttttagggaataatattcaatacacagtacttcctcccagcattgctactgctcagcttcttctttcattctaatccttgctattaagaatttaagacttgtgcttacaatatttttgacctggagtggatctatttacatagtcatttaggatccatgcagctttttttgtctttttaagattattggctcataagcatatgtatactggtttatggaactttatttacactcctctatcatgcaaaaaaattttgactttttagtactaagcttaatttttaaaaacaaaatctgtagtgttgacaaataaatagttgctcttctacactaggggtttcacctgcaggtttgacacgcagttgctcgcttttcctgccctgtcaagcttctctgttctggcgtgagttgtgaaagagttgaagacagcttcccatgccggtacacagccagtagcctaaatctccagtacttgagctgaccattgaactagggcaagtcttaaatgtgtacatgtagttgaatttcagtccttacgggtaaacagattgagcatggctctctattccctcagcctaagaaacactcatgggaatgcatttggcaacccaaggaaccatttgcttaaacctggaacatctcacctttttaaatcctaaaaaacactggcagttatattttaaattagtttttatttttatgatggttttatcaaaagacttttattattagattgggacccccttcaaacctaaaaatcaagttatttccttttataatacttttcttccccatggaacaaatgggatcaatttgtgagttttttcctttaatgataactaaaatccctctaatttctcatttatgcttttgtcttttttatgaaatatttcttttaaaagccccagtctcacctacgaaatatgaagagcaaaagctgattttgcttacttgctaaactgttgggaaagctctgtagagcatggttccagtgaggccaagattgaaatttgatactaaaaaggccacctagctttttgcagataacaaacaagaaagctattccaagactcagatgatgccagctgtctcccacgtgtgtattatggttcaccagggggaactggcaaaagtgtgtgtggggaggggaagggtgtgtgagtggttctgagcaaataactacagggtgcccattaccactcaagaagacacttcacgtattcttgtatcaaattcaataatcttaaacaatttgtgtagaagtccacagacatctttcaaccaccttttaggctgcatatggattgccaagtcagcatatgaggaattaaagacattgttttttaaaaaaaaaaaaaaaaaaaaaaaaaaaaaagaaaaaaaaaaaaaaaaaa

SEQ ID NO: 28463 - DNA, 3655 bp, Homo Sapiens
gggagcttcctctccgcctccttcgcctagcctgcgagtgttctgagggaagcaaggaggcggcggcggccgcagcgagtggcgagtagtggaaacgttgcttctgaggggagcccaagatgaccggttctaacgagttcaagctgaaccagccacccgaggatggcatctcctccgtgaagttcagccccaacacctcccagttcctgcttgtctcctcctgggacacgtccgtgcgtctctacgatgtgccggccaactccatgcggctcaagtaccagcacaccggcgccgtcctggactgcgccttctacgatccaacgcatgcctggagtggaggactagatcatcaattgaaaatgcatgatttgaacactgatcaagaaaatcttgttgggacccatgatgcccctatcagatgtgttgaatactgtccagaagtgaatgtgatggtcactggaagttgggatcagacagttaaactgtgggatcccagaactccttgtaatgctgggaccttctctcagcctgaaaaggtatataccctctcagtgtctggagaccggctgattgtgggaacagcaggccgcagagtgttggtgtgggacttacggaacatgggttacgtgcagcagcgcagggagtccagcctgaaataccagactcgctgcatacgagcgtttccaaacaagcagggttatgtattaagctctattgaaggccgagtggcagttgagtatttggacccaagccctgaggtacagaagaagaagtatgccttcaaatgtcacagactaaaagaaaataatattgagcagatttacccagtcaatgccatttcttttcacaatatccacaatacatttgccacaggtggttctgatggctttgtaaatatttgggatccatttaacaaaaagcgactgtgccaattccatcggtaccccacgagcatcgcatcacttgccttcagtaatgatgggactacgcttgcaatagcgtcatcatatatgtatgaaatggatgacacagaacatcctgaagatggtatcttcattcgccaagtgacagatgcagaaacaaaacccaagtgagtatgcttcacctgtatttgagccttttcttgcattcaacccaggatttattaatttttctaaattcatgaatagcattgttgatgcctgctcgatattacagctgactgtagggttggagttgatgttatcatgttctcccaagctttcaatatccgtaggttgatagacgtctgatggataaaattgtgcctagttgttttgtagagaagaatgtcaaactcttattcttcttgagtaggctctattatttgaatctctggagttattaccagctcattgcttcaaaattaagttgaggaattcaagaataatttattttagtaaattctatttaagatgtttaagaatttgaactgccaaaaatctttcctctccacagaggttgtttctttaatattaacacaaagtaagtgaccttcaggtcttattggaaactcagagtaatatggccttgcctggaattgcaaatttccttagttttgaaattttcatagatgtctttggttcttggttgtaactgttgactgagaagagccatttacattttttgataccaacagggcaaagctttttacttaattacctctaccaggctttaagggaaatctgatacttcagcatgtgttaaactataaaatacctactccaagtatctgcccagttccttgtcccctctccccaggcccttaaaggaagttctcgatacatatttgtagaataactgaatgttttcaggattcctgtactttgctgagttaaaatggatatggtacccttgctgattggttgagcccctaagagggggcagaatattaaatattccatatcagatatgcttttacaggtttgactttagaaaagtcttagcatgtgaagcctgttggataaagggctgtgtttgcatttaatctgtcacttttgtatctcctgtcctggctggccattttgatctcatgctgttctttttttcttttgaacttgtaggtcaccatgtacttgacaagatttcatttacttaagtgccatgttgatgataataaaacaatccgtactccccaatggtggatttattactattaaagaaaccagggaaaatattaattttaatattataacaacctgaaaataatggaaaagaggtttttgaatttttttttttaaataaacaccttcttaagtgcatgagatggtttgatggtttgctgcattaaaggtatttgggcaaacaaaattggagggcaagtgactgcagttttgagaatcagttttgaccttgatgattttttgtttccactgtggaaataaatgtttgtaaataagtgtaataaaaatccctttgcattctttctggaccttaaatggtagaggaaaaggctcgtgagccatttgtttcttttgctggttatagttgctaattctaaagctgcttcagactgcttcatgaggaggttaatctacaattaaacaatatttcctcttggccgtccattattttctgaagcagatggttcatcatttcctgggctgttaaacaaagcgaggttaaggttagactcttgggaatcagctagttttcaatcttattagggtgcagaaggaaaactaatgagaaaacctcctaatatcattttgtgactgtaaacaattatttattagcaaacaattgatcccagaagggcaaattgtttgagtcagtaatgagctgagaaaagacagagcatatctgtgtatttggaaaaataattgtaacgtaattgcagtgcatttagacaggcatctatttggacctgtttctatctctaaatgaatttttggaaacattaatgaggtttacatatttctctgacatttatatagttcttatgtccatttcagttgaccagccgctggtgattaaagttaaaaagaaaaaaattatagtgagaatgagattcatttcaatgtaatgcactaaagcagaacacgaacttagcttggcctattctaggtagttccaaatagtatttttgttgtcaaactttaaaatttatattaatttgcaaatgtatgtctctgagtaggacttggacctttcctgagatttattttatccgtgatgtattttttttaattcttttgatacagagaagggtcttttttttttttaagtatttcagtgaaaacttggtgtaagtctgaacccatcttttgaaatgtattttcttcattgcaggtccacctaatcatcctgtgaaagtggtttctctatggagagctttgtttgcttcctacaaatacatgcttattccttaagggatgtgttagagttactgtggatttctctgttttctgtcttacaagaaacttgtctatgtaccttaatactttgtttaggatgaggagtctttgtgtccctgtacagtagtctgacgtatttccccttctgtcccctagtaagcccagttgctgtatctgaacagtttgagctctttttgtaatatactctaaacctgttatttctgtgctaataaacgagatgcagaacccttgaaaaaaaaaaaaaaaaaaaaaaaaaaaaa

SEQ ID NO: 28464 - DNA, 1590 bp, Homo Sapiens
agcagtggtatcaacccagactggccattatggggggacttcctgcgggaaacatggcggcattgagcggagtccgctggctgacccgagcgctggtctccgccgggaaccctggggcatggagaggtctgagtacctcggccgcggcgcacgctgcatcgcggagccaggccgaggacgtgagggtggagggctcctttcccgtgaccatgcttccgggagacggtgtggggcctgagctgatgcacgccgtcaaggaggtgttcaaggctgccgctgtcccagtggagttccaggagcaccacctgagtgaggtgcagaatatggcatctgaggagaagctggagcaggtgctgagttccatgaaggagaacaaagtggccatcattggaaagattcataccccgatggagtataagggggagctagcctcctatgatatgcggctgaggcgtaagttggacttatttgccaacgtagtccatgtgaagtcacttcctgggtatatgactcggcacaacaatctagacctggtgatcattcgagagcagacagaaggggagtacagctctctggaacatgagagtgcaaggggtgtgattgagtgtttgaagattgtcacacgagccaagtctcagcggattgcaaagttcgcctttgactatgccaccaagaaggggcggggcaaggtcactgctgtccacaaggccaacatcatgaaacttggggatgggttgttcctgcagtgctgtgaggaagttgctgaactgtaccccaaaatcaaatttgagacaatgatcatagacaactgctgcatgcagctggtgcagaatccttaccagtttgatgtgcttgtgatgcccaatctctatgggaacattattgacaatctggctgctggcctggttgggggagctggtgtggtccctggtgagagctatagtgcagaatacgcagtctttgagacgggtgcccggcacccatttgcccaggcagtgggcaggaatatagccaatcccacggccatgctgctgtcggcttccaacatgctgcggcatcttaatcttgagtatcactccagcatgatcgcagatgcggtgaagaaggtgatcaaagttggcaaggtgcggactcgagacatgggcggctacagcaccacaaccgacttcatcaagtctgtcatcggtcacctgcagactaaagggagctagagccctttatttcttccaaccttgcaaggaccacactcctcatacccttcagtgcagtgtaccagggaagagaccttgtgcctctaagcagtggaccatggtcaccttgctgggtagagcctaggttgtccttgggccggcttccttaggggacagactgttgggtggtgatggggattgttaggatggagcccaggccacatggatgatgatgattctcccccacaggttcgaacctctgacatgggtggctatgctacttgccatgacttcactgaggctgtcattgctgccttgccccacccataggccctgtccatacccatgtaaggtgtccaataaagaacatgaaccaaaaaaaaaaaaaaaaaaaaaaaaa

SEQ ID NO: 28465 - DNA, 6346 bp, Homo Sapiens
gaagatgctgggggaggcagcctggtgcttcttaagctaacgcggatcacggcgctcaggagctgctcaggcacaaccccgcagagttcctccagcgtgagagccttggaacggttggaaagtgcctttttatttctctaaaccccttccttagttgaccttcgaaaatgattggcgtgaatagtgtccagagtgccagcaaggtacgggtgaggacctcaggttccgtgaaatactcccgggaggattctatccggcggcagtctcacaggtcaaagtccatgaaaatttccaactcctcagagttttctgctaaggagaacaaggctctgtacaactcaatcaagaatgagaagcttgaatgggcagtagatgatgaagagaaaaaaaagtctccctcagaaagtactgaggagaaagctaacggaacacatccaaagaccatcagtcgtattggaagtactactaacccatttttggacattcctcatgatccaaatgctgctgtgtacaaaagtggattcttggctcggaaaattcatgcagatatggatggaaagaagactccaagaggaaaacgaggatggaaaaccttttatgctgtactgaagggaacagttctttacttgcaaaaggatgaatacaagccagaaaaggccttgtctgaagaggacttgaaaaacgctgtgagtgtgcaccacgcattggcatccaaggccacggactatgagaagaaaccaaacgcgtttaaacttaaaactgccgactggagggtcttgctttttcaaactcagagcccagaggaaatgcaagggtggataaacaaaatcaattgtgtggcagctgtattttctgcaccaccatttccagcagcaatcggctctcagaagaagtttagccgcccacttctgcctgccactacaacaaaactgtctcaggaggagcaactgaagtcacatgaaagtaagctgaagcagatcaccaccgagctggccgagcaccgctcatatccccccgacaagaaggtcaaagccaaggacgtcgatgagtacaaactgaaagaccactatctggagtttgagaaaacccgctatgaaatgtatgtcagcattctcaaggaaggaggcaaagagctactgagtaacgatgaaagcgaggctgcaggactgaagaagtcgcactcgagtccttcgctgaacccggatacttctccaatcaccgccaaagtcaagcgtaacgtgtcagagaggaaggatcaccgacctgaaacaccaagcattaagcaaaaagttacttagagtccatctgcggccaggaagtgctggtcatggagcaaaatagggtttttcaagatctttctggtaatccgtgaatatatttaaaaaaaaaaaagtctgtgacaaaacggtgcattagtaattttttctattgtatatttttgttagtttctgtacagattgtctttgctcttgatttcttttgctttgatgatttttgcaacttgatagctaatgcaccttttctgtgaggaggaggggatcgtgatttcagaatgaattatgtatcccttctcttttggttttctcttgtttgcagtctgctcagttgttttatgtattctcatatcaactgttaaacttttttttaaggttaaagaatttaatccattgtgaaacacttaactggacaaacagtagttttagtaaattctagctggagttaatatacgcctttatatgtgaaatcttgcccagtcacagaggtagaattgagcactcacagatgctccagtaagaatcacagtgctgggaatctagttgctccaatatgaggcagcttcatgtgcagcttagcacttgttgttgagatcggaccctgctggaagcagggaaaagaagcgtgaagatcgtaggattgagaacttagggaagcacattagcttgcttgaagtgctgattccatttcagccaagcaagggaaagaggaagtggagtcattttgcctttgaaggctgaggaaagattgatacccagttaattttgtttgctaaaggatgggggcaataatcggcccttgaggagctgcagcagtaggcatgtgctcagtctgcaggaattgttacctcactcccacagggtctagactagaaatccatcatctctatcgttgatatccttccatccaggaatagatttttcttactctacatatgtgtgtgtgcgtgcgtgtgtgtgcgtgtgtgggcatggggttgtgtcctggttgtgatattgaggtcttccttcctaacaaattaatactaaaatgaaacagcttttcttgtgtccttaagacaaaataaggaaggaaaacgtagctgcagttgtccacgatggatattggttctttaaaatatatctgaaagtagtagtcagaatgaattatggttggaaaactgaggaatcttctggttgcaggtgcaaagtgactttgtttattcttgtctcagtctccttgatagccacttcactctgctactactcaactttctcctaaaaatacttcatctattttcagtcctttctttctgtctactcaaaatggttctattaactttgcagtcatgagcttgttccagttacagtccctttgaagttcagggtgataaacagaatattcttctgtagaggaagagaaaggagtgaaagtttagcccactgagacctagagctttgtgatttcctaaccttgaaactctgtaatccctaaagttaaaatctccgcaagtggcacaacttcagaactaatagtatcactttgatttttctttttcctcccttagaaagtttctctagttctatagtttatttgttgaaggtactatgaccaaagaatcagctgctctacaggaatagcatggttccagtgaattagagaaaacctgctgtaaagccatggtagtgtctaagtggtatgttattatgatgtactagcatttatttacagaattatttattaacgtttacttccttcccctctgtaaatgtccatgactattgcccagagaaggcttacccctctctagggttgcagttgctttctttgtaataagtattttgccacacctgtaaaaaaaaaaaacctcacttttaactctctgccttgtttgggtaaaggcagtaactaagtttatgtttcagaactgcaaaacaaacaggatagttaccaatatggcccatgtgtcagattgatttttgtagcctctcactgaatccaacatatccacaagcaagttatctgtctttctacctgataatctaaattatcaggatatttgttttctgcctaaatgtttatactaagccgaggggagagaggtacctagaccatgtcatctacgagcttcagtaactaaagaaaaaggaacttccctgagtggcttgaatgtgtttgcccacagtctatatctatgtatatagaatgtctgtatgtattttacttatttaatatacattgaatggtaccttgctacagtatttctgacatttagagtagtgttgaaatactcggctagcatcagcaccactatagcactgtccgtgtcatatgagtcactaatattaactccagggacttctggataggctaatagatcattggatacgaagggctcttttgaagcttcagtataccatgtttgcatagtttatctttaaaaacaactttaaaggttcttttgtgagccaggatctcagactgccgtagcatgatgctgtccatctttagcgcatgggctgagaacacctcttccctgaggcttctgaaggttgctgtctgtcatgagtgcatgaaggaggccaagagtttatgctatgggaggaaccagtcactgatttgcctagattctgagagtctggcccatagccaaccacattttcctttgggataatttatttcctgtggcatctagccagaagaaattgaggatgtttcctttcacagctgctccaagcctgttgcccaattcacggtacaagggagcaccccttccctttcctctgaaggtacgccacccacctccgtcgcccacctcagcgcccaggagccttgggacttccttccatatgataaatcattcttcttcacgtcaatacacttcatattaatttctagtacagaaaatcttgacagctatcagaatgccttggtcatagtgttgttgcaaaattgaccatacaggtggcccatgtataaaatctgaattttaggggtttgtccccacctcgcacgctggcttttacagggaggtgtctgggattcctcattagcaatcaaaacttaattactgggatgcagagtccttactttatcgccagcccgtaggcatttctgaagtgcacttttttgaaacatcattttgctaactctcagcagtgtctaattaaactgagcaatacttttgtgaattttaattaatctcagcaaaaccatgatgggagagagtcctctgatggaaatgtagtccctggattatgtgtaacctttttattgctcttagatgcagaggatagaaagcattttttggtgcagtggtcttgtggcaaacacaagaccctctatgcgtctccaactgttatcctaatctagaaaatgaggactggcccctgggcaaaagtgacatgaggaatttactctggaagaggaaaatctgggtggctttccaaggctaagataggtttgtatttcaccctgtggccaagctacagaacttctgagattgtggaagaatttttgcaaccagcagggaaagaggcctcttactgcctaaacacaaagttacactgagcttttctactgtcctttgcctattgctccctctatcatgtaaagatctgggaaggatgagaggcagggcctgcttgtcatgagctgcactcttttctttttaactaatcattgacaattggaagaaaattgacgttaaagaagtttctccattgtcttactaacaaaaccttttgggtttcattaattgtccttgaaattgagttcctttggcatttttccttgcagtcatcagttaagcatgttgcatcctgaattcacagaagtttagctttgcaggtttgaatctctgtaatttaactcccgtggacttggtcgagttttcagcaggttgggagccacctctcttcatttcagcagtgagtcatcccttgacttttcaaatgacagaattttttccaattgtaaaattagcactgtaaaacaaagaaccaaagtggcatcctaagagttgttaaacctgaagtctagtttatgaggaattgtccaagttggagtttaaatagtatctgcttttgtctcaaagcatctaagttattctgacagaaaatggtaagtcagctttgcaggcagatgcgcctctgggcctcctaccttgctccacagctttctggccatcttgtctcccaggccatgccactgctctgccacatgtcagcaaatttctttccaccagtcttatagcatcttacatgatcaaatcatcacagaataaccccgtgatagattattgatagcaatagagaggggcggctttgtcactgatttttctctcagattccttttccatctctcatccataaaggaaggactgaaatccaaaggcattctccttttgtacctacagtatccagaacccacgtgggcagccttctgcttatgacaataattggcccattgcatgcagagagaatgtcttcatagagagaatgtcattaaatacttgaatctgcatgacagtttgacttgaatgcaacagcaggaaaattttgcaagttacataattgtatatacagtaggttttcttaagtctcttcggttcatcctttgtaatttgtgtgtgtatctgtagtattgcaggcttttggagactattcttacaggcagtatgtcagtcatcaaagaaaatgctgtcacctgccattgttgtatttgtgggtatttatagttgtatgtatgtaaatgcatcagtgtgtagattgcatatcagtgtatggtacatgtacatcaaaattatttttgtccttaatcagtgtgatatgaaaagcaagtacaacctcataggactgattatataatgaagttgttgagagtatatatagtggtattgttttattaaacttaaactcaaataatattttgattaaaatttttaataagactttatgctagaaaattctttgagctttgaatcaccagggcaaaaatgactttcaactaaccttgtgaatcttttgcagtgtactgtgtgcaataccaagggcatagctccctgtaatttggggaatacaaaaaaaaaaaa

SEQ ID NO: 28466 - DNA, 4365 bp, Homo Sapiens
gacgctgaggcggcgagggtgagtcggcgccggccgctaccgcacttcgggcgctcgtccctcatttctctgtggtgaatggcgacgggatggagcgcgaggggagcggcggcagcggcgggtcggccgggctcctgcagcagatcctgagcctgaaggttgtgccgcgggtgggcaacgggaccctgtgccccaactctacttccctctgctccttcccagagatgtggtatggtgtattcctgtgggcactggtgtcttctctcttctttcatgtccctgctggattactggccctcttcaccctcagacatcacaaatatggtgcagctattgctggagtttaccgagcagcagggaaggaaatgataccatttgaagccctcacactgggcactggacagacattttgcgtcttggtggtctcctttttacggattttagctactctatagcatacatccttatgctgagatgttgaacttaaactttatggaatcctccaaaagaatacattatggagtgtagtgttttcttagttcttcaaagggaagcaacttggatgaacaggaacatgaaggacaacacatctcagccttttcttcattttgaagctcctagaattgaagacttatgtggactcctattgttctcaaccaaaacaagtcttttggctttcttttttgtagatatttaatttaagcagttttcatgtgtacctttacccaagccaagtcaacagtgtctctggggtggcatcctttgcactgaaatttacagtattctgtgagatgtcgcatattttgaagaaaccgtggaagatactggtttatttcaaatgagcagagtatgttgtattaaaatcttatctaatcttgattaaaatttggcaaactcttttctttgctacatcttagtgacaataaatgccaaataggttttggttgagtatagttttgaaaacaaatttggtgaaataaagcaggaaaaaaaatttaagtataactcaagtagtggctttggttccactgtttataaataaaaagtagataacaatgaataatgtgacattttctggacaactgtcttgacttctgattaagatattttaagagatgtgaatttgttattttgtatgttttatcaaaataagctagctaatttagactttttagattttctgtaccacctttccctatcacttttaattctcttaattttatttcatttaattggaaacatacataccctattaaatggcttgagttggaaattttaagccagatttgtttggacattgaggcacacataagatactttaggcattctgtcatagtttttcttagtgactttggtatactaatgacccttgagaaactatagaagtgcatctgaaactagagttagtggttattgattttttagcttaatgtgtttacctagtggtaactcttcagcccacttttacagtattgggtatcaactcccagaaagtgcctaaagtttaatgttcagatatgtacccactctcccctttacatttttattcaaaagaatttatatctttaaagagatttaaatatcaagagtttttttaaaacttaattttagctatttaaatttttattctactgcctaactttctttttcattaaaaggcctgaaaactgtgactctttgagagggaaagaatcgcagaaattaagtatttaatgtgatcctttccacctaaactgttttgtatggaatacaatcagtgtggtggtagtggtggtggttatctgcaaaatagtttctggtgattaaatctgactttttttttttttttcttttaaatgagacggagcctcactgtgttgcccaggctggagtgcagtggtgcaatctcagctcactccaacctctgccacccgggttcaagcgattctcctgcctcagtttcctgagtagctgggattacaggcacctgccaccgtgcccggctaatttttgtatttttagtggagataggtttcaccgtcttgcccagcactttgggaggtcgatgtgggaggactgcttgagcccaagagttcaagactggcctgggcaacatggtgagaccttgtctctactacaaaataaaaaaaaattagctgggcgtggcctcagctacccaagaggctaaagtgggaggatcacttgtgcctgggaggttcaggctgctgtgagcagagaccacgccactgaactccagcttaggccacagggcaagaccctgtcttaaaataatattactaattttggtaattaacttatcaaaactatagtgacatatacacgggcagaaacttataggtagagttgtaatgcagccaaatattcttacaaattccctaacaagaagctcaaatctttctcacaggcaaattgtaaaaattctagttttttgtttaaagagctgtgattttcaaaagtatcccttcagtttaagaaatctggggaattggtaacttttcttatgggaaatgattgccatcatctctactgaaggatgcctcttactgaaaaatgtcttttgaaggagttcttgcctaaagcattctttggatgtaatttcatacactaaacatatagaccagtagttagtgggcccctcctcttaaacagtaacttttgaagtactgatacatgattaaaatgttagatatttttcactggagctaagacttaaaattagggcattttgaaaggtgtatttgtttctgtttcttgtttgatatattttggttatctactcttttaaaaaaactaaacgtataaaaggtatcttcaaattactgagtgtttcatccatcccagtaggtgaagtattctccagtgaataaatctatatatatatatagattttaaatagcttgagcggtgtagcttgaaatgttttcagggaaagactatttgaatcataaggaatagctttgattttcttttttatgtctcaaatatagaattatttgggggtggtcactcagatggaagaatattggcaattgtgttgaacattctaccttatatagttttgagaatttttgccaaaaactgatttcttagaaatatcctcccccagctgtgctttggttttttggtttttttgttttgagacggagtcttgctctgtcgcccaggctggagtgcagtggcatgatctcggctcactgcaagctctgcctcccgggttcacgccattctcctgcctcagcctcccgagtagctgggactacggacgtccaccaccatgcccagctaattttttgtatttttagtagagacggggtttcaccgtgttagccaggatggtctcaatctcctgacccgcctccacctcccaaagtgctgggattacaggcatgagccaccacacccggcctctgctttgtttttttaaaaaaaaagaaatgcaagagagggagggaggcagcctcctgaccataaaagctgatttcttgatttttttttcttttttttttgaaatggagtcttgctctgtctccaaggctggagtgcagtggcatggtctcagctcactgcagcctccgtttcctgggttcaagtgattgtcctgccttggccgctgagtagctaggattactggcacccgccacaaggcccagctaatttttgtatttttagtagagacagggtttgattatgttggacaggctggtctcaaactcctgacttcaagtgatccacccgcctcggcctcccaacgtgatgggactatagacatgagccatcgtgcttggccttcttgattcttgaatacggggttttgaggtgaaagcatttcatgaaaacttaagttcatacacaagagcatcatgaatattctaaaagaggtatctgtgctttttttgtgaccacaaaatattacttcttatgaaatgtttacactaggtgaggaaaagttcattaattacctttaaaccgttccttattttttttaagattttaaattgtattttggcttttgcctccagtatcctttctggttgctctggtttgaattaagttcctattatgctgcagcacatatcaaccttccctaagtaaccatttcctggaatgtgaagcatcggtgccattagcagaccatatgcagaaatgtcgtgtacttgcatttcttttttgtgcactctataaggctggttgtgactcagatcagcttaactttttatattatgttatttcactaactgctacagtcaaaatgatcaaatctttgtacaatagaaaattatttaaattttatttttctactgacatttctaattctagtgtaaatgtttatcaataaaaaattacttaaaaaaaaaaaaaaaaaaa

SEQ ID NO: 28467 - DNA, 2241 bp, Homo Sapiens
ccgggtgctcagccccaacacagtggcagtccaatgggctgaggacagaagcaactgctgctctcatctgccttccatctggtggacctaagcctaatccctgggacaaggatggtgggtgccaaggccggccccagccccggcacctccctgggcctggcacagcagcacagcggaggcagcagtgtcctagtgaaaagtcccttctgtcagcaagtctccacctcgctgccttgcatctgctctactcccaggtgtgctgctgtgggcctgctccttgtgccagctgctgccactctaggtggccctctctcgccgcatccacttgcagccgcctgttctacatcctcctccatgtgggggcctcagcaatctgctgcctcctgctgtcaaggacagtagtggaaagggtgtggggcaagacacacaggatccagatgccctcggggttgtgtgcccacctgtttggcctctctgactgtccagtgctcagtggctctggggctgtgtaccgagtatgtgcaggaaccgccaccttccacctgctgcaggctgtgttgctggtccacctccactcccccaccagcccgcgggcacagctgcataatagcttctggctcctcaagctgctgttcctgttaggtctctgtgctattgccttctgcattcctgatgagcatctcttcccagcatggcattacattggcatctgtggaggctttgcattcatcctactgcagttggtgcttattacagcttttgcccattcctggaacaagaactgagcaaccccgctctggcctcctacaagcttctgtcatcagctgctatatcatgtatctgactttctctgcactgtccagccgtcctccagagagagtaatccttcaaggacagaatcacaccctgtgcctgcctggcctgagtaaaatggaaccccaaacaccagatatctctctagcaatgctgagtgttagcatcatgtatgcttgtgtgctttttgcttgcaatgaggcctcctacctggctgaggtatttggacccctgtggattgtcaaggtttacagctatgagtttcagaagccctcactgtgtttctgctgccctgaaacagtggaggcagacaaagggcaaaggggtggggctgcgaggccagctgaccaagaaacccctccagctcctccagtccaagtccagcatctttcctacaactattctgccttccacttcgtcttcttccttgcctcactctatgtcatggttacccttaccaactggttcagctatgagggagcagaactggaaaagaccttcatcaagggtagctgggccaccttctgggtcaaggttgcctcatgctgggcctgcgtactcctctatctggggctgttactggcaccactctgttggccccccacccagaaaccccagccccttatcttgaggcgccgccgccaccgcatcatatccccagataacaaatatcctccagtctaagtccttttcacaaactggggttcccctgacattgtactcctagagttggctcaaggggagctgtccagcccagctcaatacctcaaggacacacagggagttatctccgtttgggctgaagtcaatactatgaactggaagaagtggtcaaacacagtctaatgtgctgggcagagtgtctgactcactggagctactgttacatctgcatcccagctcaagagcctaacacccaaatcagcagctcaaagaaccaccgctgatcccagcagacagtgtggcaccagccctttcctggctcttgggctggaagtgggagtggggaaagaccaacagggactgaagactcggctctgcccttggagaaaggaaaataaggagttcagccctgggcacacggatataagaagcccagaaccacagaacaaaccagggcatagaagaaaggagcacagaggctaccccaggttttaatcctgattttgaggtcaagggaagcgggaagacaaaaccaccctcattccatgaggaatgacagaagagaaagtgaacgcttgacagcagctgaccacgggaagtcggtgagcagcaggatttttttggccaactttcaagcagacgaacaaactgaggaagaatgaggaaaagaggcataaacacagatcttgcagcattcactcttaggccaactccatcctagagatggtgttcaagggtggggaacaaaaaaaaaaaaaaaaaaaa

SEQ ID NO: 28468 - DNA, 7751 bp, Homo Sapiens
caagttatttatactcttcagaaagctgttaactgtacacaaaaagaagctattggttttgcaactacagtagatcgagatgggcgtaggtctgttcgatatggagattttcagtattgtgagcaagcaaaatcagtaattgtgagaaataccagtagacagacaaagccactcaaagttcaagttatgcattcgtctattgtcgcacatcagaattttggtttgaaacttttgtcttggctgggaagtattattggatattcagatggccttcgccggattttatgtcaagttggtttacaagaagggccagatggtgaaaactcttctctagtggacagactgatgcttagtgattccaaattatggaaaggtgctaggagtgtatatcatcagttgttcatgagcagtctgcttatggatttgaaatacaagaaactatttgctgttcgatttgcaaaaaattaccagcagttgcagagagattttatggaggatgatcacgagcgagcagtgtcggtgactgctctatctgtccagttcttcaccgcacctactctggctcgaatgctcatcacagaagaaaacttgatgagcattatcattaagacttttatggatcatttgcaagcctggttaacattttgcagtcagatgtcatgttgtgcatcatgggaacaattctgcaatgggctgtggaacataatggatatgcctggtcagagtccatgctgcaaagggtgttacatttaattggcatggcactacaagaagaaaaacaacatttagagaatgtcacggaagagcatgtagtaacatttaccttcactcagaagatatcaaaacctggtgaagcgccaaaaaattctcctagcatactagctatgctggaaacactacaaaatgctccctacctagaagtccacaaagacatgattcggtggatattgaagacttttaatgttgttaaaaagatgagggagagttcacctaccagtcccgtggcagagacagaaggaaccataatggaagagagttcaagggacaaagacaaagctgagaggaagagaaaagcagagattgccagactgcgcagagaaaagatcatggctcagatgtctgaaaggcagcggcattttattgatgaaaacaaagaactctttcagcagacattagaactggatgcctcaacctctgccgttcttgatcatagccctgtggcttcagatatgacacttacagcactgggtcccacacaaactcaggttcctgaacaaagacaattcgttacatgtatattgtgtcaagaggagcaagaagttaaagtggaaagcagggcaatggtcttggcagcatttgttcagagatcaactgtattatcaaaaaacagaagtaaatttattcaagatccagaaaaatatgatccattattcatgcaccctgatctgtcttgtggaacacacactagtagctgtgggcacattatgcatgcccattgttggcaaaggtaatgtatattcttaatatttgtcaagagaagtttatctaagggctcaatattttttaaatagaggaaatttcattctagaaaaaaggaaaagaactaaaaatgttgaaaaaatccgtatcattgcctaataaataacaaaagttatttgccttgtcatagatgtaaagtgtatgtcagatatgttttttaatttagctttatatccaagtctcttctatatcttccaaagaaggaagtggatctgtatcagtctgtggatgaagaaaagggtttttacagtaggataaactctagaagggtaatgttgtctttctttgggtccagggtggacaacttttgattccatagatgttagtacttgctttgttacctcccaaaattgtaatggctccctgtgatgagatgtcctgaatttgttctaccttggtgtttcctatgtttctacaaaaccaacaaatcaataataccattattctagaactatgctcacccagttatcatgaactacccctaacaactagccaccacattgtagtcccagctacttgggaggctgagacgggagaattgcttgaatgtgggaggtggaggttgcagtgaaccaagattgtgcaactgcactccagcctgggcgacagagcaagactccatctcaaaaacaacaacaacaacaaaaaaaaaacaaatagccaccagccttggggaagtggcaagagaacaatgacaccaagaaatttttgttgctgctttgtgaatgcttttttacatggcagtcttttttttttttattttactcttttagaacttttaatccatttggatttttaaaatcactcaaaaatcatgttaaaaataatttagtttaagattttcatttttgaactatttgtggaaacaaattattttaaatgttgaagcttatggctgtcatttatgtaaattaccattgttttgatacctcatgttctctaattgtaaaggtattttgattccgttcaagctaaagaacagcgaaggcaacagagattacgcttacatacgagctatgatgtagaaaacggagaattcctttgccccctttgtgaatgcttgagtaatactgttattcctctgctgcttcctccaagaaatatttttaacaacaggttaaatttttcagaccaaccaaatctgactcagtggattagaacaatatctcagcaaataaaagcattacagtttcttaggaaagaagaaagtactcctaataatgcctctacaaagaattcagaaaatgtggatgaattacagctccctgaagggttcaggcctgattttcgtcctaagatcccttattctgagagcataaaagaaatgctaacgacatttggaactgctacctacaaggtgggactaaaggttcatcccaatgaagaggatcctcgtgttcccataatgtgttggggtagctgcgcgtacaccatccaaagcatagaaagaattttgagtgatgaagataaaccattgtttggtcctttaccttgcagactggatgactgtcttaggtcattgacgagatttgccgcagcacactggacagtggcatcagtttcagtggtgcaaggacatttttgtaaactttttgcatcactggtgcctaatgacagccatgaggaacttccatgcatattagatattgacatgtttcatttattggtgggcttggtgcttgcatttcctgcgttgcagtgtcaggatttttcagggatcagccttggcactggagaccttcacattttccatctggttactatggcacacatcatacagatcttacttacctcatgtacagaagagaatggcatggatcaagaaaatcccccttgtgaagaagaatcagcagttcttgctttgtataaaacacttcaccagtatacgggaagtgccttgaaagaaataccatccggctggcatctgtggaggagtgtcagagctggaatcatgcctttcctgaagtgttctgctttattttttcattacttaaatggagttccttccccacccgacattcaagttcctggaacaagccattttgaacatttatgtagctatctttccctaccaaacaacctcatttgcctttttcaagaaaatagtgagataatgaattcactgattgaaagttggtgccgtaacagtgaagttaaaagatatctagaaggtgaaagagatgctataagatatccaagagagtctaacaaattaataaaccttccagaggattacagcagcctcattaatcaagcatccaatttctcgtgcccgaaatcaggtggtgataagagcagagccccaactctgtgccttgtgtgcggatctctgctgtgctcccagagttactgctgccagactgaactggaaggggaggatgtaggagcctgcacagctcacacctactcctgtggctctggagtgggcatcttcctgaggtaaggacctgcaggggctttttagctttggatctgcctcagtatctgactgttagggtgtcacaggaaactactatattgccaggaattttgagactactgttccgtgtgattcattccagaaacgtggagctccttgtcgcctcacatctcacatctggtccatgccaactctgtgttggttcttttattgttaccattcccactcctcttccctcaaccataggtgacagttctgttctactttctccatgtctcccactaatgtgaaacttctctgattttctgaacaaatccagtcagaattactctttctgttatgtcctcatggcttttggattttacctccacttatacatattatcacaactctacatgccagcttgtgattagtgactactatgtaccaggcattgaggatgcagtagtccacagtgcaaagatctctgcccttatggatggagcttgttttgtatgagagagaggacaagcaagactgacaagaatttagatagtgatataggctaaggagaaaaaataaagcagggaaggggaatatgaaatggcagctatggagctaaatttgagatttaattttagtagatcagggaaggcttcctaagaacatgacttctgagtaaagacctaaagaagtgggagaacattctactcagaacattctgcacagttcctggggtagaaatgtgcctgtctgctcaaggcaaggaggcgcgtgtcactggagtgttgtgcacaggtgagagaatccaggggcctgctgtgtgctggtgacatctctgggcaaggtgtaagccatttcagggtttgaagcagaggcatgacatgagtgtgggctcctctggagcataggttgtatccatagcttagtcatccccccagtaccttgataatttcttatacgtattaggtcctcaataaatgtctgtttaattgtgctgtactattaatgccagaaaaaggcaaatgtctcaaagggatcaggggacacaaatttgactcgattcaacctatttcctagtttgtgcacaattttttaatggataacttcctcctaatagtggtttaaatatcagtactataagacttcattctatttggaactgaatacaaatgttggttactaatgtgtaaatgtgtaacgtatgactgatctctctacagagtacgggaatgtcaggtgctatttttagctggcaaaaccaaaggctgtttttattctcctccttaccttgatgactatggggagaccgaccagggactcagacggggaaatcctttacatttatgcaaagagcgattcaagaagattcagaagctctggcaccaacacagtgtcacagaggaaattggacatgcacaggaagccaatcagacactggttggcattgactggcaacatttataattattgcaccaccaaaaaacacaaacttggatttttttaacccagttggctttttaagaaagaaagaagttctgctgaatttggaaataaattctttatttaaactttccttcccagttttatagtttctggttctgaggactgatgaaaatcatcttccatcagcagattttcttgcactgtttgctgtgcccctcaaatataatgtcttgggttttaagatcgagcaaggagcttctcttcctagattggatcccagcccctttgtgggggtctgactgcatagtcccagccattatgtgatatttcacgttattgatgatagtgaaccgtgggtccgaagctgactcaacggaggcagggaacaaagtctctgtggtctgttgggtcatacttcctggttccactgagtggcccaacactgggactgggttggtgtcccctctgctgacaggaccctactcctaggagcaaagtggttgattttgaaggcagtgttcccttctctccattgactatgagagagttgggggacacacatgcagaagaagcccgtggggagaaggtggattcctggtgtgctggctggtttttcagggctgttagaggttttttttttctctttttttttatggcaagacttttggctttgagaaaactcacttagagggctttccaaaaacttaggatggtctaaaaaattaggatattcttttagaattaggaagaaaaattaggatattctaaaagaatatggattaaaaatttaggatattcttttagatatcctaatatctagatgagaggccttccttcataagatctggttgtttgggctgtggttggcataagtgatatttattttggcctctgtcacatccagtttcttgagcttttaaggtaagcttcttttggctttttttcagatgttcaccaagcttaagtttaaaataataggtattctaaaagagtatcctaattttcttatctgtattcttttagaataccctaatgtttcagacagtgatattctcttgttatttctaaggctaaattggcagagtagatcatctaaagccaaacactgaagaaggtgagaacccactcccacccagccagcatttcctggaacagacaagctgctgcttccttgcaggctcacttagtgcattcctgggatggtctggcacccaggctttttattctttttgatcattgttcttactgaggtgccttcctagaacaagagccacttacaaaatagcttataattattatgtaccacacaactactattgtttgatgtatgactgctgagagcttgaatacatgcagagagtgactgaagacttagtagaggaataaattctgagcctgtctaaggtggggctaaggaacagatgagtaataagaggctcttggatttttttaaccaatgcaactgaccctttcaatcagttttctttgaattacatctacaagttttgttccactcagctaccagtcaactaggcatgctccacagtatcacaggaagaaggtcagaaatctggaactgaagctaaaagaagtgaggatgtagaagccacattcctctccaaggtagtgtgtgaaagaaccgccccctcttgacaggaggatgaccgtcgccattcttgcgtgggactgactcacccagctgagaggaggaccaatagaaagaaaattcacatttgagtccacctctctccccctttttctgaccttcatgcataagatctggttgtttgggctgtaggtggcataattcatgtttattttggcctctgtcacatccagtttctttagcttttaaggtaagcttcttttggctttttttcatatgttcaccaagctaaaatttaaaataataagaccaggtttctctctctacaagtggattataaacattttcaccaaatcataacaatactccagctttccggtccgacttcctaggagcctggagttagcaaaggttgtctctggatttcattctctgagaatatcacagagcctgggagaagatgaatttacatgaaattgcaacatacacacctttttattttctggtgttaagctagttgtctttcctaccttacaaatcatgttagttttatgatttgttccgcatgttttatgtttattgtagaaatgtttatataacatacgctttccatatcagggaaaatcatatctgtttaataaattggctataactttaatatctgtggacaacttgtaaaatttggaatgtatcatatgtaaaaagtttaaagatatccaaataaatgctttaggtgttggcattaaaaaaaaaaaaaaaaaa

SEQ ID NO: 28469 - DNA, 4260 bp, Homo Sapiens
aggcggggaccgggtactcccgctgcagcccccgaagctccatctcctccggatcactcaccgagcccgtggacatcccgttgtcccccttgcccacacgcgtcctctttcctcccccctggccagtctcgctgtctccgccttccgctccctggcggaggcggaggccagagagcgctccaaggaagactaaaaacccaggccgggaagcgcggggtgagaaagcgaggtgggtggcgagagcgtgagcgcccctctgctgaccccggggagcgtggactacgagttggcgcccaagtccagaatccgcgcgcaccgcggaaaatatttgcaatacctgccacgtccaaggttcagctgaggccaatgtaaagccagtattataggacacttctcagactgagagcccaatgtcgttggaaaccactgggccacaggaaaggcagacttcaaatcatcccaacaccagagaacactaaatgacagtggacaggaagacagtgtaccttttgctcctgatgatcgtaagaacaacctccttcctcttattgtgaagtgcaaggtgcaaaaaggaggcctgctgcttgttcaggactatgtcagcattgtggctcagaagaagcgcaacggctttggcgtggccttcccttgcagcaaagtgaagtgcagtgttcttttgaagaaaaacagacacagaaaacgtggtgacagtgtctaatctgtcttatttcactgcttaactgcttaaaagacattagcgacactatttaataccaaaatacatagcacttaaaactggtgttcagaatcaagcttcaaaataatgagtttatagttctagcatggtgtgtgtgcatgtgtgggaagtggatctgtgtgtgtgtgtgcgtgtgtgtgtgtgtgtgtgtgtgtgtgtgtgtgtgtgtgatagatagagaaagagagagagagagagagagagagagagagagagagagagagagaatgaattccaaggcatttgttttgtgttgcttttgcaatgggatgattccacaaggacaaaggacaagctttcagggtaaagatgttgggttgaacacagaagaaaatcctcctgagattgatcatttgtagaacagtggcttacagatttggggcttcacaagcttgtaaatgttttttaaaatcagagactgttataagtttgcccatttttagtttctccacttaaagacttttttttttgaaaaaggcaacaacagtcttctatccccatcattttatgaacaaacgtacatttcaaaagttactctccccaaaggaaggaaagacataatagcacaataaagggcagcatttcaaatcaatacacttcaaaataacacttatcttaatgaaaactcacccctgccttcatttctctggacctaccagggagtaaacgctttaccatcaaatttcattggcctgtggacctcgctgctctgtgagactggaggtttccccaacattcacccaccccttggtattctcccaattctgttgccttttgattcatacttcacctcaagaatccacttgctaaacacccaacaaaaggctgggaatagagcaaggaaggtaaaaggtgtctaggagagttttctggcaatgttggaagtttctgctatattgagattttgggtaagcatgagaaccgcagtacataccccgtcttcatccaagcgatctgtgcacttcaaattagtatcaagaatgaccttcatggtctgagtgtacccgcccatggacgcatgatgcaaagctgtccagccattgtggtcactggtaaagagttaagaaaaggtgtgtgcatacacttaacagatgaaatgcgggatgggatgccacttggcttattctaggtaaatctgatgacaacaaaaagcattattgagatctggcaactaaatatttataaaacatttataataaatgagctaattccaagctcaatgatcttaaatgacctatttctaatgtgattcatacacgttttttacttagtggtttaaaatatgaaagtatataaacacattaccaaacactttggggtaggagaagtacgcttagcatgtctgtgtcatacctaatttttttaaagctataatgaactgatacacatcaatttaaatcttgttttattctttcaatgaacactgtatcaaaatttttttatgaagtaatgttagtctttgtggtcaatagttattggtaatactactagtaatatggtacatggctataagatgcttagcttagtgtcagttattattctaagagtttaaatctaaaaagcttccctcttgtgctctgaaaaatgcttactcaattgctttgaaaaatgtttatccttttccacagaaattcaagatgtaaatacaacaaagccttgtcatattagctatcttttttcaaattagacagaaaaaaattcgtgacactatttaatttcagtgctagtgagcagatgttttagggtgcaagagccatgttgctatttcagttatgatgtaattaagcaacaactgtctggcctgggtctacttcggtcccctttgcaggtcagttgcttggtgtttctttgtaaaccagaaaaaactgagcaaaacattcattcatgtagctgtagcaccaatttgctggcatcaatattatggtaaggaaatgtgtttttgaacattagcctaataagctctttgctactgctatggtaagatatcaaatgaaaaacctctgtaaaacatttccaggttttttctttcttatcacaatatcatttaattatgccacatattttattatacttacatattttaactttgtttcttgtacttgagttcatttaagtataataaaattcagaaatttttaccatctcctgttgtcacttaaagggaaatttttatgcctaccattcatcagattgaatgaaaagtagagtatttgaacttgtatgttttgtgtgtgtgtgtacgtgcatacacacatacacaaccacagttttgtatctatataggaatatggcagcatgatgaggtaaaatatgagaaactatgtttcaaagaaaggttctgagaaagactgcacaaagccaattattctgtgaccttgaacaaggttcttcaacgctataaacttcaaagtctttgtcagttggaaataatactgacttccctttcagtatttttagaagttacatatgttttgatgaaaaaataaattggataaaagtacttagtgagatataaagttagacctcataattaaaaatataatgaaaagatagcctgaaaatggctaattaaagaaattatataaacactccaatcatatatcctcacctgagaaacaatgcaccttttttcagaagaagctgaactactttatcatgtccattctttgctgccagatggagaggagtcattccatgaaggtcaccttcattcagaagcctcgtatcacttatgtcttgtaggagcctctgacaggtattgatacgcccataacttggaaaaaattaggtttcatattttcaaggcaaatattaaacagaaagaagacatgttcatacattgctagactgacccttacctggctgcaaaatgcagaggtgatttcttatctttgcttttggaatgaatggacacattaaagccaagtaggttatttacagaaccagggcccccctgtctacatgcataatgtagaggagtacacccatcgttgtcttcatccattaccagctctttgatctgttgcatctataggaaaaaattaatatcatacaaataactctgctattatgctaatatgatggttttcaaactattctgtaggaaaatattttccaacaagggtcaatatgtattccttggggccaaaattgtaaataacctaaaggatttgagagtaatataaatatgaatgaagttgaatgctctgtcttcatgtagtgtacattaccatattagtgtacattactgtattaaaggatctgagagatcatgccaataggaaaatgtacttaacatttttaactcagcatttttcaaatatatttgatcatggcccttccctctgcccctcctcttatttcctcccacccccaaataacacccaacagcttcatgttaatatgttctgttaggtaaaatggatgggatgtaaacattaggtttattttatgttttatatgtatagtaaataaaaaatgaatgaaaaaaaaaaaaaaaaaaa

SEQ ID NO: 28470 - DNA, 3673 bp, Homo Sapiens
atggggatgggactaaacttagggggtctgccgtgtcccagggactgtgctcattttctgacaggagcaatattattaccgactgtgacagcagctcccacgaagcctgcaccttagctgcagatccttagcagggcagagagacaaggctgtatttgtatcaggaagatgagagactgcttaggcgccaccactagtaccatgagtccctgcactggttaaagccatcgccacaacctggacaggcagcaaggtaagcagagaggccagtccaggcgagctcctgggatgtgagtgtatttccgccccaactgctgcccggaaaaatcccaagtgcacaaacaagtcaaggcagcgcatcagggtccctcctacccgagctccaggacccagaggaagctgggtccccttcaagcgcttcagctagctccctcccccctggcagggattcttccaagttataaaaaatgagacactggaggggaagaaaacaagtccactcactgtcttctcccttctcccctctgagctgttcaagcaagttcccaggagcagttcagagcccctgttggactggaagggaggtaggaggagtggaatgcatgcaaaaaccgagctgatcaaaagacagtgctgtttcatggaagcctcccagaactgagagagagagagagagagagagagagagagacagtgagaaagaaagaaaaagagagcgcccttgtgcacgcgctaggccaagagcgcgccgctgtgcgcgcgcccgcctagcgaggacagggtctccatgacaaccggcctggccggctagcagtgctctgctcacttggctgcgaggagcgccacgaaaggtcagaggaaggagctgtgggaagctcgcagcaggtatcggagcttaagccagtggatttgggggccctgggctccctagccggctgcggtgtgagaatggagtgggcaggagagcagcgggactttcaggtaagggcagctccgggctgggatcatttggcctcctttcctggcccttctctccggctgttttctgggagtcaggcgagtgtctgtagtctctgctcggggtttggggctcaggaatgatgtcacgctccaacagttggattctattagcttaaggaggagggaaacagccaattttcttgactttgcaaatctagctgatctcactcttgctgaatctgaggtgtttagacttcactctaaaaagcatcattttacttttatttagcacaaaggcacaggatatttttacaggaagaatcttttatgtggaaaaatctgagttaacatcactcccgtggtgtttgtagttcttacagggaaactccagtgccttttgagccgcttgttcgtcctagtgaacactgtctgttttgtctcttggtgctgctatgtctgacctgtaatgggaaaaaaaaaaaaaaaaaaggctaattaagctcagccaggagcctgtggtgagttccaagtccctctagagcatttattaggacagagggactgtcacagggatgcctgagctggggttttgcactctctctcttccaggcagcttggtaagaatcaagctgtcctcccacatcaaaaggtcgatcacagactttcctaagaggtggaggagggggctggcttggggttggggggcctgcaaacaggtttctcatccagatgtcccagagtgagctctcagcagcagctgctaagagctggggaacatgaggcactgtagttgtgccgggtggattcctttggttacattttgaccaaatctcagggcacgcagtgtccacgctgtgcactcctacactgattgtcctaagttttggtaaaacttgttctgacctagaggagtggtacatggtgagctgtgtggccttggaaaggagaccctcccagaaaggcagttttataggtgatagggtagtggggttgtcagtaatattatgaggaggatgaatgcagcaaacacttcctgcaacggagacccatcaggggttgtgcttccacttgagccatgttatgtcttaaattcacttcttggcctcagggaactttgcaaatgcctttggtttctctgtgggatgagggaacagctgctgtcctggttcttcagtttttcttcttgaactttctgaacagaatgtcttttgtattctggcaaacaatgagggggcattctgattaacttcggatcagcttgccaatgcaagcactggccatgtccccagttccggctccctaaaatgagtacatgtatacatcgtggttgtggcctgagggtccacaagggtgaactccatggccctggacctcagacggtccacttctgaagttattcctcttgctacatacactccagggatcctttgcttagttgaaacctacattttgctggagggatgtggcataacactgagccagtggccccttcagttggcagtgtaaatccagaacctcagccttcttttctacttgtgtgtgtagttggagctcttcaattttaccatccccacatctgtgaagagggctagcagagacccagtttcaggagctggtgctccttctgttggtatagcagaaagaataatggatttgggttgctagacttgagtcgacggctagattctgttcccatagggcggccacgggcaagtatcttaactaataggagcttcagattcttacctgtgagatggaggtaataagaacaacttcacaggactgttgggaggagccagtgggataacttccatgaaagtagtttgaaacaagtcacgtcctatctaacgaaccgtgttgtgaattgaagcttgaggaatgacccaactctctctggaaagtcactttgcctctctgttctggttctctcattttataaagtgccttcttcctttctgcatttataagtaaacatgagaaaaatctgaaaagacttcttcaggatgtttaaggaaacaaatgttgctttccttgggttgggtcgtttcataagagtgatgtttgccataaaactggagcctcatagacgatcctgcagggaggaagctttccttggtcccctgactcatgtgtttatatatagtatagaggagaggtattccaaaagacccgtcgcttttcctgtgtcccacagctgcctgtagagttgtggcgccataaactttagcagctggaaaagaggccaggcctggttccctcatcctgctgggtcctgctgggcacactctgcagtgggcaaaggggtctttctccttcattctgggtttagaaggcagggttctaactgggagaaagtgttattgctccgaaaggcttcttgggggctgggcaggtctttcaggaactcataaggccacagcttatggggaaagaaaaagaaacaaggaagtgggaattccaagggcagagattcttgatatgccatgggactgtgccaaggaatggaagagcaggggaagggagactccaggcaaggagagtcccaggtctgtcctcattgagtcgaaagggcgtatggcatactagagcgcgtcacccacagccccagctttactgtaggatagggaagacctgccagccatatcccggagtggtgtctgggaagaagcccttgagcagacccatagtaggcagattaaaaaaaaaaaaaaaa

SEQ ID NO: 28471 - DNA, 8522 bp, Homo Sapiens
agaattccttctcagtacagagaggccgtcattctttctgtgcgtgtaggatcatcccttgtgaggtttctgtagcttacttaatccgctgtcttcttgatgtgtgtcaaggttttcagtatttattagatcaatgcttcagtgaagcagcttttgtagactacgttgcacatgtgcaacataaacttgagaaatccctgcacggaagggtgggcatgttggtaacgtgcaacaacataaactttaggaatctctgcattgaggggcgagcacgctggtgacctctggacattgcccagcagcgcaccataggagtggtggatgtgcagcctccccagcactgaggaggaagacctgtttctccacatccttggccacccagccaggtagctgccatgtggattttgccaaacaagatagggatgaggtggatccaagagcagaaataacaaagcagtgtgtccactggcgcctggacctggggtagtcggtctcctttctgtctcttctatctgcatgtgttgctttgggctcttccctcagccccagcttccacaccacccccctcccctagtgctatggtctgaatgtttttgtgttcccctccccacagctttgacatgttgaaatgctagcccccaagctgctggcattaagaggtggggcactggggagatgatcaggttataagggcaaatccatcataaatggattagtgcccttctaaaagaggcctcagagagcagccttgccccttccaccatgtgagaacacaatgaaatgatgaccatctatggagcaaggaactgggccctcaccagaacccaactatgctggtatcagctggggacttcctagcctccagaactgtaagacatacatttatgttgtttatgagtccccagtctgcggtattttgttagagcagcccaaatggattaagacagaaaattggcaccgaacattttgggtgctactctaacaaatacaacgtggaagaagcttgggaaccgggtaatgggtagaggctagaagagttttgaagtgcaggctagaaaaagcctgtgttgccatgaacagacaattttttctttttctttttcttttttttttttttgagatggagtcctgctctgtcacccaggcaggagtgcagtggtgcgatctctgctcactgcaacctcagcctcctgagtagcggagattacagatgtgcaccaccacacctggctaatttttgtatttttagtagagacagggttttgctattttggctagctaggctggtctggaactcctgacctcaggtgatctgccagcctcagcctcccagagtgctgggattacaagtgtgagccaccgtgcccagcccatgaacagactattacgggtgatttctagtgaggctccaaaagaaaagaggagatttgaaatcctcaaccagaatgttggtaaaaatgtgaacagtaaagctattcttatgaggtcccagatggaaatgagaaacgtgtggtgggcaatggaggaaaggccatccttcttatagtggcaaatcacttggctgaactgtgcttatgtattagtgttttgtggaaggtagaacttacgggccactgcaatcggatatttggctgcagaaatatctaagcaaggttttgaaggtgcagcttgtgaaatgtgaaaagagagaagtgatttaaagatgggattgttacttaaaagggaagcagaacttaaagatcgggaatatttgtcagcctatgttggtaagagtgagccagcctgtttaggagagaagataaaggttttgccattgaaactgaggctaggagctagtccaagaaaatggaaaaatgaccccaaaggcaattcagaaatcatcagggctcttctgcccatcacaggcccagagcgcaagacccgcagcaagcaggggaccacagcagagagccccgcttcagtcacccctgaagccctagatggtggggccatcagcgaagttccagcccaagagagccttgggcttctgaaagagacagagctgccacagaggtggggccactgcagagaaccacctcaagggcaggccctcaccaggggctgccatggggcgggaccaccaaaagccaggggcagggccacccagggccttggggactcaactcctgcccagtgaagctgccacctgtgggtttggaaggcggggtcacctcccaacacagtgggcctggggagcacagcatcaagacaaaaaggattattctgcagattattctcaagccgtaaaccataatgtgctgtgacccataggttcaggacttgctggggacctgttactccttttctttttttctgtttcccttttttggaactggaatgtttatcctgtgcccgtctcaccactatatatgtgtgtgtgtgtgtgtgtgtgtgtgtgtgtgtgtgtgtgtctctgtgtgtgtgttttgttgttttttttttaagactgagtctcaccctgttgcccagggtggagtgcagtggcatgatctcagctcactgcagactccgcctgccgggttcaaatggttctcctgcctcggcctcccaagtagctgggattatgggtgctcaccaccacgcctggctgctttttgtatttttggtagagatgaggtttgaccgtgttggccaggctggtctcgagctcctgacctcaggtaatctgcctgcctcggcctcccaaggtgctgggattacgggtgtgagccactgcgccggcctcaccactatttggaaggcacataacttgtttcatttcacaggttcacagctggagagaattttgtgtcaggtagaattgtgccttgagtttcaaccgtaactgatttagatgatatttaaatgagatgttggactccggacttttgagttgatgctggaatgaattaagactttgagggttattgggatagaatgaatttgtttggcatgtgaaaaggatatgaatttgggggaaccaggggcagaatgctatggtttcagtgtttatatctccccaaaatttgtgttgaaattgtaatccccaagatgatggtattaggaagtggagacttttggggagatgatctggtaacaagggcaaagtcctcatgagtgggattagtccctcctaaaagaggccccagagaactcccttgccctctccatcatgtaaggacacagaagacacctgtcttttgaccaagaagtgggccctcaccaggcacccagcctgctggcaccttgatcttggacgcccagcctccagaactatgaggaacagatttctgttgtatagaaactgcccgtcctacagcgttgtgttgtcacagcctcagtggactaagactgagacacctagctcgtcccggactgaggcatccctgttctcctgtgctttcagagtcgggtttctccattcaaggacatgattttatgcttctctgaagaggattggtcccttctagatcctgcccagactggcttctatggagagttcatcattggggaggattacggggtctcaatgcctccaagtaagacttaacttccccccacacctcaagaccagggaactgggcaggggagttctcacttggagtaagagtcaacttcgtcccataggatcagggaagcggggcctgcatcagatctctctgttcacccccaacctggacaggaggtcatttgcacacagcggccctacaggcagtgtgtccgattgaccatcacctgctgtctcgccacatcaggcttatcagaaccaaatagaacatgtgctgtatgtccatttctcttccatcgttcttaccgttttgtccctttatgtctgctttacacccgaaagcctcagagagacccccaagcccatagctctccctgcgtgtgctgcccccactgcccctgcactgccagctctggccttttcacttctcgcccctgatggtgccatgcccgctgggcatccctccgccttctctcttctggaccagccctggttgctgcaggatcagattactaataaacatgtaccctgcctttttctttgaacagacgacctagctgcccagccagatctctcccagggagaggagaatgagccacgcgttccagagttgcaggatctccagggcaaagaagtgccccaggtctcctacttgggtgagtaatgattccagaactgagtggacagagtagggggaagggttgctggcagccggaggtgagcccactctctggcttctctctgcggcccctaattgccttcttcatttccccagactctatgtgggtcttgcatgtcttgccttgtccctgacttttcatagaaagaatggaggatcttaattttgccaggcattggaattgtactcccttggccaaggactgggaaataataggaatgtctttctcctctgcctgtaagtaacatctggtttgtgctgacaatgcagcagcccctccaggagtgaagtcagatactcatgacaagcctagttgcagagggagtgtctcctaactgggcaccgagcgcagccctttgaggtgcctcacctgtctagtcttcccatctgcctggtacaggggtgctgtgaggacactggggtgtggggaggtgctggggctcagcagcagcagtttccagccctccttcaggctgtgtcgccagcacttgcacccatgatctccatgccatggtgcttcgaagcatctgctccttcaggaggaaatagctttgtacagaatcatcagcagctccacaccttcttcccctttgggacctagagctggcatgaagcagacaaggttttgacacaccatccccacctggaacaagcgttcagagacttggtgtggtgcagtagctcctgtaccatctctaccctgtaggctctgcacaagctgtttgtgcaggatgtgcggagtgtgcaggagcctgtggtgatgactatagaaaacccaccacagaaagtgggaataaatatggggctgggggaagtgcttgtctctggccatagagtgggtggagtagaacccggatctacgttgattctgtctagcgtcagagctcatgtttgtggagttggcccattttgccctcaggttcattcactcagcagacacttattgagtggccaccccctgccagtccccaggacggagcccagggccgcccccagatcgtagcctggcatctattcggatagcaccctcccaggtagtgctgtaggtgcaaaacaaatcaatttttccatttcctcctctggaaagactctccaagtctccagccattccaggtagaagaaagaaggaaacgtgaggagctgcaggtgccagagttccaggcctgcccacagacggtggtgcctcaaaacacctacccagctggcggcaacccgcgatctctagagaacagcctggatgaagaagtgaccatcgagatcgttctctccagctctggggacgaggactcccagcatggcccgtactgcacagaagagctggggagccccacagagaagcagcgcagcctccccgcctcccaccggagcagcaccgaggccggtggcgaggtgcagacctccaagaagtcctacgtgtgtccgaactgtgggaaaatcttccgctggagggtcaacttcatccggcatctgcggagccgcagggagcaggagaagccgcacgagtgctcggtgtgcggggagctgttcagcgacagcgaggacctggatgggcacctagagagccacgaggcccagaagccttaccggtgtggtgcctgcgggaagagcttccgcctgaactcccacctgctctcccaccggcggatacacctgcagccggacagactccagccggtggagaagagagagcaggcggcatccgaggacgcggacaagggtcccaaagagccgctggaaaacggcaaggccaaactgagcttccagtgctgtgagtgtgggaaggccttccagcggcacgaccacctggctcggcaccgcagccactttcacctgaaggacaaagcccggcccttccagtgccggtactgcgtcaagagcttcacgcagaactatgacctcctccgccacgagcgcctgcacatgaagcgccgttccaagcaggctctgaactcctactgagcctctccgcctggggcggcctcaccctggctggtgctgccccctcaccttggtactgatcagcgcccccacccaggacataccttccccaggatagagagcacacctccctcctgtccttgctctcaggtagtgagcgttcgggtggtgccatgggagcactctccctcccccaggtaatgaaagagtggccaagtgagtgttctgtttctgctgtgccaaaaaacgggggggatgtgccatcaccaggttggacatgccaggtgttctgcgtcttagagacccttggcccatgctccccaagctcggggagtaaaactgggctatcccccgtcagggcggcaccctggtcaccagccaaacctcagtatactccctcccctccttccctgtctgaacgctaggatctgctcctgaagctccaggatgcctgcacttccactgagaagctgctggcggatgttggactagaggaaagaagaaggcagggtgggactgatggactcagtggggagcagggccaggcacactgagccagacatgtcatgtctgagccccagattcgtggccatcaggtaggcaggagcaccccgcagatccaagatgatcaggcagcccttttgggctggcctctgtggcaggggtctgcagagctccttcttgaggtttggaaacagtcgtcatacctgttgattttcctgggggccaatcactagggatctggagctcaccaaaaacaaagcttacattttaatttgtgttgcacacctaccccataatgtctttataccccaaagatccttggtaaatgcttgtgggttggaagcggagttgtcatcgtttaaaaggcacttaagtcccttcttccaatctgtcctgtctaggaatgtggagctctgcccccagtgaggggttctcctgtctgggtgagccaagctccagaacagaaccttgcctgacaacacacttgatagatacattagcttggagtgctggtgtgtccaaacactggctggcttagaacaacaggagtgtattccctgacagttctgggaggtgcacgtccaagatcagggtgtcctcagagttggtgccttccgagagctgtgagggagaagcggcttcatgcctttgctggcagttgccattccttggtgtgtggaagcgtcacccagtctctgccttcatctccacatggcactcttgctgtgtgcgtgtctgtctccaaacctccctttgtttaaggacaccagtcatatcggattagagcccatcccaccgactccagtataacctcatctgtatccgcagcaaccgtttaccaataaggtcacattctgaggtactagaggttgggacttcaacatcggaatttgaaagggacagcattcagcccatgactccagataaacgtgaggtatgctatatcattcctaatttacagatgagtcaatacaaacttgagtgagcttgctcacaattccatcaaaggcagggttcagacccaagtttcagcatttagggcaggtgtcctctgcatggaagaaccatactcaatagccgtaaacgctgacaaattccccttcctccctgccttctgatgggggctgggcaggccagctggagctgtgtctcctgctgggattccggactgagagtgacagcaggtagtgaaacctcaagcaatttaaaacatggtattgttcctggaagactggttatgttggctagggtcagcaagagagggcatcaaggctgtagtctagcagtgacttaatctgcaagtcaaaccagacgggtattttgtattattcatatgtcacatcctaccaacagacagtaagtcaggcaaggctcctggtgctccttgtcactcacgtaattttcacatcaggaaaactctgggctgggtgcagtggctcacacctgtaatcctagcactttgggaaaccaaggtgggtggattgcctagctcagtgacaccagcctgggccacatggcaaaaccccgtctgtaccaaaaatgcaaaaaattagctgggtgtggtgttgatgtttgcggtcccagctactctggaggctgaggtgggaggattgcttgagtctgggaggcagaagttgcagtaagccgagatcatgccactgcacaagctaggtgacagaatgagactctgtctcaaaaataattaaaaagcctctgccccaaactcgttaaaagattttatagccacaactgctgtttctgtgtagatgcatctgcatgcccaggagcagtaaatgcaataaaatcatttggttatactttgaacacaaaataaacggttgaggcttttactttctaaaaaaaaaaaaaaaaaaa

SEQ ID NO: 28472 - DNA, 7604 bp, Homo Sapiens
cagcaccgtctattctatgtctgcactttgcagcatggtagttactagccacattggctattgtgcacttcaaatgtggataatatgttagaggaactaaattattttatttaagtgtaattcatttaaatttagatagccatttgtgactactgtgtacactgttggacaattcagccctgggttaatgacaaaatctagctacatagtagacaagtgaaatgtgagtgaccatggaagatgacttaaatcttgtcttgtgcctttggtgagtaatacttagttgtatttttcattcataatttgtagtggaaataaaaagcactgctccttccaacaaatacagaaagactgttttctccctatgtatcccccaaccaaagcagttctaagtgttggaggctgattattttagttttgtggttcctcatgtatcttccttgtctggtggcgtgaagcaatggaaagaatgcttaataaggagtcgcaggttttaggttctggtctcggttctgcctgtaactatttagaggtatgacctttggctcttcatgtttccctccgtggcatcagtttccttatctggagtgagggggtgggattaagatgatcgctaaatctattccagatcagagtttctatgattctgtgtctttttcttaattcggatgaccaggataatggctgagggttctctttgtgtaattactgagctgagtacaggtgctggaaagaactggggagataccttgggccatttcagttttgaattatggagtgttagaacacttttcagattgccacgggatctgaaggagccctgaggaaagtcaagttctgcttcattattgtttagtgtcgtatccaaggtaaacctggacacaaatgcagaacacttagcgttaagcagtatatactttaaaaattagtttagtcggaggttgcctctttctgccactttcagagttgcaaatcctgtggaggtaaaggtttcagacaaagtgctggtagaatgggccaaagtgaagatcacccagtgagagacaaaagggaaaggttagtaccttaagtgcgcttgagaaatgggttcattgagtcaaatcataactactactgcttgctaagccagaagaaggaaattcagagatggtaagactttctttgatacccagggaaattagggttaaggatggttgcttggagtgacttcatctgtagaaggctggattctgaaggagatgaatcacaaatgaagagaaagaggaaggaaagaacattggccagatttgcaagagcaggtaggtggatttgaagtgttccaaaggacagtgtggtaggatgtgtcaaagcagtacagaggcagaaagccatcagctggggctgaatagaaataagatgtttatttggtgatttaattgcaatgttcaatagtatatttgatgattgtgttgttatcgtgtaataatgcgacaaagttaaacatttattgatgtggtcacgctagtgaattcccattgtaaatagtagctcctattctctgtctccataggatctttcagacacagttgcatcttgtagctttatttttattttttaactggctatctttatgtatgggaacagtcatctccagagattcattttcatctcaaaaaacttctaaaggtgttaattgcattttttcaaaactcttatgtaattatttaaaattattccaccggcactataaatcagaacctttcccattatattgctgaggaacatttatgacctgtttagacacttttgatttataggtttaggaaacaagaatatagaaaccattgccaggttttaatttggaaatttctttagctacgtctgtttctgcagaaaagagaaacagaaagctggtaggagaggtgattggagaggtatggtccacactagtgattcacaagaaagagaagcacaagacctgatttgggggtcctgctctgaaatgagcaattggtgtgtcttgtgcatgttgtttatactttctaggcattatttttaaatgctggttctgtgtaacaggtgcctaactctgagtgagttatttaagtttctagacctcagttttctcatctataaaatgtagactgaaaacagaatcttcataggattatgataaagattaagtaagctcgctcatctatgcattcaaaaacctttgtcaatgaagcctctgctgagagccaggcactgtgctgggtgctgagtgaaggtggcaggaggaggcagggccggacctctcttggtacaggtaataagtgggaataacccgacacctggagtgggtgatacatgagaataagccctgacgtgaacaggtcttcttaattgtcaaatagtaacaatagcaccccagtttagatgttgtgaaacattggagtgcacacatttagaaaactgatcacaatatctctcagatgaatatgatccaagaaatttagagataatagaaattgtctgtgtcgagggaggatggggaagagttaatatgctgagatgaagaatgaagatttttttagaacaaagtctcagcaggctgaagttctcaatcaaaatgaaaaaaagatcgttaatgggcatgaatgcaaagcccataccatggtactagtgtagagtgaagagctctaacttaacagcagttcatgtgacaattagtgaggaatgattgtaacaccagtaggagccagttgagacctaggtggggggcaggggcaaagaattcagactgtattaatagaataatgaggagttgggctgctgtcctcctctggactagaggggcagacacctgtcccaccatgctcatttctgcgcactctatttggaggggcgcaggggcaagacagagtgggtggccttgcctgtcacttaccaaatactggctacatgctttaaacaaaaccagaacctatttaggactttagcaggaaggggcaaaaccaaaccgtgagtgggcgtggtaggaagtgggggagttgttatagtgcaggagttccatagcatccactggtgggatgaacttggttcttaagtctgcagttcccagaatccaggtaatgaaagagaagcaaaggtcacactagctcttgtgcttccaaggagaagggttaaagttgccactatttatgactagtggctccaatgaagtctgggctgcagtcttcctgtgggtctttcctcgtcctcctcttttttagctgcatcagtgaagagcctttggaggcaaaacaaaatgaagtggaagctccttgggcaacgttatctagttgcaggatgtactggtattggtagcagtttagaaaaattgcttttcgtgcccttccagtcttatgtccattcagaaggattcttttcatttaacaaaatttagcaagagaaatgaaaaacagatgattttttaaaaccctggagtagctgtctacctttagtaggtacagttttattagggtaagtcattcaagtttactcacagccataaaatgacatttattatttgtgtaatctctgaatcatggtttgtacccagctttgttttgttttttaattttcgaagagtctaatcattgattgctgtgtacaaatgcactttttgcacgtgatgaggtcactcagtcataaaattgtcatcaaaagattttagtccctaaacatggcaatatagggatgcttctcactgaatattcatcttacctatagagatgctattatttagcaaggacttagttactttttccttaacactatgtgaaacgcaccacaggtggagaaagaagaaagagcacacaattcatctctcagagcttacagtttagagaaaataacagaggaggccgggcggggtggttcatgcctgtaatcccagcactttgggaggccaagggaggcggatcacctgaggtcaggagttcgagagcagcctgacagacatggagaaaccctgtctctactaaaaatacaaaattagccaagcgtgatggcgcgtgcctataatcgcagttactcgggaggctgaaacaggagaattgcttgaacccgggaggtggaggttgcggtgagccgagatcacgccattgcactccagcctgggcaacaagagtgaaactccatctcaaaaaaaaaaatatatgcacaggaaacataaatgcttcttaggaggggaggaagtgagaggggagtaaggcaaagaagagaaaatagaaaacattcattcgttggtttattcatttgtttataaattcatgaaatctttgttgacgagtggtatgtacagggttatgtacaacggcatttgatgagctagttcaatatgtaatggaatgatgaagtgactagcacagagagtgaatgctgtaggaagtcggggaagtgggaacaccccaaatttagtgccatggttgggaagatggctaggttggtgacctcttctcctcgtgtgtatgtgcgttcctgttaaaaaggataattttgcctaacagaggaatactttttgtttagacttggctccttttcatgacattcggtttcactgtactataaacaggtctttagctgtctttcccccactccccacttaggtcataaggaacaagtaaataaaaattaacaagagctaccttcacttcagtacagcgaggctgccttaggagagagtgcactaaaaagagacctcagggttcagggattgacaccttgctgcagaatgggagtgacatgtgaaaggtcagtggtagccttgactatgccgtttttgttagagttctatttcctcttctagacatctaagaaggattagcatacaagtccttggtgttttagaagtttgcccctgcttggatgtgagctgtcttcaagctttgttctacttaattgtataataagataactatgtctgatgtgatattatttaaaaacttggtgactgaaatatctaacccatgagcccatgctccataactttatgtgtttccaatccctgtgtgaatgttagattagcccttcaaaaaatccagagacatattagagatccactgactcaaacatctctggcttagaagcttagcaatcacagttgagagtgtgccaggataggagtaaagaacaccaaactctgctaacttggaggaaaactatgtatgtgtgtttgacccagctgaggtcaaggctggatgagatcatgttaatcatggccatgacatggataaagaagaacagagaccatgctcaaaacaggaagaaggagaagaggaagagataagtaaatttttgagataggaaatacaggtgaaattgagaaaaagaagaaaaactattcatctcaaaggaagggagctggagcatgaattataatcaccccagccacaccaaatccttcacattctctggtattctgactcatgttgtctgccatatgaatgttggcacgtgccattccagtagctcagatgcccttcccggtcctgcctgcccatctccctacggcagagcattatcctttcatcttcagcataactcttgtcttattctacaagttcccttttccccctgaggccaaggtaggagcccttcttttctgatgtctgcgtatgtacgtatttgttaattcagcaaatgatcaaatgatcaaatgatggtaagaaaagaaaatagatttccatttcttccttcgagttagttgggtattgggaacttgaaaaataatcttaaagtaggcctgttaaacaatgatgctatttgggtgcaagctgagccctctctggagccagggtggctgggactacattgaaagccagcctttctggagacaggctccaccgtgagtaacaaaacattgaaaaaatataggccgaagattccataaattaggtctcatgttggtcaacctacagttcattgttcttgacacttggggcagagaccccaccttagaatatcccagcagggcctggcacaatggctcactcctgtaatcccagcactttgggaggctaaggcaggaagatcacttgagcccaggagttcgagagcagcctaggcaacatacagagtccccatccctacaaaaaagaaaaataaaaaattagccaggcctggtggttcatacctgtggtcccagctactggggaggctaaggccggaggatcctttgagcccaggaggttgaggctgcagtgagtcataattgtgctactgcactccagtctgggtgacagagttagaccctatttgtttaaaaaaaaaaacaaaaaaaacccagtgggtccttgagagctcagtgtttggcaaatcaccatactccttcaccacatgcaagtgatgaactggctggggtatgtagcacaccacaacctagagatttaagtgggactgctattttgcctcttgtagatgattcttggtctagtgaccctggttaaaaaacaaccaaatgtcttcttccattgtttggctgaaggatctgccgctgctgagttaaattttggagtgaggatcaacagtacctacagcacaaaaaaataagaagtctaagaaactaaaataaattttggattctgtaatttcattatagcaaaaggaagaaattgaaggaaaagtggtatgtagtaatagtaataatgatacattaggaagcattttaagtgcttactgtgtgccagccactgatctgttttatctcatttaaaccttgtgtgggtgaagtactaagattagttcttttttatagatgaggaaactgaagtctatagaaactagcaatttactaaatgtacagccagagaatagtaccaccaggatcagaaccgatggcagtgtctctccagagtcaccatgctgaattctctccttgccttttatgattagagaccaaataagctccaccaccctgatgtttcatgtttacatctgagacactgtgtattaccaggagaactcaggcactgaggctgctggcctctgcctggtgctcagtcatgtgtcggaaggagatgagagaagatcatcggtgtctgtctgtctgtctctctttccagcagtggagatgggagtataagaaactgcttaatcaaggagaagtaactcaaaaagaatgcatgagcccctggtctcactccctcgatgttcccactcccacatccagccagcccagttgtgggttgtcactgtggattcctgtaagaatcaaagaggacatcagaattttaactttgtgttattttagcttccattcatgctgactaatcggtgacacttggtcacatttattttccatgggagtaagactgaaccagcctctttgttcttccaggcttagttttacccccaagcctagtctccagattggcatatgggattagaagccttgttttggagtcattcaagtctcaacaccccactgaccggcttcaagatactgattaaataatttaagctggccatgtgcagtgactcaacgcctgtaatcccagtactttggaaggcctatgtgggtgaatcacctgagattaggagtttgagaccagcctggccaataggatgaaaccctgtctctactaaaaaaaaaaaaaaaaaaa

SEQ ID NO: 28473 - DNA, 4171 bp, Homo Sapiens
tttggggaaacagaagaggaccctgttattcacatgcccagtggtaggtagggagtgaggggccaaagagtgagagctcttggaggaacaaatgatgacttatttgtccctacttcagagcctggcccagggaaggcactcaggaaatgttggatggagagatgatggatgcatggatggatggatagatggatgggtggatggagggatggatggataatagatggatggatgcatggatggatgggtgatggatgtatgggtggatggagggatgcgtggataatggatggatgcatggatggatggatagtggatggatagatggttgggtaggtgggtggatggagggatggagggatggatggataatagatggatgcatagatggatgcatgcatggatggatggatagatgggtgagcagatggaaggatgaatgctttgatggatgggtgatgcagagaggcaggaacagcctcgggcctcattctgggctcccattctctttcagcactttcattcaccctactattctttataacttatttttgttaaagtataattaacatacaataaagtgtgtacaccttaagtgtacagttggatgaatttttacataagtatacacccttgcaaccaccaccaagattaagacacaaaacagttccaacttcccagaaggcaccccactttgagcggcatcatcacctcccataaatacctgcccaccgtgctcccagtgtgacttaatagcaagcacccatacactcagcctctacacactcagcatccacacactcagccaccctggggcctctgtccccatccaagccctgtctactctccctcacttgggtcctccattcctcctctcctgccctgttgtctcagcctggactggtgcagtggccttcaggcgccctgccctccagctgctccctggtaattctctgccactgttaccacctctgcctcttagaagatggcatggtcattccgtgattcttggaaatttgcagggagtagctgttggcccagctggtccctgtgtctcttggaggctgggtgccagtcagctcgaaacctgttggctgattgcgtgcaccctgaggaccccacagcccttcctggggcccagaaggatgagaatggtgagggaaacagtgtgctgtgaggaaatggccccaggagtcccagaaacattcccccataaagagaggatatgaccagtggagaagagaagcgagaggaagaagcccaaacaaagggcgggaaatgccattctgagtgggtagctcctgagaaggagctgttggacaaaggacacatgtgaaagtggaaacaatttagggcctccctcctacagaggaacatccttcttggcccccagggcagaacagaaatgcaggctctcaggccagctgtgaagagacagtttgcagttaacatttgccaatgctttctctattacttagaaaaagttagtgagtgaccctccagggctctcagctggctcatttttattctttcatcacctctgatcctagttgccccttgtcgtagctcaagctgctattttaaaaaacaactatagactaggtggcttgaacagcagaaatttagttctcacagttctagagattgggaagtccaacatcaaggcgccagtagttttgattcactggtggggactctcttcctggcttacagatggccgccttcttgctgagtccgcatgtggtggagagagcgagagctctggtttctctttttcttataagagcacttcacatcctgaccctcactcatgacctcatctcaatcttattacctcccaaagaccccactttcaaattccaacaattgaggattaggttcaacatacaaaatttgagggtacatattgagtccataacaccctgcctccagaaaatgttccctgaaccatgccaataagctgggttgggtgcccctgctctgtgctgtgacatcctgtactatgactacctgattactcatctagactgtgaaccccatgggggcaggaaccatgtcacattcaccactgtatccctggttcagggcctgacacatacttagcaggtgttcaataaacctttgatcaatggtgggatgaatgagcaaatgcctgagcagggagagagccttcttatagccgccctaatgtcctattctagattccttaggtcccctcctctcacctcctgcctttgttgtggaggaggaagaagacagggagaaggaagaggaggaggaggaagaagaagaagagggaaggatgtgtttgagttgctttatgccttcacttaaggctcactgtccttaggggaacctgagctgttcactagggacagacacattagtggcttgggcaagtggtgctttgggattttatttttggaaggaggggggatggaggaggatcaaaccactttttttttttttaaccagcaggagagcaaagggagaaagctctaggctaaaggccagaagacctagccctgccaataaaatcaacctcattttgtgaatgcctgttgtgtgccaaggaccctgctaagtgctttgcttgtacgtaatcctcagaacaaccctctaaaggaggcatgatgagtacttttatcatcaccctccccattttacagataagcacactaaggcacagaacagttaaaattcctgccaggaaagactcaagtcagacctttctgatccccaaaccactctgcctgctaggccccgggctgtggcttcaggatgggggcttgtattctctgtgactctgctacacctagatgctcccactcccacagtcaccctggtcatttctagaaggcaacagcagcaggatttgacacatgccccacattaggctaagaggtctcaggagaaatgggggcctttggcacaaagactattggcagataatccagggctgggaggaacttattggcaggaaatagcctgcactgcacctgcaggaggagtgaatcttcagtgttggttaaggaaatgcaggctggccgggcacagtgatgtgcacctatagtcccagctagtcaggagactgagacagaagaatcacttgaggccaggagttcaataccagtctgggcaacatagcaagaccccatctctaaaaacggacaatcaaactaagaaactatgtttccattaaagcatattatttagttacataacagtaactaccaaaagaagcagcccaaactattcccttgattgtttctggggagtagatttgggggccaatgagctgtgatggaggacacttacttttcatgacttttccaatggtattagtactttaaaccaaaattttacttttttaaaaagcaagtatgtcaaggcaaaggatccttctcacttataaatgtgtataaaagaaatttctttttcctccccctccactccttctatttctgccctatttttttccaggaagaaaaaatgctgggcatcttggtgcagcacaaagtccggagtggcgtctcgggcatcgtgggcatggaggtggatgggctgcccttccacaacacccacgccgagatgatccagaagctggtggacgtcaccacggcacaggtgtaaccgtccatgttccgtgtgagcagagtccctaccaacgggcaggtctgcatccggggagaatgcagctgcttctggcgacaatcctgctagtaaacactggtcttcggtgagcaacgaacactcgcctggcctgggaaactgcatgcccactttctgggaggggttagtgcaggtgccgtggacaaaggacaacatttctctggggctttttaacttttattcctaagactctaaaggcgttgatttcaaccctccttcactctggcttcttcaggcaacccacgtggtctcctgtgagaatcttctcgacagttacttatggggacacttgtgaacaattaactgccaggcagagcatgagaacaaacattcccaggccatgtaggataggatactccagactccagtcatcctcccccatccatggtttctgttactcatggtttcagttactcatagccaactgcagaccgaaaatactaaatgaaaaatttcagaaataaacaactcttaagttttaaaaaaaaaaaaaaaaaaa

SEQ ID NO: 28474 - DNA, 3234 bp, Homo Sapiens
catcttgtgttgttgaggctgaggactgactggggttctgagactccctgtcccggaccgcagcgttaaaaggatctgaacaaagtctgctcaaatctcctgctgtgaaccagcagaatttttgaacaggtttcttcacatataaaaatctattgtaaaaatacggaaaagaatggcagcggaaacgcagacactgaactttgggcctgaatggctccgagctctgtccaccattggctctggtaccctgcgattgacaggacgaggaggaggaggaacagtggtgggggctcctagaggtcgaagttcttcaagagggcgaggcagaggcagaggtgaatgtggtttctaccaaagaagttttgatgaagtagagggtgtttttggtcgaggaggtggcagagaaatgcatagatcgcagagctgggaggaaaggggtgacagacgttttgaaaaaccaggacgaaaagatgtagggagaccaaattttgaggaaggtggaccaacatcagtagggagaaagcatgaatttatacgctcagaaagtgaaaattggcgcatctttagagaggaacaaaatggagaagatgaagatggaggttggcgactagctggatcaaggagggatggagagaggtggcgacctcacagtcctgatggtcctcgttctgcaggctggcgggaacacatggaacgacgtcggaggtttgagtttgattttcgagatagagatgatgaacggggttaccgaagggttcgctctggcagtgggagcatagatgatgacagggatagcttgcccgaatggtgcttagaggatgctgaagaagaaatgggtacatttgactcatctggagcattcctttctctaaaaaaagtacagaaagagcctattccagaagagcaggagatggacttccggcctgtggacgaaggggaggagtgctctgactctgagggtagccataatgaagaggccaaagaacccgataagacaaataagaaagaaggagagaaaacagatagagtaggagttgaagctagtgaggaaactccccagacctcatcatcatctgctagaccaggtactccttcagaccatcagtctcaggaagcatcacagtttgagaggaaagatgaaccaaaaactgagcaaacggaaaaagctgaagaggagactcggatggaaaatagtctaccagccaaagtgcccagcagaggggatgaaatggttgctgatgtccagcagcccctgtcgcagattccttcagatacagcctctcctcttctcatacttccacctcctgttcccaatcctagtcctactctccggccagttgaaacaccagttgtaggtgctcctggtatgggcagtgtttccacagaacctgatgatgaagaaggtctcaaacatttggagcagcaagctgagaaaatggtggcttatctccaagacagtgcactagatgatgaaagattggcatcaaaactgcaagagcacagagctaaaggagtgtcgattccattgatgcatgaagcaatgcagaagtggtattacaaagatcctcagggagaaattcaaggtcccttcaataatcaggagatggcagaatggtttcatgcgggctattttactatgtctttattggtgaagagagcgtgtgatgaaagcttccaacctcttggcgatatcatgaaaatgtggggaagggttcccttttctccaggtccagctccccctcctcatatgggagagctggaccaggaacgactgaccaggcagcaagaactcacagccttataccagatgcagcacctgcagtaccagcagtttttaatacaacaacaatatgcacaggttttggcccaacagcagaaagcagcactgtcttcccagcagcagcagcagttggcacttcttcttcaacagtttcagaccttgaagatgagaatatctgatcagaacatcattccctcagtaactaggtctgtgtccgtgccagatactggctctatctgggagcttcagccaacagcttcacagcctacagtttgggaaggtggtagtgtatgggatcttcctctggacaccacgacaccaggccctgccctggaacagcttcagcagctagagaaggccaaagctgcaaagctagagcaagagagaagagaggcagaaatgagggcaaaacgggaagaggaagagcgaaagaggcaggaagaactccgaagacaacaggaggaaattcttcggcgacagcaggaagaagaaaggaaaaggcgagaggaagaagaacttgcccgaaggaaacaggaagaggctctgcgtcgccagcgggagcaagaaattgcattaaggcgacagcgagaagaggaagaaagacagcagcaagaagaagctcttagaagactggaagagaggagaagagaagaggaagaaaggcggaagcaggaagaattgttacgcaaacaggaagaggaggctgcaaaatgggcccgggaagaagaagaagcccagcgtcgattagaggagaaccggctgcggatggaagaggaggcagccagactccggcatgaggaagaagaacggaagagaaaggagctggaggtccagcggcagaaggagttaatgcgccagaggcagcagcagcaagaggctctccggaggttgcagcagcagcagcagcaacaacagctggcgcagatgaagcttccttcttcttcaacgtggggccagcagtccaatacaacagcatgtcagtcccaggccacgctgtcgttggctgaaatccaaaaactagaggaagaacgagaacggcagcttcgagaagagcaaaggcgccagcagagggagttgatgaaagctcttcagcagcagcagcagcagcaacagcagaaactctcaggttgggggaatgtcagcaaaccttcaggtaccacgaaatctcttctggagatccagcaggaagaggccaggcaaatgcaaaagcagcagcagcagcagcagcaacaccagcaaccaaacagagctcgtaacaatacgcattccaacctgcacaccagcattgggaattctgtttggggctctataaatactggtcctcctaaccagtgggcatctgacctagtcagtagtatttggagtaatgctgacactaaaaactccaacatgggattctgggatgatgcagtgaaagaggtgggacctaggaattcaaaaaaaaaaaaaaaaaa

SEQ ID NO: 28475 - DNA, 2461 bp, Homo Sapiens
atttaataaaaggtaatttagaatactacttgtcctttgcagtagtttagtaatgggcattaagctgtgtcctcgaaggatgtacctattactaggtgcattttagaatgaaatattgatattttattagcatataattgtggccatatatctcagattttctgaggcagatctaattttagataattctgttggtagaccatgtgatccttctttttggttttggaaatataatcattgttaatgttttccctccaaatagaatactgttttatccatacaaatcataacagcatctatcccatgctagggttggaaactgatattggtattacttgtgttttttcttagtgtgttttatttcccagtttcatcttcttctaaaaatgaaaatatggtgccttccctccctccaggaagactggcaaatatttccttttatttactgctgctgtggagtgatgagatatgcactttactctttaagattcagcaaaaagcttttcacttctcagtatatccagaatacatcatatctgggacttaggaaaatttgccaagcaatctttgtttttatagatactaatgttgaccctctccagcgttcaatgttataaatagaacaagtcaagctagtgtttatctcctccccctccccaaaactgtggcacagcatataaaaatgtacctcaataatgttctattaaaaatgggacaggggccttatgttttcataatttcccaacaatgtgccgccatatttttgcctcaaggtaaaggttttaacagatgaaaaagtacttcccaattcccccgtgctattcctaacctataaagcccaaatgttttgtgcaatgtgtagtgtgtgtgtataaatacatatattcttgaaatagacataccatcagagacatcattcacaagtaactgatgtattggcatctcattcatatttctgatgtgtgaggtatatggtactaattaccttttccttgatgtttgccaaatttgaataaaggcattggtacgaaattacagaatgtaaagaaaatgtttttggcttgaaaaattaacatattttatgacgtaccacagtatactctgcccaaaccagcaccctatctatctttcctgttctttacatccctgttccccgtccctacttcctcatttttggtatagcacagttcttttgtagcatcattataattgcagttctatggcaattggacagttatagcatggaaacagactggtataaatagtacagtagtcaccagtgtgccacatttgcattagtaatgcaaaatatacattttataaaggacaaactctgtgttatgttttattttcattacattgtataatattgtaagactattgtatgtcctaatttgcattataaatgtttttttcctacgtaaaggcataaatatagcaactttgtataaaggtagcttattagatttttaattttttcttttataaaaaattgtccaacagtgggactaccattgccaaattgtatatgaaatatgaattttacccccatggttaatttcttttataaacattccatatttctctaataaaaagacataagtgatactgtactatgcatacattgtatcttaatgctgtttcagatcagcattttaaattttggtttgcatttttaatattgacaaaacgtaaccactgttaattaaaataaaaccttgttgtatatgtaacaacataattttccctctatcccttcccaccctttgttctctatttctccctatcagtgccaacttcatacattttgtagcatggcaataaaatataacttttacactgaggccgagtgtggctttttggaggaagtggggatgggacgattgccctctagttgtcctttgcatatgactgttttttgccatataagccatgtcatcaggcatgaaaagttttctcatatatgatgtaaacttgcttttaaggacaagtgtgaatgtgctttttaagcttaatttttgtcatgacaactaattttttttatctttggagaagtcagagttctttacaatcaaacgtttattaactggagtacttagaataagctagtaattgaatttagttcaagggctaagcaacacatttttaaatccttatttattgtagagtattagtatactgtcctacaaattatgtaaaatatggtttaatattagatgactttggattttgcaatgccttactgttgtcattctagcataaatatccataatgaggtactcaagttgatactggaagctgagctgatcatacactgacctgaagcattcatgaaaagctgctttattgaataaagtctgattggagttcttttcatgctcactttccccttattgctgaaagtagattgcaataaaaccccaataaaacgtttggtcggataaaaaaaaaaaaaaaaaaa

SEQ ID NO: 28476 - DNA, 6659 bp, Homo Sapiens
tatggacatgcgtgtcaggaatgaaagctctttctctgcctcactcggaagggcagggggcgtaagtgctcagcgcgatctctttgaggagagaggggaggagtacttgagtgcttttgacaagaaggcccaagcagactttgacagctgtatctcttctcaaagaataggccaggagcttttgtttccaccccaagaaaatgttcaggatgcaggtgctcctgggggtcacacccaaaacctcaggtgttccccattggagcctgactttgtcccagatgagaaaaagccagagtgtggcagttgggatgttagccaccagccagagaccgctgacacagcccatggtgttgagcgggagacaccccgggaggggacggcctttaacatctcctcctgggacaagaacgggagccccaacaaacagccatcctcggagcctgaatggactcccgagccccggagctccagcagccagcacccggagcagacgggcaggagccggaggtcgggacccatcaagaaaccagtcctgaaagccctcaaggtggaagacaaggagaaggagcttgagaagattaagcaggagctaggggaggagagtacccggctggccaaggagaaggagcagagcctcacggcagaaaaggatgaggacgaagagaacgatgcctctctggccaactcctccaccaccactttggaggacaaaggccctggccatgccacttttggccgcgaggccaccaaatttgaagaggaggagaaacctgacaaggcctgggaagccagacccccacgagagtccagcgatgttccccccacgaagagaaataactggatctttattgatgaggagcaagcctttggggtcagaggacaggcccggggccggggccgtggtttcagagagttcacttttcgtggtcggcctgctggcggaaatgggagcggcctctgtggtgggggggtcctgggggcccgcagcatctactgcagcagtcagcgcagcggccgtggccggggcctgcgagagtttgcgcggccagaggactgccccagagccaagccccgacggagagttgccagtgagacccatagcgagggctcagagtatgaagaacttcccaagcgccgccggcagaggggctccgagaacgggaatgaaggctcgctcctggagagggaggagagcaccttgaagaagggcgactgcagagattcttggcggtccaacaagggttgctctgaggaccacagcggtctagatgccaagagccgaggccctcgggcctttgggcgagccctccctccccggctgagcaattgcgggtatggacggagaaccttcgtctccaaagagtcaccccactggcagagcaaaagtccaggcagctcttggcaggaatatggcccttccgacacatgcggatcccggcgacctacagacagagactatgtcccagattcctacagacaccctgacgcatttggtggccggggctttgaggacagccgcgcggaggacaagagatccttcttccaagatgaacacgtggcagattctgaaaatgcagagaaccggcccttcaggagaaggcgccccccacgccaagataagccccctcgattccggcgcctccggcaagagcgggagtccctgggcctgtggggacccgaggaggagccccacctgctggcaggtcagtggccaggcaggcccaaactgtgttctggggacaagagtggcactgtgggccgcaggtcccctgagctctcctaccagaactcctccgatcacgccaatgaggagtgggagacggcctccgaaagcagcgacttcagcgagcggcgggagcggcgggaaggccctgggtccgagcccgactcccaggtggatggtggcctgtcgggggctagtttgggtgagaagaaggagctggccaagaggagcttctccagtcagagacccgtggttgacagacagagccgaaagctggagccgggagggtttggggagaagcccgttaggccaggtggtggtgacacctcccctcgctatgagagccaacagaatgggacgcctttgaaagtgaaaagatccccagacgaggccttgcctggaggtcttagtggctgcagcagtgggagtggccactccccctatgccctggagcgggcagcccatgccagtgctgaccttcccgaagcctccagtaaaaaggcagagaaggaggccaagttggctgctccgagggcaggtgaacagggagaggccatgaaacagtttgacctgaactatggaagtgccatcattgaaaattgcgggtccagccccggggaggagagtgaggtgggttctatggtgggcgaaggcttcatcgaagtcctgaccaagaagcagcgccgcctgctggaggaagagagaagaaagaaggagcaggccgtgcaggtgcctgtcaaaggtcgaggcctttcctcccgtattcctcctcgatttgcaaaaaagcagaacaacttatgtctggagcaaggtgacgtgaccgtgcctggcagcagcctgggcactgagatctgggagagcagcagccaggctctccctgtgcaggccccagccaacgactcctggaggaaagctgtcactgccttcagcagcaccgagactggctctgcggagcagggttttaagagcagccagggagatagtggcgttgacttgagtgccgagtctcgggagtcgtctgcgacctcctcgcagcgcagctccccatatgggactctgaagccagaggagatgagcgggcccggcctggcggaacccaaggccgacagccacaaggagcaggctccaaagccatctgagcagaaggattcagaacaaggctctggacagagcaaggagcacagaccaggacccatcggcaacgagcgttctctgaaaaacagaaagggctcggagggggccgagcggctgcaaggggctgtcgtcccgcctgttaacggggtggagattcacgtggactccgtgctgcctgtgccacccattgaatttggagtcagtccaaaggactccgatttcagcttgccacctggttctgcctctggtcctactgggagtccagttgttaaacttcaggatgccttggccagtaatgcagggttaacacagagtatccccatcctgcggcgggaccatcacatccagagggccatcggtctctccccaatgtccttccccaccgccgaccttactctgaagatggagtctgcgcgcaaggcttgggaaaactcccccagtttgccggagcagagctctccaggcggcgctggctcaggcatccagcctccatcctctgtgggtgcctccagcggggtcaactacagctccttcggtggagtgtccatgccacccatgcctgtggcctctgtagcaccttctgcttctatgccaggcagccacctcccgcccctgtacctggatggccatgtgtttgcaagtcagccccggctggttcctcaaacgatacctcagcagcagagttaccaacaggccgccgctgcccagcagatcccgatctcccttcacacatctctgcaggcacaagctcagcttggactgaggggtgggcttcctgtgtcccagtcccaggagatcttcagctcctcgcagcccttcagatctcaggtgtacatgcaccccagcctgtcaccgcccagcaccatgatcctctctgggggcacagccttgaagcctccatactcggcgttcccaggcatgcagcccttggagatggtgaagccgcagtctggctcaccctaccagcccatgagcgggaaccaagccctggtctacgagggccagctcagccaggctgctggcctgggtgcctcccagatgttggactcccagctcccacagctgaccatgccactgcctcggtacggctccgggcagcagccactgatcctgccccagtctattcagctgccacctgggcagagcctctccgttggggccccccgaaggattcctccgcccgggtcccagccgccagtcctgaacaccagcagagagccctctcagatggagatgaaaggcttccactttgccgacagtaaacagaatgtcccttcaggaggccccgtgccatcgccacagacctacaggcctagctctgctagccccagtgggaagccctctggatcagcagttaacatgggctctgtgcagggacactacgtgcaacaggcaaaacaacgagtggatgagaaacccagcctgggagccgtgaagctgcaggaggccccctcggctgcctcccagatgaagcgaaccggagcgatcaagcctcgggctgtcaaagtggaggagagtaaggcctgacagtgcctggctgccacctcgcctctccctactgaggacggtgccgccatgcggcctcgacacagccgacactcgggagcctcaccagatccaccgtccaaatgcgtggcccagactgagagacctccctcctctccactcccgaaagccccgttgtcaaccagcttgcacccgtggatatatggcattgacccgcttgctttgatacggaacaaaaaagcagacgactccttcatcccatctgctcctaccgtgactgtggagtgacgcctcctgtgcagtgcagatttgccctccctgcctcctccctgtcctgccgcgcagccagggcgccttctcagcagtgcttccggcccagccgcccatccctaggcacagtgatttggcagcagggtcattttactttgaggctttttgttttaaaatgtagccaaggtttttacaaaggggaaaggaaaagaaaacaaaaacgcaagctccatgtgtatagctgaacttttatatgtttcttgccagcccctccgctcccttccatctctagcctctgtcctgtttagtttgatacgtcactgcagtaccttaagaggtgactcttaagaatgcatcccctcctgattcctcagctggttcacccttgaggttatttgcaaaaagaaaaggaggttcttgagggcaccgattgcgagcattctggtgcctggctccccgcctgggaagcgatggggtgctcagagcagcaggcaggttgggggagggggggggtcatagttgggttccagctcctggcttgatgagcccagggcgcttacaggcagcccatgaagttgatgacagttttagcatgagaatcacacagggtccctgtcctgggctcctctaaagccagtggatgtgctgggcaccagagacaaatcatggagatggctgctggtggctcccaggttggcccagatggggtgagctgacatactacaggcccatcccaggccccgtgggctctgcttctggggctccataccctgccctgcaggggtgctgtgtttttcacacatttctttccctgaagccttctgtaacctgtcattttccttccttcctcttccggagcctgctgctttctctggacctgtctccacctcccacacagctcatcgtgaacaccacttggtgatggagggagtggacccgtgtgtggtccccaagtgaggccactgggagtttgtccttttcctcctttgcttcactcccagcagcagacccaggttgtcaggacaggagggcctgagctaagcagtaggcatcagtctcgtttgtcttcagacggcgggggcaggtccagggtgaggctgggtggagggctgaccaaggtccaaagggcctgcgcagcctccgggagggcagcttctccagccagaggcttgtgtgagccatcgtgtgctgggcttgtttttaagtaagaaacaaggaaatcactccagattctgtcattccaaggaaagggaaggggacagttcaggtttctcagctgttcttaggggtcactgagcgtctacctcctcctccagaggaggctggctcagaacacctagaggagggggccggggatgcaccccccaccagaggctgccttcagcgtctcacgggtgcaggacagcgctcaggcttgggctctaagctctgtgtctagtgtagaacatggggaaggagcatcttaggaactgctgaagtaacttcttactgctctcacaattctaaggaagcgggagaacggcctcctaccaacagcgcccaccccagagctgcctgggaaagggcagttttactgaaaggtgctttactgttcacctgcatctttcagcagctcccctcctgccctcacctggtcttttccctctttatcccaagcctttatgcttgagtcccttccccaggggctgcccacccgacagttccaggcattccctacctgagcttcttgtctgcttttccttctcccactgcaagcggctgcttgtggggcctgggatgagccctctctgtccccaccggccctccttgccaagccattcctgggtgagttcaggcctgcgggagccacacattcatctccacctggacacttgagccgcatggccagacccctcccacctgatgcggtggtgcgtgtgatttgtcaaaagaaagccttctggatgctgttaagatgtacccttcaggtgaacctggtatcagacccacagtacttgctgtttgagaaaaaaaaaaaaaaaaaaaa

SEQ ID NO: 28477 - DNA, 5451 bp, Homo Sapiens
attatttttctgtccttgccccacctgttttttcctaagtctcagctcgcaattgactatttgttgtgctcccatccatcctggtgacagctgttcccagccaccgcctgtttggatagagcttgcctcctgagagacgcttaggagaggccctcggtggtgtttcctagacttctgaatacttgatacttttctctgtagccttgataattgaaggagaacttgcccattaatcccttgacttgcatttcctttgcttgagtttcttaaacacactccagcattgtctgttgggcacacactgggtctcctgccttttaactgcttttgtaaaaattgtgataaaatttatgtaacataaaatgcatgattttagccactttaagtgtgcaatttagtgcagggaccagccccacagggtcagtgggcttctccctgtgtgcggcgacgagagagtgtagaaataaagacacaagacagagataaaagaaaagacagctggccccgaatgtttggctgcactgttatttattggatacaaagcaaaaggggcagggtaaagagtgtgagtcatctccaatgataggtaaggtcacgtgggtcacgtgtccactggacagggggcccttccctgcttggcagccgaggcagagagggagaggagagagagagaaagacagcttacgctattatttctgcataccagagacttttagtactttcactaattgactactgctatctagaaggcagagccaggtgtacaggatggaacatgaaggcggacaaggagcgtgaccactgaagcacagcatcacggggagacggttaggcctccggataactgcgggcaggtctgactgatgtcaggccctccacaagaggtggaggagcagagttttctctaaactcccccggggaaagggagactccctttccaggtctgctaagtagcgggtgtttttccttcacatttttcgctaccgctagaccatggtccgcctggcaacgggcgtcttcccagatgctggcgtcaccgctagaccaaggagccctctggtggccctgtccaggcataacagagggctcgcactcttgtcttctggtcacacctcactatgtcccctcagctcctatctctgtatggcctggtttttcctaggttatgattgtagagcgaggattattataatattgggataaagagtaattactaccaactaatgattaatgatattcatatataatcattatctaagatctatatctggtataactattcttgttttatattttattatactggaacagctcgtgtcctcggtctcttgcctcggtgcctgggtggcttgccgcccacaatttagtggtattaaagacattcaaggccgggcgcagtgtctcacgcctgtaatcccagcactttgggaggctgaggtgggcggatcacctgaggtcgggcgcctgtagtcccagctacttgggaggctgagtcaggagaatcggttgaacctgggaggcggaggttgcagtgagccgggatcgcgccactgcgctccagcctggcgacagtgacactccgtctcaaaaaaaataaaaaataaaagaagacattcaaaatactgtgcaatcatcactgctacttattttcaaaacttttctatcaccccaaacatccctcccccagcctctataacctccgtttactctgtctatggggatttgccttttctagatatttcatggaagtagaatcgtgtgtctttttatatccggcttctttacatagcttaacgttttcaaggttcacccctgttggagcatgtgtcagaattctctttttaagaaggtaatgatggaccacattctgtctgttcatcctctgatggacatttgggttgttttcaccttttggctatggtgagtttttagttttttttttaaagagagggtcttgtgtcctgtcacccaggtgggagcgcagtggtggagtcagagctcactgcagcccggaccacctggacacaagcagtcctcctgcctcaactcagtcctcagtgtcgggattacaggcttgagccactgcatccagccttcagttcttaaagttgaagaggtgaactaagacaggtctgagagttcaacattccaggccagttttgtcaggtactctgtataggcctttttttctttttctttcttttttgagacggagtcttgctctgtctcccaggctggaatacaatggcacaatctcagctcactgcaactcccaccttccgggttcaagcaactctcctgctgcagcctccggagtagctgggattacaggtgtgtgccaccacgcctggctaatttttgtattttttagtagagacgaggttttaccatgttggtcaggctggtcttgaactcctgacctcaggtgatcaacccgcctcggcctcccaaagtgttaggattacaggcgtgagccactgtgctcggctggcctttttcataactttatttatgtatttttttgagacggagtcttgctctgtcgcccaggctggagtgcagtggggtgatctcggcttactgcaacctccacctcacaggttcaggggattctcctgcctcaggctcctgtgtagctgggactacaggcatgcgccatcatgcctggctaatttttgtgcttttagtagagatggggtttcaccatgtttcccaggctgctctcaaactcctgccctcatgtgatccacctgcctcggcctcccaaagtgctggaattacaggcgtgagccactgcacccagcctgtatctttaatttaaacaattttttttttttgagacagagtcttgctctttcacccaggctggagtgcagtggcacgatcttggctcatgcaacctccacctcccaggttcaagcaattatgctgcctcagcctcccgagtagctggtactacaggtgcatgccaccacacccagctagtttttgtatttttaatggacacggggtttcaccatgttgaccaggatggtctcgatctcttgaccttgtgatccacccgccttggcttcccaaagtgctgggattgcgggtgtgagccaccgcgcccggcctaattttaaaacaatttgtattgtctgggtgcggtggctgacactcgcagtcacagcactctgggaggggtgggcggattgcttgagccgggagttcaagactagcctggacaacatggtgagactccgtggccacaaaaaatagaaaaaactagggggcatgatggtcgcagctactcaggaggtgaggcaggaagacagagcccaggtcagtgcactccagcctatgcgacagagtgaggtcctgtcttgaaaataaaaagagggaggaaacgttggcctgtggctaatcagaaagggcctcccattcttggggtcgcaacagtgtcttccgtccactcattcgctgtctttttcccaggctgtggctctctgagggcttagactctgccttattaccttttcctaagctgtagaagaggtcctgctggcccgagtggacgtgttgagcgattgctggatgaaagactagcggaggtcctgcctgccctgtgacgctacctcccaagggacagtaacggcctccccaggggcttcctcccgagggtcgccccacacatgctgctcgagggcccctgtggctgtctctgaacattcagcatctcactcctcctcggagccacctctgcccagttgaagccctgggcccagggttgggcctccccagcccaggcccatacaacctcggcacgttttgtaatccagtgcggtcctgttctgccctcagcccttcttccatcagcactcattctggttctgattccggtcactgctggcatcaatccctgtacttcagaggtagcgatggcagccctttcagagcccaagtggccacccagccttgcagcccctggctcaccttccacttgctctctgcaactgcccctgccagccctggccttgcctcctggactccagatcgcctcgggtttggccacgcctcgtcattccctctgttgctgtgtgctctgggaggcagttgtggcctctttccagttgccgtagcaacttctataaagaaactgctcacttaaccttgtcagtggctcctttccaagccagaatccagactctgaaacagggcgtgccggaccctgcatgcttgggacgctccagcccactgtcactcactgacagtgccatggctgcctgtttgtggttccccgtgcgagccttggactttctcacctctgctgtacacatgctgcctgttcctcagacatccccttccttcccagctggctaaaactcctttgttctttggttttaagtgttaactgaggtctttccccctctctggcttttgccgtattcttcaccatcaagtgaggttctgtagccccgcttgatgcttctcttggaggcacacaggcgtgtgcactgcaagatgacggtctgtttcttctccaacatatgcccaggtcttgctggttcctttgcatgacacaacggctcctcaggaaacacttgctgacctgtgaggggctgttcttggagtctccctgtcaggtgtgacagattggggagaggctctgggtgatgttgtgtttcctgggttctcccatctctcactccagaggagaggcaggaggcgacggtcctgacatctcacacattgcccgactcgctggtgtatggagccgactggtcctggctgctcttccgttctctgcagcgggccccctcgtggtcctttcctagcaacctaggaaccaagacggcagacctgaagggtgcaagcgagttgccaacaccctgtcatgaatgcagagaggataacgatggggagggccatgccagaccccagagtggaatgaagccactcacagagggcatgaggaagaatggcacctggctgcaggctacagcagccaccacacgtgactgtggcgtgaacccagaagaagcagactcagccttcagcctcctggccacctgctccttctatgaccatgcgctccacctctgggagtgggaggggaactgagcttgaaatcatgaagccccttcccacaaggaaaccaggagggagactgcgagtgagtgcccgggaccacctcatcagagatgcttactgcagccctgcaggtgcctgggcactgatggaatccacagtgtagtcagaaaagctgttgacttctcttaaatcagcttccctgctgggcccctgaaagtggactgggtgattctgtctggcagagagtggggaaaagacgcggtttccagcttgcagatttgttaagtttctcaggcagattttgactttcagcctttcatacttgtttaagcaactatttgtattaaatgaagtttttcaaaaaaaaaaaaaaaaaaa

SEQ ID NO: 28478 - DNA, 3763 bp, Homo Sapiens
ttttgatgagaaggggcctcctttttaatattctttccatgtggaatcatcagcagtaaagagatctatagatctggaagcagaagagctggctggatggaggggactttgctgacatcccctctgaaaaataaggtcggaagagtgggcccgggggagggtgattttcatgatccatggcatttcattacccttgtaaacagatactggagctgtgctcatagccaaactggaaaactagattatttagcaggttttctttccatagctgagccataatcttcccttaggagagatactgtatcttatccttgatggtacagtcagtgcctagaactgaaaaactactcaataaatggatttgttgttttgtgataaggatgatgtcttcttactttgcccaagcctggaaagtaggccaaatatataatagagtttctttcatcttcccagctcgagagtcaggatgtctcagatttaacaacagttgaaagggaagactcatcattacttaatcctgcagccaaaaaactgaaaatagataccaaagaaaagaaagagaaaaagcagaaagtagatgaagatgagattcagaagatgcagtaagtcactttcttatcattccccatttcgaggctctcacttgaccacacaaatttaataaatttttcttggtgtttaaattttcttttataaactcaaaaaaaaataaatagataagaagaaaaaataattaccttaccacagagatatatcctgcttataagtttcaagatagtttctatacatatatatctataaatttttttttccacaaatgtcaaatactgttttgtagcctatttttcacattagatatggtgaatgttttccatgtcactaattatacatctaggtcatagttttcttaaaaatagaaatagctttattacattttctgattgtaaaagtagtatgggctcattgcaaataattcagagaatacagaaaaatagaaaaaaatcacccataaactcaccacgcagagttcactctaagtatatagttgggtataatgtttgggtatgtaccttttcaaagtttttttagatgtttgatatgtatagctaaatattttcatgtcagtaaatatgctcataaatcataatttttaatggctacattgtatcccattatgttgttgaactataatttaaccaatccctatagtgcttctggttgggtatttttacttttgacattatgatgaggatctttggacatatctttgcatacttgtccattacttcctaagataaactcctagaggtgtaattgctaattcaaatagtatgaacattttcaaaggcttttcatatgtatttccaaatttctctccaaaaaggtgttccagttcactctgccagcatgtgtttgtgtcccatattctaataccattctttttttaatagtggtctgatttatgaaaaatgttgtctatgaaaataatatttccttagttaataatgaaggttgtttcccccatgttgattgaccattggtattttggtaaatttcctgttcatgtactttgttcattttcaaaaattgacatggcccctttattcatttgaaagaattatacattaggagtattaactgtttccacatattttgcagatatttcccctaaatctgttaatgttgaaaactactggtttgattataaatttgtatattaaatttttaccatcagtgtgaaattcaataagatagagttatggagatagtgtctaatgctgcaaacagtctgtgtagtacgatacagtgacccagtgttgttctttttgttaacaggtaagaaaagaagtttttgttttacgttttctcaaattcctttggagtagaagtgttttatcttcattcctcaaggcaccaagcctaatgccattgacccctttaagaattcgtttttgaattgtctgaaacttttattgacttcataatatcttgagtattcgttcttataagttaacttagttacctggatctttgtttagaatcctggtttcttctttttctgaggagcagctgaaccgttatgaaatgtatcgccgctcagctttccctaaggcagccatcaaaagggtaaggatggaccaccacacttcatctccatcacgttttagaactgaactcaagagccatgtccattggcatttgaagtgaggtgttagacaagtcaggggattatttaggtgggaaaaaaaatgcacttcagttatcttacctttttctgtgaattacttggtactgtgttccaaagccagtctttgactattgtgatcacggagtctttgtgcttctttcaagctgatccagtccatcactggcacctctgtgtctcagaatgttgttattgctatgtctggtatttccaaggttttcgtcggggaggtggtagaagaaggtgagtagtgttggttacaaatactggattgtacctgtggtggtcttatttttaagaatatctacacaaaggagcttattaaagcacctatgggagttctcatttgcacttgaagttgaccaagtggggagccctttatttaggagaacatgactgttattccttgcaagtttcaataacagatggtaaggaaccatctgggaaatcccctccctgattcctttcctcagcccagggtgaaagaagtagactttgtattttctgcagtggactttgctcatttctgctgccaaaagtaaagatacaagaaaagcaatcacaggggtgacctgtgtgggatgcactggatgtgtgtgagaagtggggagaaatgccaccactacaacccaaacatatgagggaagccgttagaaggttaaagtcaaaaggacagatccctaactcgaagcacaaaaaaatcatcttcttctagaccaaagtctagaaaggcctatgttactgacggaagaagtattggttccagacttcctataagactgtctgcattggtgctttagtatctcaggcctccaaggattccatgatgattttaatgtctttctcaaaactctgatatttgtcacacctagaaagtatgtagcctgattgatacttgccttgactaaattttgggacctcttggggcattttgaagtatttaactgtcttgaccagttggaagaagatacgtgggccataagcatcttctggacaggggaactgctttcagagagaaaacctttccaagagagttttgttttgttttggtttcgttttgtttgagatagggtcttgctctatcacctaggctggagtgcagcggcatgactgcagccttgaactcctgggcttaagtgaccctcccacctcagtctcctgagtagctaggactacaggcacacactactgtgcccagctaacttatttttattttttatggagatggggtcttgctttgttgcccaggctggtcgtgaactcctggcttcaagcagtcctcctgcctcagcctcctaaagtgctgagggctttaatggtttcacattgaagcctgaagttgctaagacttaggttgtttcttatatctggttttaagtagatgaaacaaccagaaacttttacttgtgatactctaccatgaaggatgcggtaatggcaggaatagcagaataattggtgcttgtaaacatttaagattctcctgtggattttggtgagtgatcattaaactgttttccaacttgctaaaaaaaaaaaaaaaaaaaaaaaaaaaaa

SEQ ID NO: 28479 - DNA, 5215 bp, Homo Sapiens
atctgagtagccagcgtcgccggcgaccgcggagttctgggctagtgggaccccgcgcgggctggttcgggatgagcgatggcatcggtcaaggtggccgtgagggtccggcccatgaatcgcagggaaaaggacttggaggccaagttcattattcagatggagaaaagcaaaacgacaatcacaaacttaaagataccagaaggaggcactggggactcaggaagagaacggaccaagaccttcacctatgacttttctttttattctgctgatacaaaaagcccagattacgtttcacaagaaatggttttcaaaaccctcggcacagatgtcgtgaagtctgcatttgaaggttataatgcttgtgtctttgcatatgggcaaactggatctggaaagtcatacactatgatgggaaattctggagattctggcttaatacctcggatctgtgaaggactcttcagtcggataaatgaaaccaccagatgggatgaagcttcttttcgaactgaagtcagctacttagaaatttataacgaacgtgtgagagatctacttcggcggaagtcatctaaaaccttcaatttgagagtccgtgagcatcccaaagaaggcccttatgttgaggatttatccaaacatttagtacagaattatggtgacgtagaagaacttatggatgcgggcaatatcaaccggaccaccgcagcgactgggatgaacgacgtcagtagcaggtctcatgccatcttcaccatcaagttcactcaggctaaatttgattctgaaatgccatgtgaaaccgtcagtaagatccacttggttgatcttgccggaagtgagcgtgcagatgccaccggagccaccggggttaggctaaaggaagggggagatattaacaagtccctcgtgactctggggaacgtcatttctgccttagctgatttatctcaggatgctgcaaatactcttgcaaagaagaagcaagttttcgtgccttacagggattctgtgttgacttggttgttaaaagatagccttggaggaaactctaaaactatcatgattgccaccatttcacctgctgatgtcaattatggagaaaccctaagtactcttcgctatgcaaatagagccaaaaacatcatcaacaagcctaccattaatgaggatgccaacgtcaaacttatccgtgagctgcgagctgaaatagccagactgaaaacgctgcttgctcaagggaatcagattgccctcttagactcccccacagctttaagtatggaggaaaaacttcagcagaatgaagcaagagttcaagaattgaccaaggaatggacaaataagtggaatgaaacccaaaatattttgaaagaacaaactctagccctcaggaaagaagggattggagttgttttggattctgaactgcctcatttgattggcatcgatgatgaccttttgagtactggaatcatcttatatcatttaaaggaaggtcagacatacgttggtagagacgatgcttccacggagcaagatattgttcttcatggccttgacttggagagtgagcattgcatctttgaaaatatcggggggacagtgactctgatacccctgagtgggtcccagtgctctgtgaatggtgttcagatcgtggaggccacacatctaaatcaaggtgctgtgattctcttgggaagaaccaatatgtttcgctttaaccatccaaaggaagccgccaagctcagggagaagaggaagagtggccttctgtcctccttcagcttgtccatgaccgacctctcgaagtcccgtgagaacctgtctgcagtcatgttgtataaccccggacttgaatttgagaggcaacagcgtgaagaacttgaaaaattagaaagtaaaaggaaactcatagaagaaatggaggaaaagcagaaatcagacaaggctgaactggagcggatgcagcaggaggtggagacccagcgcaaggagacagaaatcgtgcagctccagattcgcaagcaggaggagagcctcaaacgccgcagcttccacatcgagaacaagctaaaggatttacttgcggagaaggaaaaatttgaagaggagaggctgagggaacagcaggaaatcgagctgcagaagaagagacaagaagaagagacctttctccgcgtccaagaagaactccaacgactcaaagaactcaacaacaacgagaaggctgagaagtttcagatatttcaagaactggaccagctccaaaaggaaaaagatgaacagtatgccaagcttgaactggaaaaaaagagactagaggagcaggagaaggagcaggtcatgctcgtggcccatctggaagagcagctccgagagaagcaggagatgatccagctcctgcggcgtggggaggtacagtgggtggaagaggagaagagggacctggaaggcattcgggaatccctcctgcgggtgaaggaggctcgtgccggaggggatgaagatggcgaggagttagaaaaggctcaactgcgtttcttcgaattcaagagaaggcagcttgtcaagctagtgaacttggagaaggacctggttcagcagaaagacatcctgaaaaaagaagtccaagaagaacaggagatcctagagtgtttaaaatgtgaacatgacaaagaatctagattgttggaaaaacatgatgagagtgtcacagatgtcacggaagtgcctcaagatttcgagaaaataaagccagtggagtacaggctgcaatataaagaacgccagctacagtacctcctgcagaatcacttgccaactctgttggaagaaaagcagagagcatttgaaattcttgacagaggccctctcagcttagacaacactctttatcaagtagaaaaggaaatggaagaaaaagaagaacagcttgcacagtaccaggccaatgcaaaccagctgcaaaagctccaagccacctttgaattcactgccaacattgcacgtcaggaggaaaaagtgaggaaaaaggaaaaggagattttggagtccagagagaagcagcagagagaggcgctggagcgggccctggccaggctggagaggagacattctgcgctgcagaggcactccaccctgggcacggagattgaagagcagaggcagaaacttgccagtctgaacagtggcagcagagagcagtcagggctccaggctagcctggaggctgagcaggaagccctggagaaggaccaggagaggttagaatatgaaatccagcagctgaaacagaagatttatgaggtcgatggtgttcaaaaagatcatcatgggaccctggaagggaaggtggcttcttccaacttgccagtcagtgctgaaaaatcacacctggttcccctcatggatgccaggatcaatgcttacattgaagaagaagtccaaagacgccttcaggatttgcatcgtgtgattagtgaaggctgcagtacatctgcagacacgatgaaggataatgagaaacttcacaatggcaccattcaacgtaaactaaaatatgagcggatggtttctcgctctttgggcgcaaatccagatgacctgaaggacccaattaaaattagtatcccacgctacgtcctctgcgggcaaggaaaggatgcacacttcgagtttgaggtcaagattactgtcctagatgagacatggactgtattcaggcgttacagtcgttttcgagaaatgcataaaacattgaagttaaagtatgcagagcttgctgcccttgaatttcctccaaagaaactatttggaaataaggatgaacgtgtgattgctgagagacgaagtcacttagagaaatacctcagggactttttcagcgtgatgctccagtccgcaacatctcccctccacatcaacaaagtgggactgactctctcgaaacataccatttgtgagttttcaccattcttcaagaaaggagtctttgactacagcagccacgggacggggtagagccaggggtgatggaggaaccaccacagcagtaccttctcgtcgaagcgggctccgatgcagggcagctcccccatgcgaggatccgggtctgcctcctcctgctgaagacagacatgcagcagcgggcccgggccacctcacgtttccatacctagtgcctgagtttggggatgggatgctctgcctgctgatgtggccctgacaggcagccgttaccgttccattgcggttgaacgtggccttttcccacagtgcttccttctcactgcgcagcaaagttcgtcccctgtggcaagatagatgtggttgggccatcgtgggttccctgagcccagccagcctgggacctcccaaagtgggtggcttaccagaccacccttaaatgactttcatctggtttcctctttcaccaaaatatactcgtatttttatatttcttccatgtggctggctatattccaagaaaagcattttaaattatttcattgtatttttttctttttttccctcatttgaatcagaacttttatataaaacccaaacactgatgtttacacagaatttcatattctgcaaaagggattttttgatccaatcatgactgtagtcttccatgcttgacaaattggatgtagacaacattacttaaaacttctataaatccctacaattaggatatttatttaaccttgaatattcaagaacattctcccaaatctaaatggctactgtgcattcttgagctttttctgctaagcacaaaatgaacgcaaagctaaatgcatatttttaagtattattcacattttttgttacagaatctattggatctttggctggaaaactagaatttatagcagtttattaatgataccttaaattactcaggacttaatgtagcattgcacttctgtgtacagtaaaactgctttgttttactaaagagaaaaatgtgagtggaaaaaatatgtatgtgttatatactcaaatgtatataattctatctatagatttatatatgtatacattctgtacagtagttccatcaaaatatgtaataattcacaccaattttattaaatgtatttgctttttcaaaatttaaattgagctgctatcaatattaaatgaagttatggcatctaaaaaaaaaaaaaagaaaaaaaaaaaaaaaaaaaaa

SEQ ID NO: 28480 - DNA, 2190 bp, Homo Sapiens
atttgaaatctaggtcttcctgagagtccgcgggcttccgctcccagcgcgggattctggagggaaattgagggagacttggaaaccgcgccaggcccaacgggtacctagaagggagacaaagccaggcctgctgcccagtttgagctctgggaagaagaggagcaggccgggacgcccaccgaggtatcccagaggtgacagaacttgatctgggcctggaaggggaagaattcgggaaaagcaacgtggggcattccagtagtaattgatagaaatattacgtgggataggatttattctctccacacttctgaaccaatgaatagaaaatgggaagcaaaactgaagcaaattgaagaacgagcatctcattatgagaggaaaccgttgtcctcagtgtatagaccaagattgtccaagccagaagaaccaccctccatctggagactatttcatcgacaagctcaagcttttaattttgttaaaagctgtaaagaagacgttcatgtatttgctttggaatgcaaagtaggagatggacaacgtatttaccttgtgacaacctatgctgaattttggttttactataaatccagaaaaaatctcttacactgctatgaagttattcctgaaaatgctgtgtgcaagctttattttgatttggaatttaacaaacctgccaacccaggagctgatgggaaaaagatggttgcattactcattgagtatgtgtgtaaagcacttcaagagttatacggtgttaattgctcagctgaagatgttttgaacttggattctagcactgatgaaaaattcagccggcatttaatatttcagctccatgatgtggcatttaaagataatattcatgttggtaattttttgagaaaaattttgcagcctgctcttgacttgcttggcagtgaagatgatgatagcgctccagagacaacaggccatggatttccccatttttcagaagcacctgcaagacaaggattttctttcaataaaatgttcacagaaaaggctacagaggaaagctggacatcgaattcaaagaaactggagaggctggggtcagctgagcaaagcagtcctgacctttcatttctagttgtgaagaataacatgggagagaagcatctttttgtagatctcggagtttatacaagaaatagaaactttcggctatataaatcatcaaaaattggaaagcgtgtggctttggaggttactgaagataacaaattttttcctatacagtcaaaagatgtttctggcgaatatcaatattttctctcttctttggtcagcaatgtcaggttctcagatactttacgaattcttacatgtgagccatctcagaataaacaaaaaggagttggatattttaacagtatcggcacttcagaaaccattgaaggttttcagtgttctccctatcctgaagttgatcattttgttctttctttggtgaataaagatggcattaaaggaggaattcggcgttggaactactttttcccagaagaattactggtttatgatatttgtaaatatcggtggtgtgaaaacattggaagagcccataagagtaataatataatgattctggttgatctgaaaaatgaagtttggtatcaaaaatgtcatgaccctgtatgtaaagcagaaaacttcaaatctgactgtttcccattacctgctgaagtatgtctcctgtttcttttcaaagaggaagaagagtttacaacagatgaagcagatgaaactaggagcaatgaaacccagaatcctcataaaccatcacctagcaggctgtcaacaggtgcatctgctgatgctgtctgggataatggcattgatgatgcttattttttagaagctactgaagatgctgaattagctgaagctgcagagaacagtcttctcagttataacagtgaagtggatgaaattcctgatgaactaattatagaagtattacaagagtaactaattcactatgaacacttttgtcaccaggctataatttgcctgatgtctgtgagatttgataaatatatcattcaacctgtttatataaactaagttttattactttgctttccaatttttgttttttacttctgtaaaccaatttcattaaaaattagctttggtgtaaaaaaaaaaaaaaaaaaa

SEQ ID NO: 28481 - DNA, 5218 bp, Homo Sapiens
tgtgaagaatgtggcaaagctaacctatcatcaacccttactccacataagacaattcatatttgagagaaaccctgcaaatgtgaagaatgtggcaatgcttgtaactaaatctcaaactttactaaacataagaaaattaatactggaaactttacaaacctgaaagatgtgacaatgattttgacaacaccttcaaacttttctaaacataaaataaatcatactgctgagaaatcttaaaaatatgaagaatggtacaaagcctttaaatggttgtcacacttgattgtaggtaagataatttatactggaggaaactcccagaagtgtgaagaatgtggcaaaacttttaatttttcacaccttagagcacaggaaagcacttcagaaaaattgtacaaatataaatgtggaaaagccattaatatctgcttacatcttactcaacattagagagttagtgcttaataaaagcattataaaagcaattagtgtaaaatcagaaaatgaaagtttttttttttttttagatggagtcttgctctgtcacccaggctggagtgcagtggtgtgatcttggctcactgcaacctctgcctcccaggttcaagcaattctcctgccttagcctccagagtagctgagactacaggcacacaccaccacatttggctaatttttttatttttagtagagactggctatcaccatgttggccaggctgatcttgaactcctgacctcaagtgatccacatgcctctgcctcccaaagtgctgggattataggtgtgagtcactgtgcctgacaaatataagcctttaaagagaagaaggttttcattttgaagacaaacattaggtacataaagagggttgtagtgtctttacttgtatcacagattttattgtacacattatgtactaaaggaaaatcctgaagcagtgctcaaactttgatcaacatcagggagtttatattggagaaaaactgcaaatgtaatatatttggaaaaacatttttcaaaaactactgcttagaaaacaccaggggatttatactaaaatatatttttgcagatgcagtaagtataaaagaaatttaatccaaaattaagtgtgtgtaaatatcagagaattcacagtagaaatatctaaggcactgacattttagacattgaactaatcagtgtgctgagtacagaaaataatccaaaattaaagttggtagataaattatttgtatataactttaaaagaggtagaaatatttttagttataattacatttaaagtatacttttttctttgaaaaaattacaaaatttttaaaaagtgaatgatgtaattcaactcaaattacttcatgcttttcattctattcacacgtgaaagcatgtgatcaattgctgcttcatcaaagatatgagacattcttttttgttaggtgggcaatattttttaccttttctatggaagagtaaagacattacaatgtaggatgcatgataaaaatctaagtggagaggctctttgtgtttaatttataatattgaatgatgtatgagggaagtgttcagaggaatattctgcattctagtgaaaatatcttttattttagttaaaattaaattaaaattagtagtatatcattttactaactacttttatgtaataaaatgcagcacatttaaaaaattttagattattgtgaacttaattttttaattaaactttttttttaacatgttaagaccaattgtgcattcagtgaagtattatcatgccactaacttcaacctatcccaccttactcaagggtgttggtaaaagatagtaacaatgtactatttaataacagagtggactaacatctctaataatttctcttgccagtgactttaaactaaagaacttaattaaagaacattgttcccataggttaaatttttattcttatttaaacatatttttcttaacttttgtgggtacatagtgtgtgtatatatttatgccatatatggcatattttgatacaggcatatgaataggtattaatcacatcagggcaaatgaaatatccatcaactccagcatttatcatttgtattacaaaccgattctacacttttagttactttaaaatgtacaagtaaattgctattgactatagggtcattttcatgggtataataaaaattatatacaagtataaataaaatcctgagtcttaaaattctgagtcctgcttaaacattttaaaaattttgttatgtatttttctttgaacatgtctctctgcctgcaaacataacagaattttagtattggtttacatagagttaactatacccatatattactctaaaaataaatgttaagtgcaagaaagttatggactgtttttgtgtgagtgtgagtttgtacctattttcaaaagaaaagagcaatattggaacaaaacaaatattttaataaattaatgtactagacaactgaaaacttcaaaaatgctgaaagtaaatgtatactctgctttgtattgaattcattactgccaaatcttctgacttatgattcagaatctctccatgcaaattatgtttttacttgcctgttagtcatgctagacctataattttcttgtttcttaccatttttttcttttatactttatgaggtattatgtgagctgttcatggattataagaatgatttttataaaattcagtactgcacacaagataagttttagatgtatttccaaaattgtgtattaattatatttagttagaacattccatttgttcttttaattggagaatcctatataagcctatatttcttattcttttctcttgttatgattgacataagtaaatttatttatttattgagccaatttgttcaggtaagaactaggaatgcttcataagtcatgaggatgtttttatatatatatgtggcaaacaaatatgacagtgcttgctgtgtaacagatgttccataataacctgtaaacattcctgctggagttagtttgtaacttcaagtcagagatggaaaataccaatagtgaagaaataacattgattcttcatgtgcagataacattttttttccatgttgcaaagctaaattttgctgaatttaaaaagaaattttggttcttttatttcctaattacctttagttttgtttgtcttattatgtgacttctgtgtattcatcacagcccttctccttctttttctatgtgatggctacactttgctcactgttgtcttcatgccatgtcattttatacagtactttgtaggttttgatgagaaagttggtatttttaatgcactcaaaaattgctttttattggagagtacttatcaatataactttctgatcagttaattaagataaaaggcatacattgtccacaggtgagaggattaaatcagttagcattatttttttctgtttgtaaaaggaaaaacttattaaatttttaaacggagttattaaacagagtttcactcttattgcccaggctggagtgcaaatatattgtggcaaatataaaatttgctagaaaatacatcttagaaattaagttataagagagcaaatggtaagtgaagaattttaaatttaattttctatgatatagcataacatacatttccatgcagaatcttttatttttaaatgtgaaatttaaaggttgcaaaataataaaatgacttctgtggatttgatatttggaatgatatttcttttttatattgatattacaattccgaggaatttttcactcattatttttttagtgggtgaaggtgagtgtacagttattgctttttgtcacctaactatagtcagcttcttggtcattttctctagaaaacttttgaagattatggcagctttttgattaaacattttctgttatttttatgcaaattcatttattgtgttcacagggtggccagtcatgagaccataagcaacagctgcccttttagtgtctttcatgccattaccatctgtaataaataaatgtgtactttattctgcaaaacatgatgtttggaagtatatgttgtcaaatgcttaattctaggtaattaaggctttacctcacatcgttaacatttttgtggtcagagtatgtgacattgtcaatgtttttcaaaaacacaactacattattatgatctgtagtcactatgctgtacaaaaagatctcttaaacttattcctcctattaaactataattatgtattctttgaccaacatcttccaaaaccccccttttttgctaaataccttggtgtctggtggtcaccactttactctctactttaatgggattaagtttcttagaatccctgtgtaagtaaaatcatgaaaaataatctttgtgtctggctcatgtagacaaatatgatgtcctccaggttaattcatgtgattgaaaataatagaaatttcttttttaaagacgaagagtattccattgtgtatatgtaccacattgtctttatttactcataaatgttgaactgttgattgtatattttggtaattgtgaagagtgttgcaaacaacatagaagcataaatgtttcttcattctgatttcacttgttttggatatataacagtaaaattgctgtattgtggtttaattttaaattttttgacaaatttttgtttttcatagtgactctcctcattcacattcaaaccaacagtgtgcaagcattccttttcttcatactttgactaacactttcttttctttttaataagagtaattctaacaggagtgagttgataatctcctggtttttctttttgctttcctgattatagttgatattgagcattttttatatatcttgaccatttgtcttttcttgaaaaatatttaagccttttgctcatttttaatagttatttgtcttctgttgtatagtcatttaagttgtttatatgtttctgttattaaccctttgtcccacgtatgatttgcaaatattttctcccatttttttcagttgtctcattttgttgattgtatcagattccatgaagcagctttttaatttcaagtaatgtaacgtatctatttttcttttgatttccttggattttgaggttaaataataaaagtcacagcctagaaaaaaaaaaaaaaaaaaaaaaaaaaaaaaaaaa

SEQ ID NO: 28482 - DNA, 3677 bp, Homo Sapiens
aggaggagactgaggagcaggatggcggcctcggccctgtacgcctgcaccaagtgtacccagcgttatcctttcgaggagctctcccagggccagcagctctgcaaggaatgtcggattgcacatcctattgtaaaatgtacttactgcagatcagaatttcaacaagagagcaaaactaacacaatttgtaagaagtgtgctcaaaatgtgaagcaatttgggacgcccaagccttgtcagtactgtaacataattgcagcatttattggtaccaagtgtcagcgttgcacaaattcagaaaaaaagtatggaccacctcagacctgtgaacagtgcaaacagcaatgtgcttttgatcggaaggaggaaggaagaagaaaggttgatggaaagttattatgctggctctgtactttatcgtacaaaagagttttacagaagacgaaagaacaaaggaagagcctgggatcttcacattcaaattcatcttcttcatctcttactgagaaagaccagcatcatccaaaacatcatcaccaccatcatcaccatcaccatcgtcacagcagtagccatcacaaaatcagcaatctaagtccagaagaagagcagggactgtggaaacagagccataaatcctctgcaacaattcagaatgaaactccaaagaaaaagcccaaattggaatctaagccatctaagggagatagtagctctataaatcagtcagcagatagtgggggaacagacaattttgtccttataagtcaattgaaagaagaagtgatgtcacttaagcgtctcttacagcagagagaccagaccattttagaaaaagataaaaagttaactgaactaaaggcagactttcagtaccaagagtcaaatttgagaacaaaaatgaacagtatggaaaaagcccacaaagaaactgtggaacaacttcaggccaaaaacagagaactactcaaacaggtcgcagcattatcaaagggtaaagaatttgacaaaagtagaagcatactaacatctccttgagaaagtcatttgtttagcatttcttcttacaatgtaaatttggggaaaaaaaattctgtgaagcccttaaattctgtgtagtagaaaaatatttttgcacaccaaatgaattggtgtgtttcctgttcacttttgtaattgatatacagcattttttaagttgtaaaacattcaaataaaacttcaactggtttgaagtaactttttagttatttgatatccaggaacttttttgccagcaatagtattaaacagttgtaaaggagtgcgtgagtagtgctctttatgaaacgcaacatgcaataatagagtaggtatggtttcagaagtcagagcagcagggtttttttgttttgtttttgttttacactatgctaatttcagacaaacagttttcaatttagaaatacaaaaacttttaaactcgaaaaatggcgaacactggttttttgggaattgtgtttttactttgcatcaagatgaatttaggagaaaatcacggtgcttttattaaatgaacttcagatatatgtaaatttgttttttaaagttacatcattaacattagtaacctagcattttcattattggtataggaattaatgtttattgtacagtatctaaggtaaaatgtgtttctgttttgtaaaaactactgtagatttttacttacaagtgcctttttgccacctaatgtttttatttataggaatgctgatcttttgtacatacattttgttttaaaatcatgtttaataaatgtttgtatataaatgcatatgtacagaagcctatttcaaaaggaaatcaaagttgctagtaaaatgtttgagattacatttagaactaactgataatgcatatagattgtagaaaattttgtgatttgtttctgtgtgataagggaagctgttggtctttgaattcatttaattatgtcaaaatagttccccaaagatttaattttaagttgcttcttaaagagtaattttattttttatgtcatgtggcttcatattagtattgtgtgagttacatgttttgctttatattttataaaattttttaaaaattttaatgtttctgcaatgatccatgtatctgctttccctatgtgtggttatctaagttaatatttatgtacaatgtaatttgtaaatttaaagcaaatctgaaaaaaattaaatgatctttttaatccaatctgtgataatctttgaataaattggaacctactataagattcaggcattataagtaaattgtcctaaagtctttaaaattgtctataaaaggttaaggtagggtgggataggttatatgaagttattgactatattctgatccagcggttttcagcctgaaatagaatttatctcctagttattatcagttcagagttttagtttgattttaaagtattgctagatacactgtatagagtgagttgcttctcttaataatttatgggcaaagataaatttgcttcatgtaaaactgttactaaatttataagttttaaaggttttgttttatacaagcattgattgtgaatgtcatatcaaagattggctttcttaagaacacatgattgaaacaatttttttttaacatgacgtgtttcaatagactgttctcatagttcattataaagtgaataccaaataattctttgtccattttgaaagcataatatagggtaattttcaagtgatacaaaaagattcagttagaatcttgtaaactaaaccagtttatttttatgggatcttcatgtaataattttcttaaatttagtactctcaaccatgatagataatgccttaacatggattttaacgtttgcaggatttgctaaattcataagatagttattacctttctttgaaatttgtaatgttttatattcttgtttcatagccatttgtcagtccacagtggtcattatggttttactttttgatagttcttacaccttgttggagaaactacaaaagaaggttgtcctcgtccttccccttagctaacatcaaaattaaaaagttgaatattaatattagctaacattaaaatggaaggtaattcagttttagtgttagctaacattaacagtctaataatttagctttgtaaattccaaggctaaaaccctttcatgggcttcacagtatttagtcctaattaaatacccttctttattccatgaccttattttataacttaaatttttttgcaattgtataaattagtaattcagtcccagtcctggatctctgtagtgttttgacataataaactgatattctttaaatgtggacctgtaaggagatactatggtgtggtgtattgtgcttttagcctgttttccactattaattagcatttaccagtaagggtcattttgactcaagttatttatgtattaatagcctgtgaatattgcagtcctttttagattatattggtctaaatatgcattctgcagtgaacctgttaagctgttcacatgtatagactattgaaatactgtacttgtacacatctgactgttgacattttgtacttttttctagatccaatatttcacaataaaaaacttgtcaaagaaaaaaaaaaaaaaaaaaaaaaaaaaaaaa

SEQ ID NO: 28483 - DNA, 2998 bp, Homo Sapiens
aacgcaaagcaaacgctgcagtgacggttcctgcgtcaccttaactccaaagtaaatgctaacgtttcccgtgtctgtaccttctctcaatcggcactctcaaaacatctggcacggtgttcactaccctaataagacctcagcttccctcgggaggggcgtgccgccgccagacggattactggcagttcgtgaaagacatccggtggctcagtccccactcagcccttcacgtggagaagttcatcagcgtgcacgagaacgaccagagcagtgctgatggtgccagtgaacgtgctgttgccgagctgtggctgcagcacagcctgcagtaccactgcctctcagcccagctccggcccctgctcggggatagacagtatatcagaaaattctacacagatgctgccttcctgctaagtgacgctcatgtcacggccatgctgcagtgcctggaagcagtggaacagaacaacccccgcctcctggctcagatcgatgcgtccatgtttgccagaaagcacgagagcccgctcctggtgacaaagagccagagcctgacagccctgcccagttccacatacacccctccaaacagctatgctcagcattcctactttgggtccttctctagcctccaccaatccgtgcccaacaatggctcagagagaagatctacttcctttccactctctggccctccccggaaacctcaagaaagcagagggcacgtctcaccagcagaggatcaaaccatccaagcccccccagtttcagtctctgcactagccagggattcccctttgaccccaaatgaaatgagctccagtactctgaccagccccatagaggcatcctgggtcagcagccagaatgattccccaggtgatgccagtgaggggcctgagtacctggccattggcaacttggacccccgaggccggactgccagctgtcagggtcacagcagcaatgccgagagcagcagttccaatttgttctcctccagcagctcccagaagccagattctgctgcctcttccttaggggaccaggaaggaggtggggagagccagctgtccagtgtcctccgcaggtccagcttctcagaggggcagacactcactgtcaccagtggggcaaagaaaagccacattcgctcccattcggataccagcattgcctccaggggagctccaggaggccccaggaatatcaccattatagttgaagatcccattgcagaatcctgcaatgataaggcgaagttgagaggccctttgccctactctggtcaaagcagtgaagtcagcacacccagctctctgtacatggaatatgaaggtggtcggtacctgtgctcaggggaaggcatgttccgaagaccatcagaaggacagtccctcatcagctacctctctgagcaagacttcggcagctgtgccgacctggaaaaggagaatgcccacttcagcatctcagagtccttaattgctgccatcgagctaatgaagtgcaacatgatgagccagtgcctagaggaggaggaagtggaagaggaagacagtgatagagagatccaggagctgaagcagaagatccgccttcggcgccagcaaatccgcaccaagaacctgctccccatgtaccaggaggctgagcacggaagtcagtggagcctgcggatgcttctgttcccacattttcccaacttcagcataaggcctggtgcccaaaccagtggttcctctgctgtcagatgtttctatgtagtcctactttttttctatcatgctaggaatactcatcctagagtcgctccgtttcctgcatcagaaatacctgccttccaggccaggcagagtggctcacgcctggaatcccagcactttgggaggccgaggcgggtggatcacttgaggccaggagtttgagacctgcctggccaacatggtgaaaccccagctctaaatatatatatgtatatatataaataaaggaatagctcccttcccaaatagcttcctgatatgaggagacctaagaacactgctcccagatttgcttcccagatagtagtaccttctatttacttgaaactttctaaagggaaagtttccatttctctctgttgaggtcatatcagatcccttatattgtgacactggaaggacaagaagacctctttctgccctgtttattcctttttgtttttaaacataacaggctttcgggtcacctccagcagctcccagttcagctcacgtgattcggcacagctctctgactctggctctgctgatgaggttgatgaatttgaaatccaaggtaagaagtgacactttgttacaagggaacttttattctgtttctttccatttagaatgataagctgcgaagtgtttcctaagtagaagatcttcattatggattgttgttagctattgtaagggacagccttctgctaaaaacaaaaccccttcacagtttcagtagggaagaacactggaagcaggtgttccaggtggatggagtggctgctcgttgatgtcaccctgacgcgtcctcctcagtggtgtctttctcctgggttcccactctgactcctcctttcagcttgtagggctggtccataccacttgaaattagaatcctattctcttgggttccataacacaactgaaattgtttcagagtgttcaaaagagaaaaggacaaaaagaatcattgggggcagggggacaaaagaggaaaaacatcaggtttacaaagtagagcttgaatttctgcccttgcggtcggtgctcactgctcagcacagtcacagactctgtttttattggtggtggtggtggtggtaggagtatcagcatagaggaacagtggggttccagtctgggaaggcagttatgttaaatcaggttaatatcccactcctgcaaatcatagatctcttcaagttcccatcagcaaaaaaaaaaaaaaaaaaaaaaaaaaa

SEQ ID NO: 28484 - DNA, 2952 bp, Homo Sapiens
acacatctgtacgttgcaatctgtggatcagctacgaggtaagtcgctctttggaaggggtggaggtctttgctggacttgtcttccgaaaagtatgaagagtggaagtcaaggctcagaatggcgtccttttttaccttatcaccttaacaaaaacttcaccttagctgcagggttaaacctctgggttggggctggggattttcgttgttgttgttttaaagcagcagccaaggccatgttttttaaggtggtgagttaaacggagcaagaactgcggtagccttttccacccaatctctttcttcacatcctagtcacagccaagggtagggtggatggcagtgaggataaacagcccagaaacaggattcctgcagggtgggactggcattttccatttttatctgaagttgtactttgaatgcagacacctttctctcaggccagaagcactgctcatttgtattgctggcttccagttagcctatttgcaaggattacttaggatttccagactgcaggcccagctacccagagagtgtgcctcaaagccccacctcaaaccttttatctctatgtggcgggaaacacccacgaaaatgccaacggcggtatttgtaacttgccttcttccttttgggaactgctttctgcagctctctctgcgttagaggaatagctacagctgggagctgctccagccacgcaggaggagagggcacccattgagaggcgggcaccccttctgtctccctctggctatgttaactggaaactaggaaaggggttcagatcaaagtaactgctgtcttcagaaagttccattcattaactaaattagcggaaattaaatggtgtttggaggaaggtcatttcagaaggcccagggccagaggctgaggtctaaaacttctaatctggacttctattgaagtttggcagtaagttaaacaggaagttgaaggctaccatatgtaaatccagttgttgcctgaaatcagtcatttcaagggagtatcttgaaaggacacagactgggaaacaggcatgagaaaaaaaaaaaggaagtagacagacatttggctagtatgtgcctggaccacttaacactaaagattagaaacctagggctctgagtaagaatcatttgaccagtagctaaagtgagtcatggcctgcacagaactagggcacacatgttgaagtcaggatgttgagaacatcaggcttactaatttgcaaggcaggagtgctgcttccagtagggaatgtgatcaggatttcacggctcattttcccagcctttccaacaggtgcaatcaagtcatccgtgtacacaagtgactgccctggtagttacatctgttaggattaaatttccatttgttccattactttatatgaagtgatttctactgctgagtcagacagaacacttcctcttagacctagggacttttttcaacatttttaacaatgtgtgtgtttttcaaaatgtgtcccaaccaggtctgcaggtcttcctgggttgaatggactgcttacagaaggggaagattcaggcccaaggtcagggttacagaattatataaggtttcctgtttgggcagctggtctagcaacacctctggttggggcagactgggtcttgttgagagatagcatgcccaggaggctagggcagggagagtgccaggagcaggaaagaacatttttcttttctttttttttttaagaccgtgtcttactctgtcacccaggctggggtgcagtggtgcgatctcggctcactgcaacctccgcctcccaggttcaaacgattctcctgcctcagcctctcgtgtagctggaattacagccgcccgccaccatgcttagcttatttttatatttttaatagagacggggtttcaccatgtgggccaggctgatcttgaactcctgaccttagatgatctgtctgcctcggcctcccaaagtgctgggattacaggcttgaaccaccaagcccggcctgacatttttcttttaaatcttttatcaaccagctttcatttcttgtcagatgtcacttttcagcaacctgttgctatattctctgttaggagaactttttttttttttctggccagactgagagaaaggaatgaaaggatggaagaattacaagatcaggcactgctgtctgtctgttccacggatgtaaccacagcacacgcgtggctcacggtactagtgtgataaatgcttgttacatgaaggcgtgaacagggatgagaagagacttcctggagaaacaaaaggactaacaatcaggaaggggaggtgatcggggcaggagtaaagtggacacctcagcaaagccattcgctgtgatctctgattgtgcagtgtcatgtcctgtcaccagagccccctcgtgtttgatgttggccaatgccgccagcatgatctagcaggccaaatcctaatctaccattctctgacaccagctggtcccctgggtcgtccacccgatgtcccccattctccccacttggcctcccccacaggctctcggcaaaggaccgtgggaggcacctgtgacactgcccttttcctgtgcagctgtttttcttcttcattcttttcactcctcgttactcttttttttttcactctcagcccacacaaaactaggaactttgttattctacttatttttctgtactctgtctgtttgcacacagatggatatctgagagccagcgaactttctttacctcctagtatcatttcatgaaaattagtagcacctgcacaatggggccttggagacaggaataaaaggaaaaatctggaatggaatcacatgacgcaacaggctatgaagactccctgcccggctgctatatgtctggtaaacagaataaatagtacttgagcatccctgaaaaaaaaaaaaaaaaa

SEQ ID NO: 28485 - DNA, 5480 bp, Homo Sapiens
actctgggcggcgggagatagctccctttctccctcgccccgggttctttctggatggccgagcagatcctctttaaagagacagttcatgaaatagaaacccggcggctgagcttggagttgcgaaaggggacgatcccgtgagggtccaggacccgcgaaggcgctgcggaggatctgaaagggggatagagctcccctcgcctccccaggccccccaccttttcaaactctcctcctcctgcttgttttcccccattggaactgggaaggagaagtagaagttttagtgggtttcagataactttcattacacatcgggctgataagagcaagagaaagtgagaaaagagggaggtgatgtgaaccagaaggaatagctccgagctcatttaggaagggggaaaaagccaaaacacaccaaacccgggtcacccagacgaaagaagacttcatttcttgtattaaaaatacactgttggcggacaataaatccgaaacgcgtggtcctggagagcagatcctagagacggacaaagttgtcagagacccatttggaaatcgagacgcgaggcttttaaaaaattattattattatttttaaacatctcgaaatgttgctcgggatcgtttgaaaggattttcgtgcaggagcgttgggggctgctgattattttattttgtttattttgattcttctgtgattgcctattattgctgagttgaggccatagaaatctaaagatcttagacgaattttacaatgtgaagttctgcatagatgccagtcaaccagatgttggaagctggctcaagtacattagattcgctggctgttatgatcagcacaaccttgttgcatgccagataaatgatcagatattctatagagtagttgcagacattgcgccgggagaggagcttctgctgttcatgaagagcgaagactatccccatgaaactatggcgccggatatccacgaagaacggcaatatcgctgcgaagactgtgaccagctctttgaatctaaggctgaactagcagatcaccaaaagtttccatgcagtactcctcactcagcattttcaatggttgaagaggactttcagcaaaaactcgaaagcgagaatgatctccaagagatacacacgatccaggagtgtaaggaatgtgaccaagtttttcctgatttgcaaagcctggagaaacacatgctgtcacatactgaagagagggaatacaagtgtgatcagtgtcccaaggcatttaactggaagtccaatttaattcgccaccagatgtcacatgacagtggaaagcactatgaatgtgaaaactgtgccaaggttttcacggaccctagcaaccttcagcggcacattcgctctcagcatgtcggtgcccgggcccatgcatgcccggagtgtggcaaaacgtttgccacttcgtcgggcctcaaacaacacaagcacatccacagcagtgtgaagccctttatctgtgaggtctgccataaatcctatactcagttttcaaacctttgccgtcataagcgcatgcatgctgattgcagaacccaaatcaagtgcaaagactgtggacaaatgttcagcactacgtcttccttaaataaacacaggaggttttgtgagggcaagaaccattttgcggcaggtggattttttggccaaggcatttcacttcctggaaccccagctatggataaaacgtccatggttaatatgagtcatgccaacccgggccttgctgactattttggcgccaataggcatcctgctggtcttacctttccaacagctcctggattttcttttagcttccctggtctgtttccttccggcttgtaccacaggcctcctttgatacctgctagttctcctgttaaaggactatcaagtactgaacagacaaacaaaagtcaaagtcccctcatgacacatcctcagatactgccagctacacaggatattttgaaggcactatctaaacacccatctgtaggggacaataagccagtggagctccagcccgagaggtcctctgaagagaggccctttgagaaaatcagtgaccagtcagagagtagtgaccttgatgatgtcagtacaccaagtggcagtgacctggaaacaacctcgggctctgatctggaaagtgacattgaaagtgataaagagaaatttaaagaaaatggtaaaatgttcaaagacaaagtaagccctcttcagaatctggctccaataaataataagaaagaatacagcaatcattccattttctcaccatctttagaggagcagactgcggtgtcaggagctgtgaatgattctataaaggctattgcttctattgctgaaaaatactttggttcaacaggactggtggggctgcaagacaaaaaagttggagctttaccttacccttccatgtttcccctcccattttttccagcattctctcaatcaatgtacccatttcctgatagagacttgagatcgttacctttgaaaatggaaccccaatcaccaggtgaagtaaagaaactgcagaagggcagctctgagtccccctttgatctcaccactaagcgaaaggatgagaagcccttgactccagtcccctccaagcctccagtgacacctgccacaagccaagaccagcccctggatctaagtatgggcagtaggagtagagccagtgggacaaagctgactgagcctcgaaaaaaccacgtgtttgggggaaaaaaaggaagcaacgtcgaatcaagacctgcttcagatggttccttgcagcatgcaagacccactcctttctttatggaccctatttacagagtagagaaaagaaaactaactgacccacttgaagctttaaaagagaaatacttgaggccttctccaggattcttgtttcacccacaaatgtcagctattgaaaacatggcagaaaagctagagagcttcagtgccctgaaacctgaggccagtgagctcttacagtcagtgccctctatgttcaacttcagggcgcctcccaatgccctgccagagaaccttctgcggaagggaaaggagcgctatacctgcagatactgtggcaaggtttttccaaggtctgcaaacctaacacggcacttgagaacccacacaggagagcagccttacagatgcaaatactgtgacagatcatttagcatatcttctaacttgcaaaggcatgttcgcaacatccacaataaagagaagccatttaagtgtcacttatgtgataggtgttttggtcaacaaaccaatttagacagacacctaaagaaacatgagaatgggaacatgtccggtacagcaacatcgtcacctcattctgaactggaaagtacaggtgcgattctggatgacaaagaagatgcttacttcacagaaattcgaaatttcattgggaacagcaaccatggcagccaatctcccaggaatgtggaggagagaatgaatggcagtcattttaaagatgaaaaggctttggtgaccagtcaaaattcagacttgctggatgatgaagaagttgaagatgaggtgttgttagatgaggaggatgaagacaatgatattactggaaaaacaggaaaggaaccagtgacaagtaatttacatgaaggaaaccctgaggatgactatgaagaaaccagtgccctggagatgagttgcaagacatccccagtgaggtataaagaggaagaatataaaagtggactttctgctctagatcatataaggcacttcacagatagcctcaaaatgaggaaaatggaagataatcaatattctgaagctgagctgtcttcttttagtacttcccatgtgccagaggaacttaagcagccgttacacagaaagtccaaatcgcaggcatatgctatgatgctgtcactgtctgacaaggagtccctccattctacatcccacagttcttccaacgtgtggcacagtatggccagggctgcggcggaatccagtgctatccagtccataagccacgtatgacgttatcaaggttgaccagagtgggaccaagtccaacagtagcatggctctttcatataggactatttacaagactgctgagcagaatgccttataaacctgcagggtcactcatctaaagtctagtgaccttaaactgaatgatttaaaaaagaaaagaaagaaaaaagaaactatttattctcgatattttgttttgcacagcaaaggcagctgctgacttctggaagatcaatcaatgcgacttaaagtgattcagtgaaaacaaaaaacttggtgggctgaaggcatcttccagtttaccccaccttagggtatgggtgggtgagaagggcagttgagatggcagcattgatatgaatgaacactccatagaaactgaattctcttttgtacaagatcacctgacatgattgggaacagttgcttttaattacagatttaatttttttcttcgttaaagttttatgtaatttaaccctttgaagacagaagtagttggatgaaatgcacagtcaattattatagaaactgataacagggagtacttgttcccccttttgccttcttaagtacattgtttaaaactagggaaaaagggtatgtgtatattgtaaactatggatgttaacactcaaagaggttaagtcagtgaagtaacctattcatcaccagtaccgctgtaccactaataaattgtttgccaaatccttgtaataacatcttaattttagacaatcatgtcactgtttttaatgtttatttttttgtgtgtgttgcgtgtatcatgtatttatttgttggcaaactattgtttgttgattaaaatagcactgttccagtcagccactactttatgacgtctgaggcacacccctttccgaatttcaaggaccaaggtgacccgacctgtgtatgagagtgccaaatggtgtttggcttttcttaacattcctttttgtttgtttgttttgttttccttcttaatgaactaaatacgaatagatgcaacttagtttttgtaatactgaaatcgattcaattgtataaacgattataatttctttcatggaagcatgattcttctgattaaaaactgtactccatattttatgctggttgtctgcaagcttgtgcgatgttatgttcatgttaatcctatttgtaaaatgaagtgttcccaaccttatgttaaaagagagaagtaaataacagactgtattcagttattttgccctttattgaggaaccagatttgttttctttttgtttgtaatctcattttgaaataatcagcaagttgaggtactttcttcaaatgctttgtacaatataaactgttatgcctttcagtgcattactatgggaggagcaactaaaaaataaagacttacaaaaaggaaaaaaaaaaaaaaaaa

SEQ ID NO: 28486 - DNA, 2401 bp, Homo Sapiens
tagcgcggggactggctgggaagcggtcggtcgagtgtggcctgtgtggactcgcatcttgcccgaagccgggcggaggagagctcaagctaagggtgatcagcccatgacctaaacctccagacaaaataaaacagggaaaatttgctagaatcaagaatgatggatccatgttcagttggagtccagcttcgtactacaaatgagtgccataaaacctactatactcgtcacacaggttttaagactttgcaagaattgtcatcaaatgatatgcttttacttcaacttagaactggaatgacactttctgggaacaatacaatttgctttcatcatgtaaaaatttacattgacagatttgaggatttacagaagtcatgttgtgacccatttaacatacacaagaaattagccaaaaaaaaatttgcatgtaattgacttagatgatgccacttttctgagtgctaaatttggaagacagcttgtacctggttggaagctttgtccaaaatgcacacagataatcaatggaagtgtggatgttgatactgaagaccgccagaaaaggaaacctgagtcagatggaagaactgctaaagctttgaggtcattacaatttacgaatccaggaaggcaaactgaatttgctccagaaactggtaaaagagaaaaaagaaggcttacaaaaaatgcaaccgctggttcagacagacaagtgataccagcaaagagtaaggtctatgatagccagggtctcctgatttttagtgggatggacctctgtgactgcctggatgaagactgcttaggatgtttctatgcttgtcctgcctgtggttctaccaagtgtggagctgaatgccgctgtgaccgcaagtggctgtatgagcaaaattgaaattgaaggaggagaaataattcataataaacatgctggataatctgcggtaccaaactatggagcctttaaaggtctttatttctaaaaatctgttactctaagatacattttaagcttgattatcatatgacaaagattttaaaaccatctcagtgtgccctaatttttcatcttgggtgctttaagattcactatttgatataaattcagataggctatttttcagtagtcagcgttaagcctgtctggatcaatataaacaagtagggtgtaggcagtcctctatttgcatgtttcccatgggcacaaatttcagtgacctagatttagtttaaataccagtttccttaccaggaaggaaagaaaactggtaaggaaactgttgttgttaaaatctaggttaaaattttagttagcacattgtaactgagtaattacatgaagtacaaacctctctgctagctcttcagtctacaaatcgctatgtaaataacagatatgcttcatgattgtgaccagtcatgttatttctttcaaattcttccagtggtttgtccctgtgcatctgttaattcagttcacgtacagcagagcatgtagttatgctgtctctctgtcatctacttgacattctatagaagtgaacactcgaaagaactggtcaacaaagatgaaagtgcagcaaagcaatgaaaaatgataacactggaagtgaaattttaatcaaacataaatgaatttgtagaagaagtcactgaccatgggaatgttgttcttgctgctgtgtattcataggagcttagtgaaggcaaacttaccaacacaaataagcaaagtggttgcaataaagacagatacgtcccagaggaagtgatggttaaaaaaaaaaaaactttacattaaaagatatttaatgtgaatatagaaatatttcacaacattgaaagcacaagcaataaaagggtggaagctgacccaaacttagaaggagtatggcagtttgccgtgaacataaaagatgcttactcagtatggtaagttacttgccagaaaaaaaggcaagccctattcaaactactttgtttttacaatgaaataaaacactttaattctatttctaatgttttaaattacagtgtactaaatatttttaaacatttttgcatttttttctacatttataactggtcttaagagtttttaatatttgagcagaaccttaaaggtcatggaacaatcatcattttccctattgaatattaagattgcaggaccatttttatggtcccacagtaccatgtgaaatgaggatcgcttgtagctgggaacagtgcttacttcagggaaaactgattttgatagaaccgactagttgagtattaaactgttttggaaataatttatatatctaagtgctgaaatatatttctcttctccccacttattcaaataaaaaagttttaataccaaaaaaaaaaaaaaaaaaaaaaaaaaaaa

SEQ ID NO: 28487 - DNA, 4959 bp, Homo Sapiens
ctctgtgcgagcggcccagcagcgcggagcctcagcggagtgagcgagcgcggggcagtagcggcctgcgattgtgagatggggactgagaacaaggaggtgattcccaaggaagaaatttctgaagaatctgagccacatgggtcattattagaaaaatttccaaaagtggtttaccaaggtcatgagtttggagcaggatgtgaagaagacatgttggagggacattcgagagagtccatggaagaggttatagagcagatgtctcctcaggagagagactttccatcagggttgatgatctttaagaaatcaccctcaagtgagaaagaccgggagaataatgagagtgagagaggctgcagtcccagcccaaatctggttacacatcagggagatacaacagagggagttagtgcatttgctacctctggccaaaacttcctagagattttagaatctaacaaaacacagagaagttctgtgggagaaaagcctcatacatgtaaagaatgtgggaaagcctttaatcagaactcacatctcatccagcatatgagagttcatagtggagaaaaaccctttgaatgtaaagaatgtggaaagacatttggaactaattcaagccttcgacggcacctgagaattcatgctggagaaaaaccctttgcttgtaatgaatgtggaaaggccttcattcagagttcacaccttattcaccatcatagaattcatactggagagagaccctataaatgtgaagaatgtggtaaagccttcagtcaaaattcagcccttattctacaccagagaatccatactggagagaaaccatatgaatgtaatgaatgtgggaagacctttagggttagttcacagcttattcagcatcagagaattcatactgaagaaagataccatgaatgcaatgagtgtggcaaagccttcaagcatagctcaggccttattagacaccagaaaattcatactggagaaaaaccatatctgtgtaatgaatgtgggaagggcttcgggcagagttctgagcttatccggcatcagagaattcatacaggggacaaaccctatgaatgtaatgaatgtgggaaaacttttggccagaactcagagattattagacatattagaattcatactggtgagaagccctatgtatgtaaggaatgtgggaaggccttcagggggaactcagaacttcttagacatgagagaattcacactggagagaaaccctatgaatgctttgagtgtggaaaggctttcaggcggacctctcaccttattgtccaccagagaattcatactggagagaaaccccatcaatgtaatgagtgtgcaagaaccttttgggataattctgagctgcttctccaccagaaaattcatattggagagaaaccttatgaatgtagcgagtgtgagaaaacatttagccagcattcccaacttatcatacatcagagaattcacactggagagaagccttatgagtgccaagaatgtcagaagacttttagtcggagctctcacctcctccgacatcaaagtgttcactgtatggagtaatctgcaaaataggaaagcttttagtggaaaagctaaagtccaacttattcatttgttcataatatgcaaatatgcaccccaagtattcaaatccaatgaatggactgaacctcctctgtcctcccactgattttaaatagttggttgaagaagatgaggcactttttttttttttttagcattggggtcttgctctgttgcccaggatgggatgcagtggcacagtcgtaactcactgcttccttgaactcctgggctcaaacagtcctcctgcctcagccttccaaatagctaggactgcaggcactaatgaggcacttttatgaattattcattgagaggtttcagtgtgctaagttaaatcataaaagctctttcaggccttaatttcccctctgtccttccttccccttctcctcccccagtggatcacataacaaacattaagggtctgtaccagccatctttcctaaattactcttcagcaaaattgtgggaacaggattccaccacctcctaagaatgagagttgactcattgactgttaccccctgaaatattagaaagtcataatttagaagacacacctcattctcctgtccatgtttagcattggaataatttagtaagctgttattagcttcaaagtcgtccaggcctgctatgaagttactttagaagatggcagcattaatgaagaagcaggctcatttcacatctgtcaggcttccttattcatctgaagaggctgccatgatggaggaactgacaggcaatttacaacgggattataagtgaaggccttagaatccagaggggccgattaggcaacaccaggggataaacaattgaggtcacactgctcggcatgggcagaagcagctcttcaggagctgtccacacttcaggggtgctcagactgactgctcctaagaattctgctgcatatatttttagccccatctcctgccactgctgacagatattgtgacagtaagtagcagacaggactgtggcttcacctcctccgggcacctggctacagtgatgagtcagttcacctgatgacaaaccagggtctggccttgccaaagcacttaagttctcatgacctggaccgcactggaggccctggctaagtcaggatgtcgtagcctcttcttggttttgccccttggccttgaaattcttttttcttgaataactttaaaaaaatagagataaagtcttgctatgttgcccaggctggtcttgaatgcctgggctccagcaatctttttgcctcaacttcccaaagtattgagattacaggtgtgagctaccatgcccggccttgaaattctttcttcgctatgtctgcatgttttttgtgttctgtatttatttcttctccaaggaaacagcctacattttccatgtgtccatgtttctgaggccgtgggtgacagtgggaattgcactaatgggggcccagcaggcctgggggctggtcttagcgctagaccttgaacaaggcacttcacctgctggtctccaattttctcctctgtaaaatgaaagagttgaactaagtgatctcaaaagtttcaaccagcccgataattccttaattctttaaaaatttaactttatatatctttattattctttaacctcatctttgttacactaatattagtcactaatatttattgagtgtttactacctgacaggcacagtgccagtttacattttaattttcacatcatttctatgatgtgggtactcatttttttaaagctttatgaaggtataatttacgtactataaaattcacctgttttaagtgttcagttgaatgatttttaatttacatagtggtgcaaccatcaatgatgtgggtattcttaccccaatttaaaagataagaaggggcagtgttaagtaattgacccatgattccacagctagtaagagcgacagccaagactccaaacctggttgatgctcttaaccactgtgctatgccgcaggtaggcagattcattactgccttatttgaaaccctttgcacagtttctattactgatttctatgtagatttgaatataacaaatttaaatcatgtccttggtaacagaactgatcacagccaaaaaaaattcaccaaatgggtttattctgtactccaatataggtgtcttcccaggtttatatccttggcttgagaaaagggttgtacaaatagatgattgcagagtttccacatccttccagatacctctgcctctaacagtcacactcttagtaagggaagttgtttgatttacttcttcccttaggttgattacaagtgaagtgcgccgtcttattcctttttcattgctggagcacaaattgaattgtgcccagaccgtatctttctcacatgaaacctggatctcacctatcccttccatgcctgattcccgtgtttgcatattttatttccacatttacctcttgtcagccctgacagagaatttggcaccccttcaagcttctcctaaacaatctatgcacacaaacacccctgagcaatatggacttcactgaagatagtgtgtaagcaaaggagaagagttcacattgtgcatcctattagacattttgttctcagaagtaccttactggccaaaccaatgaaggttttcctcttgtcctcccctctcaaggctcagtcacctcaacttctttttgcctactagatatccaatccatcacctcgcctcccctggccctagctcaattaccctcttaaacccattcctgctcagcaaaacttcctctagttcaccattcattcatttgaacattaggaggcaatttagtgacctgttgtacctgaccatgttcttaagggggaggtctcacttctcattcccagaaaagtctaccatgtatagatacatattccccgccccgccccagatttctggtgaatgaaatcacttgtatcttattaggtacatatacgcaaatccttaacctcaattctctgtcctcttcatgtcttacccagatatctcaggaagatttctcttttccttctgtttgcctccctcttcgacttacttgggagtcagcatctaaccacagtcgtgactggtaatgatgatttgtgcaaatactatcaaggaaaggacatgaattgtcttaattttagacccattaaaaaaccgcacaggcctcaatcttaaaagtcctatctaaatacccagaaatacccttcagaatttttgaagctatgcccatgtacaaaattttcttccttccctaattttaatggtatactaacaccttaggtaaataaaatatttctttactattttattgaaaaaaaaaaaaaaaaa

SEQ ID NO: 28488 - DNA, 3210 bp, Homo Sapiens
gaggcttgaagaggagactgaagaagatgaagaagaaaaagaacaggatgaagatgaatataagagtgaagatttaagcgtactggaaaaattacaaatattgactagttatttaagagaagaacatctatattgtatttggtgtggaacagcctatgaagataaagaagacctatcttcaaattgtccaggaccaacttctgcagatcatgactaagattattcccaataaagtggaaacttgaaaaatgttattacttcctagggatagacaatttagcagttggaaatctcaaattttttatgccagtaaagaaagggggactttatataatgttttgttctttttgtactttagaatatgaatgttcattgacttgaaaaaaataatgcaatggcatttcagaacacaagtatcacagagatggacagttacaatttattgctatattgtgatacgtgaggggtttaaggacaccaacaggtaacttcttattcccctcttcactttggaacaaattgagaaataagaaatgggagtcagaggaagagaaaaatatccactttatcagtgaataaactgatacagagaagaaggttgactttttctccagtcagagactgtaatatttctccctgattggagagaacagcgggtctctgccttgttggggcagagcccatctttgcattctgagaccagttagctttcaaggtcagggaaaccaccaggggctggaccacacatgctcagttccttcttgtatcacccatgggataagacagttctctcttgggaaggaatgaatgagggttcagagagctttttcctacacttcttgctttgaaggagcaaggagaagttcccttccctccatccaagcatgaagaggaggggaaaagtattccccctcaataaggctgatgtcagaggcaatgttcgaccagtactactaaattctaatccatttaactgtgataatttctggtaaaatcatgagttttcatgacaatgtctatatccattatatgtgatctgttggaagttttggctagagaaacttaattgtgaggaaatttaaatattgtgtgatgcaagtacttactgaatttggaaaccccttgatagcattcccagcaagtgatagttcaacctttgcttttattcttccagccacagagaactcactgctttaaaaccattccattactgggtagctctgaattgttttcattgttttctcttaaactgaaatctgcttccctgtaatattaatgaatacagctaaggacataccgtgtggcatactatgagagagctccatccagggtgaggcatcaaaatcatgaacctttttaaaagttcatatgctcaggtgtctctcctagtgattgattttgatttgtcttggctaaggtggttcctggatatctatatatttattttgaagtcccaagaatgagtgataagcacctgaggataagaactagtactgaggttaaggatggagcaccaccattctttggatagagttgtgatcacctgtgtgattttatagctcacctgttagttagattgagcaagagaacaaccccttttattagaaacagcatacataagaagattgtaaaaattaacctacacttgctagggtaagataatcagtagtacaatttgtattaatctctgacctaatatgacctaattcacttttcaagtttaacttggggagctttacaaaatagtaataaaagggtcccatcccaagagattctgatgccattagtcactgtgacttgggcatcactgcccttgattctaaaatgcagcctaccttgagccactaatctagttaacttctgggcctcagttcttcatccagaaaactaatcattatttttatgaatgtaaatatgtgcatatatataatatttatatgtttggatgctattgtttaatatttacttttttgtttttaaaaaaattataaaattggctgagcgcagtggttcactcctgtaatcccagcactttaggacgccaaggcaggcagatcacttgaagccaggagttcaagaccaacctggccaacatggtgaaaccccatctctactaaaaatacaaaaattagctgggcgtggtggcattcgcctgtaatcccagctactcagaaggcggaggcatgagaattgcttgaacctgggaggcagatattgcagtgagctgagatcatgctgctgcactccagcctgggtgacagagcaagaccctgtctcaaaaaaaaaaattatatatatatatgtatgtatatatatatatatatagagagagagagagagagagctattaataaaacagaggagtacattttacccttgcaattccagtcaatactgtggtgtcatttcagccaacataccaacattcagtcaaatcccaaagccaaatggataatttcagatggaatggagttagacaggaactggcttccctttctcctgttactatgaggacaacccacacctgctcagtggcctaaaatattttaaatatgttcatgacaattatgctgagaatgccaggataacactgatggaacccatgacttcaccaggattgtggtctacatttacaggcctagtactagaactagaccggcttagagagtgggagatatccctctgttgtccatcgaaagataaaaatacaggctttcagccgggtgcagtggtgcatgcctttggtcccagctactcagggggctgagatggggaatcctttgagcccagaagtttgaaaccagcctgggcaacatagtgagagacctccatcttaagggaataaaaaaaaaatcagactttcaatatgagtaacaagttatttttaggccttttatgactttataaataggcaataatgaacaccaagggaagcaaaacactgaaaagaattttaaaatttgttgtagaacattaatacgaaatttgaaactgcaaaacaatgtaaaatttaatgtcatgttgtcatttacttttgtgtatattgtgccatgtttatttccaaagtcctatctagaaattctaaaatgtctaattttcttaattaaaaatccagaattctgtagtttctgaaattcaaaataaatactttaacataccaaaaaaaaaaaaaaaaaaaaaaaaaaaaaaaaaaaaaaaaaaaaaaaaaaa

SEQ ID NO: 28489 - DNA, 2939 bp, Homo Sapiens
gggagcagcgcagggagccaggcgggctgccggcgggtgtgaagaaaaaaatgacactccaatgggctgcagtggcaacctttctttatgccgaaataggactcattttaatcttctgcctaccttttattcctcctcagagatggcagaagattttttcatttaatgtctggggtaaaattgcaactttttggaacaaggctttccttaccattatcatcctattgattgttctatttctagatgctgtgagagaagtaaggaaatattcctcagttcataccattgagaagagctccaccagcagacctgatgcctatgaacacacacagatgaaactttttaggtctcaaagaaatctttacatttctggattttccctattttttggctagttttgagacgtctggttacgcttattactcaactggcaaaagaactgtcaaacaaaggtgtacttaaaactcaagcagaaaatactaacaaggctgccaaaaaatttatggaagaaaacgaaaaactaaaaaggattttgaaaagccatggtaaagatgaagaatgtgttttggaagcagaaaataaaaaactagtagaagaccaggagaaactgaaaactgaattaaggaagacttcagatgccctttctaaggcacaaaatgatgtgatggaaatgaagatgcagtcagagagactttcgaaagaatatgatcaactcctgaaagaacactctgaacttcaggatcgtttagaaagaggcaacaagaaaagactgtgaactttataaaagacacttgcaatatactgtgtcaaaatgataattttgttatgttagcctctagaaaatttaagttcagaaaaatgcactatgaccggttcgtaatttttttaatgccacacataggttgtattgtaatggcattatcaaaatatttgatgatgtttcagatatattgcaaagtctgtattccagctcttaagaaaaatataagcatgttaaataccatatttacatattgataatgtcattggtatatggtggctgtttaccaataaaaggaaaaaattcattaaccggttgcttccaaaattagaagttttaagttgcatgaaaccattaatagccttgaaagctttgataagttttcagtaataataacctatttaatcagatgatgatgtgtttgaaaatagtgttcaatatcagcaaatttgtacacagggaatgtaaataaggataactgatcagagttatccactgtatttataaggaagagtcggaaaaaacaatgaccttagttttttttaagcctgatgatactatggtttactctaataagatagctatattgataattatatttttgttactgtgcccttgcacattttggtctttttgttaatatttttattaataacacataattagtaaccactctactgtttcaagttaatctagtaatagagcttacatatatttgtataactgctataccactgaactgaatttattttacaacagtgtagaattcttgaaaagttaacgtagaaaatatccaaaaagcagtatttctagaaagtgtccaaaaagcagtatttctttcccttggttgtgagagtaactaattatataaatattacctcaaaaatacatacactggtatcacacagtctttctacaatgtttctgtattctgaaagctaaatattaagtactatttttccattcaaatattcatttagaatttcctttagaagatggcagtgattataatattaatatgatttcatttgttccagtgtttagacatgaaatcatcttccttgtctcatgaaaacctaaatataaaaaaaaggaaaatactggagtttttatttctcttgtctttgttacatcctctgtttattataattttagcaccaacttcacacctagctaatttttttcatcataaagtggatgaaatgagcaagtacctaaaaattttatttcagataaaagtcaggagttactgctaaaaaacagacatgtgggagacattcaacaggagtatgaaatgagagttagaccatatgggctgacaacaccataaataacaagaaaagggagtgctgaaataggagagaacagagcaaatgttagctcaaagtatagacttagaaatatcaaagtaagagctatctggataaatatatagatattgagtgcttggaatcctagcctactatgtgaaaattaagtctaatgtcagaataacttacagaaaaatagaaaatgcacagctttaaaatgggcagagttaaaatctattcccagctttatcacttatttagccatgctagcctaggcctctatttccttgtctccaaaatgagaataataaaatttaggtcaggattactatataaactaagataatacagtgattctcaaagttgttcagactgtatagtaaggagaaagtctggttgcactttgaagagcttgaagatttgaaagattcccaaaaaagcattttaaagtttacatttaagggaccttggacctcaaccctctcaagtttacaagtctgaaactttagacatcaaaagtttgagcagtttttccaaggcaacattgatagttagattcagggccaggctgtaagtctagaatttagatatcctgatcccccagataccgctcttctggttatacacagaccagctataatttgctaaacataaatattgcagtgtattagccagctgtggctccagagtctgtgccctttaccaccgtgcccaactgtttcacatgctgtgtttggtagtttttcctagtgctctccttaataatggtggtgtttagcaaattgtattacataaataaatatttatttcatgaaaaaaaaaaaaaaaaaaaaaaaaaaaaaaaaaaaaaaaaaaaaaaaaaaaaaaaa

SEQ ID NO: 28490 - DNA, 8263 bp, Homo Sapiens
cccacgcgtccgtacggctgcgagaagacgacagaaggggagagcagtgagcccagtcccgagtcccggagagagctccagcaataggggccatgtcgccatagccccagcctctcggtccgcagcctcagcagcgtcccagccggctggcttcatgctgcggtgcagctgcaccatgttcctgggttgagggggcaatcgggcacgctcctccccatgggttgcccatcatgtctaatggatatcgcactctgtcccagcacctcaatgacctgaagaaggagaacttcagcctcaagctgcgcatctacttcctggaggagcgcatgcaacagaagtatgaggccagccgggaggacatctacaagcggaacattgagctgaaggttgaagtggagagcttgaaacgagaactccaggacaagaaacagcatctggataaaacatgggctggtgtggagaatctcaacagtcagaatgaagctgagctccgacgccagtttgaggagcgacagcaggagacggagcatgtttatgagctcttggagaataagatccagcttctgcaggaggaatccaggctagcaaagaatgaagctgcgcggatggcagctctggtggaagcagagaaggagtgtaacctggagctctcagagaaactgaagggagtcaccaaaaactgggaagatgtaccaggagaccaggtcaagcccgaccaatacactgaggccctggcccagagggacaagagaattgaagaactgaatcagagcctggctgcccaggagaggcttgtggaacagctatctcgggagaaacaacaactgctacatctgttggaggagccaactagcatggaagtgcagcccatgactgaagagttgctgaaacaacaaaagctgaattcacatgagaccactataactcagcagtctgtatctgattcccacttggcagaactccaggaaaaaatccagcaaacagaggccaccaacaagattcttcaagagaaacttaatgaaatgagctatgaactaaagtgtgctcaggagtcgtctcaaaagcaagatggcacaattcagaacctcaaggaaactctgaaaagcagggaacgtgagactgaggagttgtaccaggtaattgaaggtcaaaatgacacaatggcaaagcttcgagaaatgctgcaccaaagccagcttggacaacttcacagctcagagggtacttctccagctcagcaacaggtagctctgcttgatcttcagagtgctttattctgcagccaacttgaaatacagaagctccagagggtggtacgacagaaagagcgccaactggctgatgccaaacaatgtgtgcaatttgtagaggctgcagcacacgagagtgaacagcagaaagaggcttcttggaaacataaccaggaattgcgaaaagccttgcagcagctacaagaagaattgcagaataagagccaacagcttcgtgcctgggaggctgaaaaatacaatgagattcgaacccaggaacaaaacatccagcacctaaaccatagtctgagtcacaaggagcagttgcttcaggaatttcgggagctcctacagtatcgagataactcagacaaaacccttgaagcaaatgaaatgttgcttgagaaacttcgccagcgaatacatgataaagctgttgctctggagcgggctatagatgaaaaattctctgctctagaagagaaagaaaaagaactgcgccagcttcgtcttgctgtgagagagcgagatcatgacttagagagactgcgcgatgtcctctcctccaatgaagctactatgcaaagtatggagagtctcctgagggccaaaggcctggaagtggaacagttatctactacctgtcaaaacctccagtggctgaaagaagaaatggaaaccaaatttagccgttggcagaaggaacaagagagtatcattcagcagttacagacgtctcttcatgataggaacaaagaagtggaggatcttagtgcaacactgctctgcaaacttggaccagggcagagtgagatagcagaggagctgtgccagcgtctacagcgaaaggaaaggatgctgcaggaccttctaagtgatcgaaataaacaagtgctggaacatgaaatggagattcaaggcctgcttcagtctgtgagcaccagggagcaggaaagccaagctgctgcagagaagttggtgcaagccttaatggaaagaaattcagaattacaggccctgcgccaatatttaggagggagagactccctgatgtcccaagcacccatctctaaccaacaagctgaagttacccccactggctgtcttggaaaacagactgatcaaggttcaatgcagataccttccagagatgatagcacttcattgactgccaaagaggatgtcagcatacccagatccacattaggagacttggacacagttgcagggctggaaaaagaactgagtaatgccaaagaggaacttgaactcatggctaaaaaagaaagagaaagtcagatggaactttctgctctacagtccatgatggctgtgcaggaagaagagctgcaggtgcaggctgctgatatggagtctctgaccaggaacatacagattaaagaagatctcataaaggacctgcaaatgcaactggttgatcctgaagacataccagctatggaacgcctgacccaggaagtcttacttcttcgggaaaaagttgcttcagtagaatcccagggtcaagaaatttcaggaaaccgaagacaacagttgctgctgatgctagaaggactagtagatgaacggagtcggctcaatgaggccttacaagcagagagacagctctatagcagtctggtgaagttccatgcccatccagagagctctgagagagaccgaactctgcaggtggaactggaaggggctcaggtgttacgcagtcggctagaagaagttcttggaagaagcttggagcgcttaaacaggctggagaccctggccgccattggaggtgcagctgcaggggatgacaccgaagatacaagcactgagttcactgacagtattgaggaggaggctgcacaccatagtcaccagcaacttgtcaaggtggctttggagaaaagtctggcaactgtggagacccagaacccatctttttcccctccttctccgatgggaggggacagtaacaggtgtcttcaggaagaaatgctccacctgagggctgagttccaccagcacttagaagagaagaggaaagctgaggaggaactgaaggagctaaaggctcaaattgaggaagcaggattctcctcagtgtcccacatcaggaacaccatgctgagcctttgccttgggaatgcggagctgaaagagcagatgggagaagcaatgtctgatggatgggagatcgaggaagacaaggagaagggcgaggtgatggttgagactgtggtaaccaaagagggtctgagtgagagtagccttcaggctgagttcagaaagctccagggaaaactgaagaatgcccacaatatcatcaacctcctcaaagaacaacttgtgctgagtagcaaggaagggaatagtaaacttactccagagctccttgtgcatctgaccagcaccattgaaggaataaacacagaactggttggttcccctgggaagcaccaacaccaagaggaggggaatgtgactgtgaggcctttccccagaccccagagccttgaccttggggctaccttcacagtggatgcccaccaattggataaccagtcccagcctcgtgaccctgggcctcagtcagcgtttagcctaccagggtccacccagcacctgcgctcccagctgtcacaatgcaaacaacgctatcaagatctccaggagaagctgctgctatcagaagccactgtctttgctcaggctaacgagctggagaaatacagagttatgcttacaggtgaatccttggtgaagcaggacagcaagcagatccaggtggacctccaggacctgggctatgagacttgtggccgaagcgagaatgaggctgaacgggaggaaaccaccagtcctgagtgtgaggagcacaacagcctcaaggaaatggtcctgatggaggggctgtgctctgagcagggacgccggggctcaacactggctagttcctctgagaggaagcccttggagaaccagctagggaagcaggaagagttccgggtatatggaaagtcagaaaacatcttggtcctacgaaaggacatcaaagatctgaaggcccagctgcagaatgccaacaaggtcattcaaaacctcaagagccgggtccggtccctctcagttacaagtgattattcgtctagtctggaaagaccccggaagctgagagctgttggcaccttggaggggtcttcacctcatagtgtccctgatgaggatgaggggtggctgtctgatggcactggggctttctactctccagggcttcaggccaaaaaggacctggagagtctcatccagagagtatcccagctggaggcccagctcccaaaaaatggactagaagagaagctggctgaggagctgagatcagcctcgtggcctgggaaatatgattccctgattcaggatcaggcccgggaactgtcttacctacggcaaaaaatacgagaagggagaggtatttgttatcttatcacccggcatgcaaaagatacagtaaaatcttttgaggatctcctaaggagcaatgacattgactactacctgggacagagcttccgggagcaactcgcccagggaagccagctgacagagaggctcaccagcaaactcagcaccaaggatcataaaagtgagaaagatcaagctggacttgagccactggccctcaggctcagcagggagctgcaggagaaggagaaagtgattgaagtcctgcaggccaagctggatgctcggtccctcacaccctccagcagccatgccttgtctgactcccaccgctctcccagcagcacctctttcctgtctgatgaactggaagcctgctctgacatggacatagtcagcgagtacacacactatggagagaagaaagcttctcccagtcactcagattccatccatcattcgagtcattctgctgtgttgtcttctaaaccatcatcaaccagtgcatctcaaggggctaaggccgaatccaacagcaaccccatcagcttgccaactccccagaatacccccaaggaggccaaccaggcccattcaggctttcattttcactccatacccaagctggctagccttcctcaggcaccattgccctcagctccgtccagcttcctgcctttcagccccactggccctctcctccttggctgctgtgagacaccagtggtctccttggctgaggctcagcaggagctacagatgctgcagaagcagttgggagaaagtgccagcactgttcctcctgcttccacagctacattgctgagcaacgacttggaagccgactcttcctactacctcaactctgcccagcctcactctcctccaaggggcaccatagaactgggaagaatcctagagcctgggtacctgggcagcagtggcaagtgggatgtgatgaggcctcagaaagggagtgtatctggggacctatcctcaggctcctctgtgtaccagcttaactccaaacccacaggggctgacctgctggaagagcatcttggtgaaatccggaacctgcgccagcgcctggaggaatccatctgcatcaatgaccgcctacgggagcaactggaacaccggctgacctctactgctcgtggaaggggatccacttctaacttctacagtcagggcctggagtccatacctcagctctgcaatgagaacagagtcctcagggaagacaatcgaagacttcaggctcaactgagtcatgtttccagagagcactcccaggaaacagaaagcctgagggaggctctgctgtcctctcgatcccaccttcaagagctggaaaaggagctggagcaccagaaggtggaaaggcagcagcttttggaagacttgagggagaagcagcaagaggtcttgcatttcagggaggaacgtctttccctccaggaaaacgactccagactgcagcacaagctggttctcctgcagcaacagtgtgaagagaaacagcagctctttgagtccctccagtcagagctacaaatctacgaggcactttatggcaattccaagaaggggctgaaagcttacagcctggatgcctgtcaccaaatccctttgagcagtgacctgagccactggtggcagaggtacgagctctgagagggcagctggagcagagcattcaggggaacaattgtctgcgactgcagctgcaacagcagctggagagcggtgctggcaaagccagcctcagcccctcctccattaaccagaacttcccagccagcactgaccctggaaacaagcagctgctcctccaagattcagctgtgtcccctccagtccgggatgttggtatgaattccccagctctggtcttccccagctctgcttcctctactcctggctcagaaacgcccataatcaacagagcaaatggcttgggtttggatacttctccagtaatgaagacccctcccaagctagagggtgatgctactgatggctcctttgccaataagcatggccgccatgtcattggccacattgatgactacagtgccctaagacagcagattgcggagggcaagctgctggtcaaaaagatagtgtctcttgtgagatcagcgtgcagcttccctggccttgaagcccaaggcacagaggtgctaggcagcaaaggtattcatgagcttcggagcagcaccagtgccctgcaccatgccctagaggagtcagcttccctcctcaccatgttctggagagcggccctgccaagcacccacatccctgtgctgcctggcaaagtgggagaatcaacagaaagggaacttctggaactgagaaccaaagtatccaaacaggagcgactccttcagagcacaactgagcatctgaagaacgccaaccagcagaaggagagcatggaacagttcattgtcagccagctaaccagaacacatgatgttttaaagaaggcaaggactaacttagaggaaccatgcaagaagcgcagccaccagaagtccttaaaacagcaggaaaggtgggcctgtcccccttttgtgcagctacctatctgctgaggagcatctgggcctcattcctccaagtccacgggagggtccagaagagggagtcagagatgtatcctggtggagctgggagaaaggcagaaagcctttctgacggctatggaatacgattagccaaggtccacttggcccagcactaagaaaaagatgcgtagtttgcacagaaggttttgtgatcctgcctctcaacagccccagcagcttgggaactagcaagagcacatttcttgcctcatcagctgtcctgagatggaaaactcagtgaatataggaccctgattccgatgaaaggggcacgtggtcccaatgctggagctcctctggcaggttctaaaagcacactactgagcagcggtgccctgccggacactgctggcgggggctcagtgagcactactcacagatccacacctgaccctgttgggtcgagtcaggctgggccttggtctgcactgtagcacctgtgttctttgagttcacatcatgaatgtggtgacttcccagataccatctcaggcttaacctagcacatcctatttcttttcttctatgatatccaaattggactgacctcacttcaaagttgctgtcccattttgtcaccctatcttatctcggggaaattgcagactgatggccagaccaactctgttgaaattcttgcatagagcaaacctgtgctcatttttaagtggcatgggagaggccccaagcctagtaaagcctagtctgtgtcttcacagtgctggtagaatgtgttcgtgtgtataaatatatgatatagatttatatatgttgctaacgccatatattgaaggccaacataactggtggacagggtgggtgacagaaaatgaaagtctttttggtgattgttaaagcaagatgtgtataaagaaataaatagtttttcttttaaaaaaaaaaaaaaaaaaa

SEQ ID NO: 28491 - DNA, 5068 bp, Homo Sapiens
tcctaccagggcccctaaagccactcacctcgatttctgcggatccaaaggtggaaagacactgtcccgatcaggagcatcgcaagggtctggagaaagggccatccataaatgaagatcaggactccgtattctgagactgtttcaatcacaaataagactcggaacagcctctggaaggcccacagcatttcgcgtttctggcctgggaaagtaagggtgcgctaaggcacgagtagtacagctcctcccgccaccgcagagcccgccggcgggaagagaccagacaccgacggagaagcgaagttcaggacgcgaaggaaagggccacttcgggtcggggtcaacccagactggaccaatgcacagtctaggtggattaacgcgccaccgcgagaagtgggcacgggaccacatgcggctggcaagacgtcccagggctcaagctccaggctcggtcaccaaacaacggtgataacatccacaacgccacgtaaaccatctttgggccttgatcgttttccaataaccgactgaactgagggcgtgaccaaacgacaagaaccggaggagaggacccggagaacggagcagcatcccgccgcccgcctccaggaaagcccgaggcactgtagcaggagggtctgggctccgcgccttaattacaccgccctggacccgcctcttccgccgctcgctcctctgaccggcacccgaaggtgctgtcccgcccacggactcgctcacactccgtttcttcgatcctttagacgactttttaccgttcagggatgctctccgttaccgcctctgccatttggttgccctccctgcggtccaagggcctggaacactccccagggctgccaggccagcgctttccaggggctccagcctacagcgccgccacctggggctggagccagaaacgcaggggccgggggctcaccggctgccaagtagagggcgtcgaaaatggggctgggtgtgtaagaatgcttgtgatttttgcacactgattttgtatcccgagactttgctgaagttgcttatcagcctaaggagatttcgggctgagaagatgaggttttctaaatatacaatcatgtcatctgcaaacggacaatttgacttcctcttttcctaattgaatattctttatttctttctcctgcctgattgccctggccagaacttccaacactatgttgaatagcagtggtgagagagagacatccctgtcttgtgccagttttctaagggaatgcttccagtttttgcctattcagtacgatattggctgtgggtttgtcataaacagctgttattatttttagatacgtcccatcaatacctaatttattgagtgtttttagcatgaagcgctgttgaattttgtcaaaggccttttctgcatctattgagataatcatgtggttttttttctttggttctgtttatatgatggattatgtttattgatttgcatatgttgaaccagccttgcatcccagggatgaagcccacttgatcatggtggataagctttttgatgtgctgctggatttggtttgccagtattttattgaggatttttgcatcgatgttcatcagggatattggtctaaaattctctttttttgttgtgtctctgccaggctttggtatcaggatgatgctggcctcataaaatgagttagggaggattccctctttttctattgattggaatagtttcagaaggactagtaccagctcttccttgtacctctggtagaattcggctgtgaatccttctggtcctggacttttttggttggtaggctattaattattggctcaatttcagagcctgttattggtctattcagggattcagttttttcctggtttagtcttgggagggtgtatgtgtccaggaatttatccatttcttctcgattttctagtttatttgcatagaggtgtttataatattctctgatggtagtttgtatttctgtgggatcagtggtgatatcccctttatcattttttattgcgtctatttgattcttctctcttttcttctttattagtcttgctagctatcaattttgttgatcttttcaaaaaagcagctcctggattcattgattttttgaagggtttttgtgtctctatctccttcagttctgctctgatcttagttatttattgccttctgctagcttttgaatgtgtttgcttttgcttctctagtttttttaattgtgatgttagggtgtcaattttagatctttcctgctttctcttgtgggtatttagtgctataaatttccctctacacactgctttaaatgtgtcccagagattctggtatgttgtgtctttgttctcattggtttcaaagaacatctttatttctgccttcatttcattatgtacccagtagtcattcaggggcaggttgttcagtttccatgtagttgagcagttatgagtgagtttcttaatcctgagttccagtttgattgcactgtggtctgagagacagtttgttataatttctgtccttttacatttgctgaggagtgctttacttccaactatgtggtcaattttggaataagtgcggtgtggtgctgagaagaatgtatattatgttgatttggggtggagagttctgtagacgtctgttaggtctgcttggtgcagagctgagttcaattcctggatatcttttttaactttctgtctcattgatctgtctaatgttgacagtggggtgttaaattctcccattattattgtgtgggagtctaagtctctttgtaggtctctaaggacttgctttatgaatctgggtactcctgtattgggtgcatatatatttaggatagttagctcttcttgttgaattgatccctttaccattatgtagtggccttctttgtctcttttgatctttgttggtttaaagtctgttttatcagagactagaaatgcaacccctgcctttttttgttttccatttgcttggtagatcttcctccatccctttatttggagcctatgtgtgtctctgcccctgagatgggtctcctgaatacagcacactgataggtcttgactctttatcgtatttgccagtctgtgtcttttaattggagtatgtagcccatttacatttaaggttaatattattatgtgtgaatttgatcctgtcattatgatgttagctggtgattttgctcgttagttgatgcagtttcttcctagacaaacagccaaatcatgagtgaactcccattcacaattgcttcaaagagaataaaatacctaggaatccaacttacaagggatgtgaaggacctcttcaaggagaactacaaaccactgctcaacaaaataaaagaggacacaaacaaatggaagaacattccatgctcatggataggaagaatcaatatcgtgaaaatggccatactgcccaaggtaatttatagattcaatgccatccccattaacctaccaatgactttcttcacagaattggaaaaaactactttaaagttcatatggaaccaaaaaagagcccacattgccaagttaatcctaagccaaaagaacaaagctggaggcatcatgctacctgacttcaaactatactacaaggctacagtaaccaaaacagcatgatactggtaccaaaacagagatatagaccaatggaacagaatagagccctcggaaataataccacacatttacaaccatctgatctttgacaaacctgacaaaaacaagaaatggggaagggattccctatttaataaatggtgctgggaaaacttgctagccatatgtagaaagctgaaactggatcccttccttacacctgatacaaaaattaattcaagatggattaaatacttaaatcttagacctaaaaccataaaaactctagaagaaaacctaggcaataccattcaggacataggcacgggcaaggacttcatgtttaaaacaccaaaagccacggcaacaaaagccaaaattgacaaatgggatctgattaaactaaagagcttctgcacagcaaaagaaactaccatcagagtgaacaggcagcctacagaatgggagaacatttttgcaatctactcatctgacaaagggttaatatccagaatctacaaagaactcaaacaaacttacaagaaaaaaacaaacaaccccatcaacaaatgggcaaaggatacgaacagacacttctcaaaagaagacatgtatgcagccaacagacatatggataaatgctcatcatcactggccatcagagaaatgcaaatcaaagccacaatgagataccatctcacaccagttaaaatggtgatcattaaaaagtcaggaaataacaggtgctggagaggatgtggagaaatagaaacacttttacactgttggtgggactgtaaactagttcaaccattgtggaagacagtgtggcgattcctcaaggatctggaactagaaatactacttgacccagccatcccattactgggtatatacccaaaggattataaatcatgctgctataaagacacatgcacacgtatgtttattgtggcactattcacaatagcaaagacttggaaccaacccaaatgtccatcaatgatagactggattaagaaaatgtggcacatatacaccatggaatactatgcagccataaaaaatgatgagttcatgtcctttgtagggacatggatgaagctggaaaccatcattctcagcaaactatcgcaaggacaaaaaaaccaaacaccacatgttctcgctcaggtgggaattgaacaatgagaacacttggacataggaaggggagcatcactcaccagggcctgtctgtggggtggggggacgggggagggatagcattaggagatatacctaatgtaaatgacgagttaatggttccagcacaccaacgtggcacatgtatacatatgtaacaaacctgcacgttgtgcacatgtaccctagaacttaaagtataataaaaaaaaaaaaaaaaaaa

SEQ ID NO: 28492 - DNA, 6470 bp, Homo Sapiens
ggcatttggcgggatctgtgtctctcgctggtgctggcacaggagtttgggatctgtctcctctttcgcctcctgcaccttgagagccctgggctactctgtcacagcccctgttgccctgcgatctgtaggtccttggggacgcatagttaaggtgccaggacatcctggaagctgggaaatgatttcttccagaccatggctggagaaggaaagaaggtgtgttttgcctgattcagggactatagagagaaccaagttctgcaggcctgtcatctaagtctcagggcggggagaccttccttccccacgggtttgaggctatggctaagtggtgagccttggtgagacgcagaaaggatccatcccaggcacttggctagaggtaagtaaaaatagcctttgggccagaagacctgatagtttgggtactcgtctggacataagtccccatcttcccagaaatgtcgtcttttgtctgcaacaactggctggagaaatatttcagaaagatgtgtgcctggaacacccaaaggcatacctttcctttctccttggcataggccttgcagcactgaagaaagaccaggtttgcaacggagccttcaatactcttcatccctatggatctcaggggctcatagggtgacaggagaggagacaagctagcttgggaagagtctttgtccttcagcttctcctctactgaaacactatatacttggggccacagttcatagcaaaacacacatgctgtctttctttctctcacacccccatctcgggaacccaaccacttgatggcaggtagctctgggtatccttggtctggcattcacccactgggcatctaagctgtcctaaagctcttttcaatcacttctcactgtttccaggcccatgtgggtaggtgttccagccttcactctttcaggctgttcataaaggcacagtgtgggaaaatcccctactgtgatggccattgctgggaagcagggaaggttaagggcccactgctgcccaaggctagtgtagacaccctctgctcctccactcatctcctcaaataatgatatcaggtgcagcagctgctgtctggaatgttatcaaaccaggactgcacaggcactgcattctctgtgtggaagatgtaagaagcaggcgagttgtccaggatgagttttcctcaggtccctccccagatggctgacgtccttgacatagcagccctggtgaaacaaacatgactcatgggacaggcagccccagaccatcccatacccgtccagctcacccgtcacaggatctgcctacttgttcaggctgggaagaagagagcaatgacgaaaacacatttaaacatttcctccattcatgtcaggaactcatccatataaggcctcatgagcacatggatctggtgcatggtcccctcaagctctacaggcactaggcagtcagcattgctgattggcttaaaggagctatgcacaagggtttcatccaggtcagtgaccatacagatccttccttgatttttctctgtcacctctgggagcaggcaggttcctgggatctgataaaactgatattggagacgctggagctgatccgacatagcaatggtgttgactccctccttatgtgtggattgctcagcgggggaacttgactgtccaacatgctgggtgcaagaacagcagaaaggggacttttaagatgtggcaaacatgaggcctcttcggagaggactttggaaaccaggccttgcttggtaaggaccagggcatcttccctccatgcctgggtgatgatggagccttgttccatctaacaatcctgagggctgggctggggggcatgggctggggcctgattcagttcccgagattctgacctccacagctgttcacataccccttctcctttccatactggccgggaagggaggtggcttgtagggagggtggttggccttggcagcggctccccagtgtgcccccatccccgattcccccagcgagagcttcaagatcctcagtttgggtctaacatagagaatccaccagaaacacattttttttcaagttttattttaagttcaggggtccatatgtgataaagtttatttttcaacttttattttaagtttaggggtccatgtgcagagtatgcaggtctcttacatacataaatgcgtaccactgtggtttactgcacagatcatctcatcacccaggtaccaagcccagcatccgcagctattcttcctgatgctctccttcccctcccccatgccatgaaacaggtgtccagtgtgtgttgttcttcctgatgtgtccatgtgttctcattgatctgcttctgctaataagttagaataataataggcggtgtttggttttctgttcctgcattagtttgctgggagtaatggcttcaaattccaaccatgtccctgcaagggacatcatctcattacattttatggcttcatagtgttccatggtgtatgtgtaccacatttcctttatccagtgtatcattgatgggcatgtagattgattacatgatgttgctattgtaaatagtgctgcaatgaacatttgtatacatgtatttttaaaatagaattatttatattcctttgggtgtaatggtattgctgggtcaaatggtagttctgcttctaggtctttgaggaatctccacactctcttcctcaatgcttgaaataatttacactcccaccaacagtgtaaaagtgttcccttttctccacaacctcgccagcatctgttttttttttttttactttttattaatagccattataatttgtgtgagatggtatctcattatggttttgatttgtatttatgcagttatcagtgatgttgagcttttcatgtttgttgggcacatgtatgtcctcttttgagatatgtctgttcatgttctttgaccctttttttaatggggccttttttttttctcttgtaaattttgttaaattcctcctagattctggatattagacatttgtgagatggataggttgcataatttttctcccattctctaggttgtctgctctgatgatagtttctttggctccgcagaagctctttagtttaattagaccccattagtcaatttttgcttttgttgctatagctttttgcctttctgtcataaagtcttttctcatgcctatatcctgaatggtgttatctagattttttcttctaagggttttatagttttgggttgtacatttaagtctttaatccatcttgagttaatttttgtacatggtgttaagaagggttccagtttaaattctctgcatatggctagccagttctcctagcaccattttttgaatagggacacctttccctaattccttgtttttgttaactttgtcaaagatcaggttgttgtaggtttttggctttatttctaggttctctactttgtttcatttgtctatgtgtctgtttctataccagtaccatgctgtttttgttactgtactcttctagtatagtttgaagttaggtagagtgacacttccagcttttttttttttttcttaaggttggcttggctatttgggctcttttttggttccatatgaactttaaaagtttttatttttctaattctctgaagaatgtcagtagttcaatgggaatagcattgaatctatgaattacttagggccatatgcccatattcatgatactgattcttcctctccatgagcatggaatatttctccatctgttttgtgtccactctgatttctctgagcagttgtttgtggttctccttgaagaggtccttcactttctttcttagctgtattcctaggtatttttttctctttgtagcaaatgtgaatgaaagttcattcatgatttgtctccctgcttgcctgttgtttgtgcatgggaatgctagctacttttgcacattgattttatatcctgagattttgctactgttgcttatcaccttaagaagctttgggcctgagacaatgaggttttctagatgtaggatcaggtcatctgcaaacaaagataatttgacttcctctctttctattagaatactctttatttcttcctctggcctgattttcctggccaaggcttctgatactatattgaatggtagtggtgaaagagggcattcttttcttgtgccagttttcaggtggaacgtttctagcttttgcacattcagtatgatattggctgtgggtttgttgtatatggctcttattattttcaggtatgtttcttcacttcctagtttattgagaattttaaacctgaaagaatgctgaattttattggatgctttttctgcatttattgagataatcatgtggtttttgtatttagttctctttatgtgatgagtcacatttattgatttgcatatgttgaatcaaccttgcatcctggggacaaagccaactccattgttgcggatgaactttttaatgtgctgctggatttgttttgccagtattttattgaggatttttgcacagtgtttaccaaagacattggcatgatgtgttgttgttgttgttgttgttgtagtatctatgttaggttttggtatctggatgatgctggcctgatagaatgagttagagagaacttctttgtcttcaattttttttggatggttttaggagaaaaggtaccatctcctctttgtacctctgctcaaattcagcttgcttggtaggctagtttttactgcctcagtttcagaacacattattgatctattcagggttcagtcttgtggagggtttattttgcaagggaattgtctatttcttctagattttctggtttatgtgcatacatatgtttatagtgttctctgattgttgttcatatttccatgggatcagtgatgatatctcccttattatttctaattgtgtttggttctcctttcttttcttatttatttgcctagctagtgttccatctagtttattaatttttttcataaaaacagctcctggatttgttgactttttttttggaagagttttcagtgtctctatctccctcagctctactttgatcttggttatttcttgttttctgctacctttctggttagttttcacttggttttctagttcttttcatcaagatgttaggctgttaattttagatcttctagtttctcttttttttcttcttgtggcagagtctcactctgtcacccaggctggagtacagtggcatgatctccgctcactgcaacctccacttctcagttttaagtgatttctgctgtctcagcttcctgagtagctgggattacagatgtgcatcacaaaaaccagctaatttttgaattttttttgtagaggtggggttttgttgtgtggtccagactggtcttgaacatctggccttaagtgatttgcctaccccagcctcccaaagtgctggaactacaggcatgagccaccacacccagccctttctatctttttgatgtggacattagtgctataaatttccctcttttcttggtttccagtgattattttattctatcttggtgagtcatcagggaaataatcttaaatttacaatcaacatatagtttaaatccatataattgtgtgagaagaaccctttgttatttgaaggtgatgtttgaaagattttctaactgtgccttttagttagtcttaaatttctaattgtagttaaaaacatgccattgtcatttctgacattttaagtatatggtttagaagtggttagtatagttctattgttttgcagtaggttttagataatttgtgtcttacaaaagtaaaagtgaatactcattacttatgaaagaagttagttagcttgccttaggtagatagcaagagaagagtccctggaaagtccctggtcagtgcctcatccctgcataacatataaagaagcctggaaaaaatcaagctgcagacactaacaagggaactagcatatgttgttgtgcttggggacatgcccgtggctgcacagatagaaaaacctctggcccatttggataaaaacttgtagaaacctccagctcactcagataaaggaacaagaacgacctagcatagaaatgcctttgtttggccaggcacggtggatcatgcctgtaattccaacaatgtcggaggcagctgtgggcggatcatctgaggtcgggagtttgagaccagcatgaccaagatggacaaactctgtctttactaaaaatacaaaactagccaggcatggtgctgcatgcctataatcccagctacttgggaggctgaggcaggagaatcgctagaacccaggaggcggaggtttctgtgagccgagatcgcaccattacactccaggctgggcaacaagagcaaaactgcaaaaaaaaaaaaaaaa

SEQ ID NO: 28493 - DNA, 6870 bp, Homo Sapiens
gagactggcgtccggtgtgcaggtggccacatggatcctggcagccggtggcggaacctgcccagcgggcctagcctaaagcacttgactgacccctcttatggaatcccgcgggaacagcaaaaggcagcgttgcaggagctgacgcgggcgcacgtggagtccttcaactacgctgtgcacgagggtctcggcctcgcggtgcagtccacctacagttccaaaagggaccatctgcaaagaggccaatgtttatccagcagaatgccggggccgaaggagtacctaccgtgggaagttgacagctgatatcaactgggcagtgaatggaatctcaaaaggaatcattaagcagtttcttggctatgttcccatcatggtgaaatccaagctttgcaacttacgtaaccttcccccacaagccctcattgagcaccatgaggaggcagaggaaatggggggctattttataatcaatggcattgaaaaagtcatccgaatgttgattatgcctcggagaaattttcccattgcaatgataagaccaaaatggaaaaccagagggcctggttatactcagtatggagtttcaatgcactgtgtgagggaagaacattccgctgtcaatatgaacctccactacttggaaaatggcacagttatgttgaactttatttaccgaaaagaactgttctttcttcctttgggatttgcacttaaggcacttgtcagcttttctgattatcagatctttcaggagctcatcaaaggaaaagaggatgattctttccttaggaactctgtttctcagatgttaaggattgtaatggaagagggttgtttgacacaaaaacaggtccttaactacctaggtgaatgattcagagtaaaactcaatgttcctgactggtacccaaatgagcaagctgcggagttcctgtttaaccagtgcatctgtatccacttgaaatccaatactgaaaagttttatatgctttgtctcatgacgcgaaagctctttgctttagccaaaggagagtgcatggaggacaatcctgatagtttggtgaaccaggaagtcctcacaccgggtcagctcttccttatgttcctgaaggaaaaactggaaggttggttagtgtctattaaaatagcttttgataagaaggctcagaagaccagtgtttccatgaacactgacaatttgatgaggatttttacaatgggcatagaccttacaaaaccatttgaatacctttttgctactgggaatctgcgttctaagacaggtcttggcctcctacaagattctggactttgtgttgtggctgacaagctgaacttcatacgctacctctcccatttccgctgcgtgcacagaggggctgattttgccaagatgaggaccaccacagtacgcaggctgctgccagagtcctggggcttcctttgtcccgtgcataccccagacggggagccctgtggcctgatgaaccacctaactgccgtatgtgaggttgtcacacagtttgtgtatacggcatctattccagctttactgtgcaacttgggggtcactcccattgatggagctccccaccgatcatacagtgagtgctaccctgtcctgctggacggtgtcatggttggctgggtggataaggatcttgctccaggcatcgcagattctcttcgtcattttaaggtgttgagagagaaaagaattcctccctggatggaagtggtccttatacccatgacaggaaaaccaagtctgtacccaggattgttcctttttaccactccttgtagactggtacggcctgtgcagaacttagcattgggcaaagaagagctaattggaactatggaacagatcttcatgaatgtcgctatctttgaggatgaagtttttgctggagttaccacacaccaggaactctttccacacagcctgctgagtgtgattgccaacttcatccctttctctgatcacaaccagagtccacggaacatgtaccaatgccagatgggtaagcaaactatgggctttccacttctcacttatcaagaccgatcggataacaaactgtatcgtcttcagactcctcagagtcccttggtgagaccctccatgtatgattattatgacatggataactatccaattgggaccaatgccatcgttgctgtgatttcttacactggctatgatatggaagatgccatgattgtgaataaggcctcttgggaacgaggctttgcccatggaagtgtctacaagtctgagttcatagacctctctgaaaaaattaaacaaggagatagtagcctggtgtttggcatcaaacctggtgacccacgcgttctgcagaagttagatgacgatggattgccgtttataggagcaaaactgcagtacggagatccgtattacagctacctcaacctcaacaccggggaaagttttgtgatgtactataagagtaaagaaaattgtgttgtggataacatcaaagtgtgcagtaatgacactgggagtggaaaattcaagtgtgtttgcatcactatgagagtgcctcggaacccaactatcggagataaatttgccagtcgccatgggcagaagggcattttaagcagattgtggccggctgaggacatgccttttactgagagtgggatggtcccagacattctgttcaatccccatggttttccatcccgcatgaccattgggatgttaattgagagtatggccgggaagtctgcagctttgcatggtctctgccatgatgctacacccttcatcttctcagaggagaactcggccttagaatactttggtgagatgttaaaggctgctggctacaatttctatggcaccgagaggttatatagtggcatcagtgggctagaactggaagcagacatcttcataggagtggtttattatcagcgcttacgccatatggtctcagacaaatttcaagtaaggacaactggagcccgagacagagtcaccaaccagcctattgggggaagaaatgtccagggtggaatccgttttggggagatggaacgggatgcgcttttagctcatggtacatcttttctccttcatgaccgcctcttcaactgctcagatcggtcggtagcccatgtgtgtgtgaagtgtggcagtttactctctccactgttggagaagccacccccttcttggtctgccatgcgcaacagaaaatacaactgtactctgtgtagtcgcagtgacactatcgatactgtttctgtgccttatgtttttcggtattttgtagctgaactggcagctatgaacatcaaagtgaaactggatgttgtttaacttgatgttgaccttttggattaagaggactatcagattaaagcaaaatgtaattttaattcaatgaagatatcattaccaggttactcttgagatttttcaacggtgttagaactctcaaccaagacctgaaaaccaagtatgcaaggtttctgaatctctctggtagattaactattgacaatgattttctgttatctttgttcaaaaagttcatgtcttctcaaaatatgaaatattgataaatggaagagcatacggtgacaagtctcctttccaaccccaggttccctacaccctgctctcagcaggcagtgagtgtcacacacctgttaatccatcttgagcaggacagtactatacaaatagaatgcaagctgtaatgtaattttatattttcttatagccacgttgaagtaaaaacaaacaggtacagtgttttttaccagctttatagaagtacagttgttacatatttaatgaatacaatttgatgggtctgactatatgcacacacctttgataccatcaccacaatcggggtaataaacatacctgtcatctccacaagtttcctcctgcccctttgttttttgctttttggttgctgttgagtttttgttttgtcttctgtggtaagaacacttaactcaagacctaccctcttaacaaatctttaagtgcacgatatagtattgttaattccaggcaccatgttgtacaacagatctttagaccttacttgtcttgcataactgaagctttatacctgttgaacaactctccatttccctggcccctagcaaccacccctctaccctgtttctatgagtttgactattacagatatctcatatagtgggatcatgcaatatttgtcctgtgactggcttatttcacttagcatagtgaaataagattcatccattttggaagccaggcatggtgctgtgcatctatagtccctgctatttgagaggctgaggtgggaggatcatttgagtgcaggagttcaaggacagcctgggtaatataggaagaccctgtcttaaagaccctgacctcaagtgatccacccacctcggcctccgaaagtgctaggattacaggtgtgagccactgtgcctggcctccggtgagtattttatatttagtctacacttccatacttggcttttttctgcttttatattgatctgctttcatagcagtgtgtagagtgccacttatgttttctttcttgtgtacagtattttattgtatggatttaccatcccctgtgtatttaagttgttccattctttggccattataacttttttctgcaaatattctggtgacttatctttggccattataaactgttgataatagatcatcttgtatatacttctgcaattataagatgttttttgatgatgaaagctttcctaaggtaattctttcctgagtttggttcagatggtctgtcactaattataaggcagataggaacagacagaaaaatctatcatttcaagataggcttagcaggatgggcgcagtggctcacgccactaatcccaacattttaggaggcctaggcaggagcaatcacttgtgcctgggagttctagactagcctgggcgagacttcatctctacaaaaaaagcaacaacgacaaaaaaattagccaagcatagtggcacacccctgtagtcccagctacttgggaggctgaggtgggaggattgcttgaacccaagaggtcgaggctgcagtgagccaagattgtgccactgcactccagcctgggtgacagagcaggaccctgtctctattttataaattaaaaagggctgggtgtggtggctcacacccataatcccaacactttggctcagcagattgcttgaacccaggaattcaagtccaatctgggcaacatggggaaaccccagctctacaaaaaaaattagcctggtgtggtggcacatgcctgtagttccagctactcaggaggctgaggtgggagaatctcctgagcctggaaggtccaggcagtgagccaagattgtgccaccacactccagcctgggcgacagaatgagaccctgtctcaaaaaaaaaaaaaaaaaaaagcggggaggcataagaaaaaaccaatttaatagaaaagataggctttgcttcaggaagctggttgagaagaagaaggaaaaagtcgattctactgactgacgtttccccctgctgttaagaatcccaaccacacactttcacacactattccaggttctggctactgaatgatcccacagctgaggtctattgtcatcgctccacttctatttttagcagcactaaaaacattcccaaaaaaaatgttttttagctttttaactgtagattcaccactaagaaattggcattggaacagtccacagagcttattcaaatttcacccattttacatgcactcatttgtgttgcatgtgatatatagttctatttcattttatcacctgtgtagatggatgaaaacagcaacataagcaagatacagagctgttccgtcatcacagagctctgccatactatccttttatagccatctctacctctgtcccccatttctaacccctggaaaccactaatctgttcttcataattttcttatttcaagaatcttacgtaaataggatcacgaagtataactctttgagaatggccttttcactccattcctcttgagatacatccaggtagttgcatgtatcaatagttaattcctttttattgctacacagtactccatagtatgaatatactatgtacatagcatatatatttatagtttaaccattcaccttgaacattttggttgtttccagtttgggggcattaacaataaagctgatctgaacaatcaggtataatagtccccctttatctttgaagattatatcccaagactcccagtgagtgtctgaaaccatggatagtatatacactatccatatgtgctatatgtactatatgtcctctatatattttttctatacatacatacctttgatgtttaattaagcactgcaagaaactgacagcaataaatagaacaattatactgtaattaaatgaatgtggcctcaaaatgtactgttctcacatattttcagactgtgggtaactgaaactgcataaagcaaaactggctgggtgcggtggtgcacacctgtaatcccaggactttggcaggctgaggtgtgcagatcacttgaggtcaggagtttgagaccagcctggccatcatggggaaaccccatctctattaaaaatacagaaattagctgggtgtgatggcacacgcctgtggtcccagctactcaggaggctgagacaggagaatcacttgaacccaggaggcagaggttgcagtgagccaagatcacgccactgcacagcaacctgggcaacagagcaagactagagtctcaaaaaaaaaaaaaaaaaaaaaaaa

SEQ ID NO: 28494 - DNA, 4426 bp, Homo Sapiens
gggagacggggaaggggtcgccgtggctgccggtcctcgagttgggggctgccgcggacactgctaggcagacggcgagtaccgagcgcgggtggccgcggtgtccgtgggccacgctcagctgcggtcagaggcgacatgagcgccgccggcccccgagtactaccccgaggagggtgaagagctggagagcgccgaggacgacgagcgcagctgtcggggccgcgagtcggacgaagacactgaggatgctagtgaaactgacctggcaaagcatgatgaagaagactatgtagaaatgaaggaacagatgtatcaggacaaactggcttctctcaagaggcagttgcaacaactgcaagaaggtacattacaggaatatcagaagagaatgaaaaaactagatcagcagtacaaagagaggatacggaatgcagaactcttcctccagctggaaactgaacaagtggaacgaaattacattaaagaaaagaaggcagcagtgaaagaatttgaagacaagaaggttgagctgaaagagaacctgattgctgagctagaagaaaagaagaaaatgattgaaaatgaaaagctgacaatggaactgactggagattctatggaggtgaaacctatcatgaccagaaagttgcggaggcgaccaaatgatcccgtccccatcccagacaagaggaggaaacctgctccagcccagctaaactatttgttaacagatgaacagatcatggaggatctgagaacattaaataagcttaagtcacccaagagaccggcatctccatcctctcctgagcacttgcctgcaacacccgcggaatctccagcccagaggttcgaagctcggatagaagatggcaaactgtactatgacaaaagatggtaccacaagagccaggccatctatctggagtcaaaggacaaccagaaactgagctgcgtgatcagttctgtaggagccaatgagatctgggtgaggaagacaagtgacagcaccaagatgaggatctacctgggccagcttcagcgcgggctcttcgtgatccgccggcgctcagctgcttgactttctacagtgctcttctcttgaccctttttctggagtgggttttatttttgttttgtttcgttttctccttaatagaaaaatgttaacttactgggaatagctactcagccttggaaatggagagcactgcagtgaattctttagggcacttttgtggccggatgcttccaactttgtcagtcttttctgcctcaacttcttccagacatcagtcaccatgagactgttttactttcaggcgtattggggggtttgatttactttccttttatttctttattttttgcttatacttgtttttgaaaacctcctctgagtttgaagggacagctatttttattgattatctttaagtctctctaccatggagaagagcaggaagggatacactctccagtgcattttcatgttttgaatctgattagtggatcacgtagctactttccctgtcgcgtccaattcactatttgcccagaagcttggggcagaggtcctagcaggagatgatgaattctcgtggctctcggccttctcagagaaataaatgctttgtgtaacatctgtgcacaccatccattccgctcgctgagcgatggaaaagcttgcctggaagactatgtgcactgaagtaaatggggttgggggaggggacatttcatatttataatgtgctgaaggtaccatattttaaatgttatttaatgcaggtgatttattcaaacatttgttctagcttaagctggaataagcagtggtcatttcagaagttttcatttgtaattccttcctctcccttgttcccaagtaggtagtagtaagtatgtgccacaggctgattatctgggtaatcttttacgggtgggaggtgagattgatagtgcaataatcagtgatctatagaccctcatgcacgattcaagtttcactcttgtggctgatgccattattgcacattggccattccaaacctgtggagaactttgttgtcaggccctgagcgctcacagcttcatttggcccaggttgaagacaaggaaagctctgctgtggctgcctctggactgacaccctccctaatgagtcctgatgaaacagcctttcctacatccttccctcactcccatgattggagaaatgattcattgggtgatgggtgttggggttttctatactcatgttgccatcttgagatgttcaaaaaatttggggttagagcaactgttagcgtctctatgagcaatcagtagaacttacacatcctaggaaatctttctttgtaagtaattcttttggtctcaagtgattctcttcatgttgtctcttgatgtacatacccccaagcaagttgggggactgtgatgacaattaaatcaccttctctgaagttctggctctgcagagaccaaaccttactgacttgtacagacttgtacaagtaaagacttatacagatagatttttgttttaacttacaatccgttttttcctcttttttttttttttttttctggtgttggagtcttatttagaaaacaggataaatgacgctgttatcaaaagttgcctggggttctgtatttcttctctgccctccaatccccgactgctatgatgtttactacagtgaacccagcccatggtaaacacaggcttcacctgttcttgtttgttagccttgactgtgaggcaggacttccctcgcttgaactgttacacatacgatgtgtgtgtcacatcacatattgtgcagctgttggttttcatgtagtgccctgcgatggaaattagatatatttcatgtatttttccattgaaggtggagtttttcaatgatcatgtgttttgtcctcctaaacagtataccaaagtttgtttttatagttgaggattgtattgataaccactggggttccgcattgaagcaggaacaaattgcctctttttctggccttctctgtgggacctctgcttttgtgaagcaactatttatttgaagaccagggtatgggcacttttgccttctctcctctctgacttttgagggtattgagggcgcccttagtcatagtctcgactccgccattgccttctcctcggcgtcctcacaactcttaattgggcctagtgaaaatgggggcaggtgagaagtccattttgagaatcagcatagtaaattacatttctaatcccagaggacttaatattttcttttgtcaccccagaggtgaaaaatcagcagttgaagcctgacaggcctcagtggtgaccaggaacagaagcagccttcctgttagtagatgggggtacttctgtggtgggcagaagccttactaaaggggaagacagactttgaagtttctagacgagaaggaggctagcttctagcctgggtggccattattccaaaaggtcattgtttctcactagaccccagggcaccagatgaatttccaagtttaaactctttcctgcaggtgattactttgaaaaaggttggtccagaccattttgatcaagaacctgtatatgtgttgtgttagaggcatctgcctcaagtctatgtacagtgtttgctgcgggtgtgttccaatattcattttacctctgcttgggggttttgtgtgttcccctccccccatgccctgcctacccccttttccctgaaccacgtccttttgaataatttccagatggatttctgtagccataccaaagccagggtgttttcattcatgcggatactagtatttatagatgtctgactacctaacttaatttttgtttttgaacttctaattggggccagtgtaaggtcgatcccagaggctgatctgcgaatcaagctacatgtatttgtgtataagaccctgtgttcaggactgggtgacttttctaagaaatatggggtttagaatggggttgactgtattttttaacctaattctggagagaagattgtattttttacagttttttgggtttggcttccttctcacatttctttagctttgaatttttactaaataaatttcctcctgattaattttttttttctcatctgggaatttgaaatctcggtgcttactgttacaccaatttgtccaaagagttgaaatcactttaatgccagaacatggtaaatttgcagccatttcaagcaggtgatggtctttttttataacatcgttaacgggtaccattaaatattctgagaggtgaatgtaaaatataaaaggtataggtttttttttttttttaaagaaaacaataaactttcaaagagaaaaccagcaaaaaaaaaaaaaaaaaaaaaaaaaagaaaaaaaaaaaaaaaaaaaa

SEQ ID NO: 28495 - DNA, 4848 bp, Homo Sapiens
gacacaagggtcaagtagtccagcattctacagtttgtgtgtttgagagagaaataagcccataaaaacattctaaccttcagattaagggacctgcagcaaagtttgtaactgaccagtttgctgggctggcttgaacagcgggcttacaggagtcctaagcctgtgttctatcttaagtgttttctgcattctctcccagcggatctgattcctgttctgaagaattgaagttgagcatcgttagttaaattcagctgctgcctgactgtataccacagcaaaggctttggaaacatttttcagttaaaacaataatgactttcttggagtgtaatcccagtggaggctgttctacgtatagcctgaaagaatacttaactaccatacgcaattctgcagagaccttgtaaaaatcacactttacaccaaacaactgagtgattctgaattggttgggggaatcttagttgtagatatcaattcaccttcttgaagattcaaccactgctactcagagctgctgctgaaataccatgtctaagaactcagagttcatcaatctgtcatttttattagatcatgagaaggaaatgatcctgggcgtcctaaagagagatgaatatttgaaaaaagtggaggacaagagaataaggaagctgaaaaatgaactcttagaagcaaaacgtagaagtgggaaaactcaacaagaggccagcagagtttgtgttcactgtcacagaaacctgggcctaatctttgaccggggagacccttgtcaggcttgctcactgagggtatgcagggagtgtcgagttgcaggccccaatggcagctggaagtgcactgtctgtgacaaaatcgcgcagctaaggattataactggtgagtggttttttgaagaaaaggcaaaacgtttcaagcaagtcaatgttctcggcactgatgttgtccgacagtccattttaagaagaagtccaggagctgaagaagtacagagccaagagcaaacccgccaggatgcagaaaagtcagacacttcacctgttgctgggaagaaggccagccatgatgggcccaagagaaagggatttcttcttagcaagttcagatcggcaaccagaggagaaatcataactcccaaaactgacactgggcggagctatagcttggacttagacggtcaacattttcggagtttaaaatcacctcctggttcagacaggggaagcactggctcatcagatctcaatgaccaggaacctggtcctaggaccccgaagagcagtcggagcaatggtgtgaccccaggcactcagagttcaccagccccaagcacacgaactgtgacctcagtcatcagtagagagtatggttttgaaaattccatggatttggctgctattgaaggtacctctcaggagctcacaaagagtcaccgcagaaacacttctggcacaccttccatagcagtgtctggaacctctctctcctcagatcagagtcgatctgagttagatttgagtgagtcatttacagaagactcagaggatactgtaagcataagaagcaagtctgtccctggggctttagacaaggactccttggaagagactgaagaaagcattgatgccttagtgtcctcgcagttatctacaaacactcaccgtctggcaagtggcctatcaactaccagccttaacagcatgatgagcgtttacagtgaaacgggagactatggcaacgtgaaagtcagtggtgaaatccttctccatatcagctactgctacaaaactggtgggctgtacatttttgtcaagaattgcagaaatctggccataggagatgaaaagaaacagtggacagatgcttatgtcaagtcatatcttcttcctgacaagtcccggaacaacaagcgtaagaccaaaatcagaacaggcaccaatccagaattcaatgaaacactaaagtacactatcagccatacccagctggaaacaagaactctgcagctctcagtctggcactatgatcgatttggacgtaatagcttcctcggggaagtagagattccttttgactcatggaactttgaaaatccaactgatgagtggtttgtgcttcaacccaaggtggagtttgctcctgatattggccttcaatacaaaggagagctgacagttgttttacgttacattcccccagaagagaacctgatgcttccaccagaacaactccaaggaaataagacttttaaaaagggaaagaagaaggagtcacctgtaatctctggaggaatactagaagtgttcatcaaagaggcaaagaatttgacagcagtgaagtcaggaggcacttctgatagctttgtgaagggctacctgctccctgatgatagcaaagccaccaagcacaaaactctggtaataaaaaagagtgttaaccctcagtggaatcatacattcatgttcagtggcatccatccccaggatataaagaatgtttgcctagaacttactatctgggacaaggaggccttttccagcaacatctttctgggaggagttcgtttgaattctggaagtggtgtgagccatgggaagaacgtggattggatggactctcagggggaagagcagcgcctttggcagaagatggccaacaaccctggaactccctttgagggtgtactcatgcttcgttccagcatgggaaaatgtaggctctaaagggaccagttctccaagaatgaggccaccaggacctatctggctgtcttttcctaccattagcaaactgagacctgggattctgcttccctgccatttctcacctgacagtgttgggacatgaggggagagatgtcagtagtatgaacatttagggtcttgctgagtgcctaaaaaacatatatttccatccaatcaaggccttcttgattggatgatagaaagtgtactacttgtcctgtcaacaagcaaattgtgcaaaggcttatagggtttatgccataaaagaaatggcacaagcctccatttgctaattataagttactttagatttcctcaaatcctttgaagagaaagaggaccactgagaaggtagatcacttgaaaagtcagaagaaaggatactggccaacttttactcaccctaggaatccacatgatctcaagaaggcatggtggagatggttgcttgagcaaggggattgtcctgttattgcagcaaacttgtggattaaccaagtagtatttcaagatggattgacagggctttctatgattactatagaatttatcatctaaatcagtttactttttagaacaaagagagctaaataactacatcagaacgattgatgttgattagaattgacctgggaaaattgggatgtagggtcaccctactgatgacctaagagagctctgttttaaacatttattttataaaatgttctaagccattaactaaaaggaaatgagatataatggtcaattgatataccttttcacattgtgttcactgacgagactagtttaatgaaaaaggaggtactctacctgctattttacttctgttcctcttctgccctgttatgggagagaatcaaagactccatctgctctcttcccccttgttttctccttcactgagtttttcttatctccttttgcagtggttaactattgtcacaataatgctgaatgaaaaaacacaccaaatgtcagtggcttaaaatgaccatcctttttctcacagttatgaagattggctatggcacctctgcttcctgctataggcctgaggttctagggcttcttatgcctcatcctctttaagccaaagggatagccagagcatcttgatggcagaagtgcaataagatgagccccactgctcgggtacattttcagcccctggttgtgtcatgtctactgatatctcattggtcaaaggaagtcagagggccaagatgaagaggcagggaaatatgcactgcccacagtgaagccatgacaagagtgaggatgcaggaaggcatgaagaattggggccaacagttcaatctaccataccttctctcacctggaattccagatgcttgagctacgaaacttagatgcaaagaaagttaaagctagaaggaacctcaggcccagttgctcattttgcagattccaaatgtgaatttcagagagctgagataacttgcccaaggccatatagaggctgtgactaaatctggacttaaatccagactatcaatcttaggccagtgttcttttttcaatatagtccttggcataatgctatgcttattaggtagataaaagggcttatgtcaagaaatttggagcagagtctgattacttgagcatgaacatacccgaccaaggtatgttctggagtcatattctagcctctgagctcattttttcatgcgagttcatataaaatcctcgaaagtttagaaactaggttttagtagtaacggagctagaatcatcttcgggcttattcctgctagttgttccatatttctagatttcatcttgaattttgaaaactgatttaagaatatatttagtattattattagtaagggaatacgcaatccagtttcaattttattcagaagtaggtcacctaattctagaaaatggttattagtctagtgtcgcttagcaaggtacttaaaagaaaatctgcacatatccttgtgctgcccttcttaaaaacagaaaacaaaaagtgtaagatcatcattgcctcccacataggaaaaataaaatgtcttcagactttaaaaaaaaaaaaaaaaaaaaaaaaaaaaaaaaaaaaaaa

SEQ ID NO: 28496 - DNA, 3195 bp, Homo Sapiens
gaggcatgtctaaatctagtaatttattagaagcttatccatccctattacttttttaaatggcattagttctgtgtgctattggtgtttatttgcatccacctgtccagttgctctgctgtcttgtgtttttgcagcctctacaaccccacgtcagagtgtgggattctgttactctatccacactgcagattattggacttggcacttttgagcgtggagtaggatgcctggatttttcaaaagcagattcaggtgttcatttatgtgttattgatgactccaatgagcatatgcttactgtatgggactggcagaagaaagcaaaaggagcagaaataaagacaacaaatgaagttgttttggctgtggagtttcacccaacagatgcaaataccataattacatgcggtaaatctcatattttcttctggacctggagcggcaattcactaacaagaaaacagggaatttttgggaaatatgaaaagccaaaatttgtgcagtgtttagcattcttggggaatggagatgttcttactggagactcaggtggagtcatgcttatatggagcaaaactactgtagagcccacacctgggaaaggacctaaaggtgtatatcaaatcagcaaacaaatcaaagctcatgatggcagtgtgttcacactttgtcagatgagaaatgggatgttattaactggaggagggaaagacagaaaaataattctgtgggatcatgatctgaatcctgaaagagaaatagaggttcctgatcagtatggcacaatcagagctgtagcagaaggaaaggcagatcaatttttagtaggcacatcacgaaactttattttacgaggaacatttaatgatggcttcagtgcaactcttttccttcagctgcatgtgattttgtgataaagttcaggtaacaggatgggcagtgatggagaatcactgttgattgagattttggtttccatgtgatttgttttcttcaatagtcttattttcagtctctcaaatacagccaacttaaagttttagtttggtgtttattgaaaattaaccaaacttaatactaggagaagactgaatcattaatgatgtctcacaaattactgtgtacctaagtggtgtgatgtaaatactggaaacaaaaacagcagttgcattgattttgaaaacaaacccccttgttatctgaacatgttttcttcaggaacaaccagaggtatcacaaacactgttactcatctactggctcagactgtactacttttttttttttttttcctgaaaaagaaaccagaaaaaaatgtactcttactgagataccctctcaccccaaatgtgtaatggaaaatttttaattaagaaaaacttcagttttgccaagtgcaatggtgttgccttctttaaaaaatgccgttttcttacactaccagtggatgtccagacatgctcttagtctactagagaggtgctgccttttctaagtcataatgaggaacagtcccttaatttcttgtgtgcaactctgttttatcctagaactaagagagcattggtttgttaaagagctttcaatgtatattaaaaccttcaatactcagaaatgatggattcctccaaggagtcctttactagcctaaacattctcaaatgtttgagattcaagtgaatggaaggaaaaccacatgcctttaaaactaaactgtaataattacctggctaatttcagctaagccttcatcataatttgttccctcagtaataggagaaatataaatacagtaagtttagattattgaattggtgcttgaaatttattggttttgttgtaattttatacagattatatgagggataagatactcatcaaattgcaaattcttttttttacagaagtgtgggtaacagtcacagcagttttttttaccaacagcatacttaacagacttgctgtgtagcagtttttttctggtggagttgctgtaagtcttgtaagtctaatgtggctatcctactcttttgggcaatgcatgtattatgcattggaaaggtattttttttaagttctgttggctagctatggttttcagtacatttcctactttaagagtaattactgacaaatatgtatttcctatatgtttatactttgattataaaaaagtattttgttttgattttttaacttgctgcattgttttgatactttctatttttttggtcaaatcatgtttagaaactttggatgagttaagaagtcttaagtatgcaggcgtttacgtgattgtgccattccaaagtgcatcagaactgtcattcccttctaatatcttctcaggagtaatacaaatcaggtatttcatcatcatttggtaatatgaaaactccagtgaactcccaaggacatttacaacatttatattcacacgctgtatggaagggtgtgggtgtgtgtgaaggggcgagtggagacactgtgtgtatctctagataagaagatatgcaccacgttgaaaatactcagtgtagatctctatgtgtataggtatctgtatatctttccttttgtttacaactgttaaaaacctcaaaatagttctcttcaaaagaagagagattccaagcaacccatctttcttcagtatgtatgttctgtacatacttatcggagcgcgccagtaagtatcaggcatatatatctgtctgttagcaatgattattacatcatcagatcagcatgtgctatactccccgcaagaaatatactgacatgaacaggcagttcttggagaagaaagagcatttctttaagtacctggggaatacagctctcagtgatcagcagggagtttatttgaggacatcagtcacctttggggttgccatgtacaatgagatttataatcatgatactcttcggtggtagtttcaaaagacactactaatacgcaggaagcgttccagctatttaatgctggcaactactgtttaatggtcagttaaatctgtgataatggttggaagtgggtggggttatgaaattgtagatgtttttagaaaaacttgtgaatgaaaatgaatccaagtgtttcatgtgaagatgttgagccattgctatcatgcattcctgtctcatggcagaaaattttgaagattaaaaataaatatcaaaaaaaaaaaa

SEQ ID NO: 28497 - DNA, 2875 bp, Homo Sapiens
gactcacgctgggctaggagctgaggcgagaagggccatgcggacggcgagggagtccagagccttgagcccggtgctcctccctcgcgcagcggtggctctgcggccgctggagtaaacactgcctttgttccctagcgcctcgtctttcgtcgccccgtgccctcacgccgccgggctctggccggcccgccctcggtccttgaaccccatttcggctcgtgccgtgcggatgcagctgccgggcctgggtttgggcattgagcgggaggaggaggaggagcggcggcgcctgggcggcatgcgatggggaactgctgctggacgcagtgcttcggactgcttcgcaaggaagcggggcggctgcagcgagtaggcggcggcggaggatccaagtattttagaacatgctcaagaggtgagcacttaacaatagagtttgagaatctagtagaaagtgatgaaggggagagcccaggaagcagtcataggcctcttactgaggaagaaattgttgacctaagagaaaggcattatgattccattgccgaaaaacaaaaagatcttgataagaaaattcaaaaagagttagccttacaagaagagaagttaagactagaagaagaagctttatacgctgcacagcgtgaagcagccagggcagcaaagcagcgaaagctcttggagcaagaaaggcagagaattgtgcagcaatatcatccttccaacaatggagaatatcaaagttcaggaccagaagatgacttcgaatcttgtttgagaaatatgaagtcacagtatgaagtttttcgaagtagtagactctcatcagatgctacagttttgacaccaaatacagaaagcagttgtgatttaatgaccaaaactaaatcaactagtggaaatgacgacagcacatccttagatctagagtgggaagatgaagaaggaatgaatagaatgcttccaatgagagaacgttccaaaacagaggaagacattctacgggcagcacttaagtatagcaacaagaagactggaagtaatcctacatcagcctctgatgattccaatgggctggagtgggaaaatgattttgttagtgccgaaatggatgataatggaaattccgagtattctggatttgtaaatcctgtattagaactgtctgattctggcataaggcattctgacacagatcaacagactcgatagggtaaaattgtgtgaccttgtttatcagttatgaccaaatgttaaaaaccaactagaatgtataagtgattgtgcttagcctttttgtaagggagatgtgtaagaaaccatgttgtaaatgcttattttattacaaaggagtagggatgataggatctgaattgatacagaattaagtgcaatttcatcatctgccttctgcttttcaagaccaatttaatggtcctgtcatgttactgattaaatttactttgtcttgtctttatagcatttctgtttactatggtagatttccactttcaatttttaaaattaattttactttgaatgatttatgaagcctatttcattgtctaactatgaaaatattaagacttttttgttaattctcagccgatgtgaaggaagcatgaggagggatcgtcagattcagatttagaatagtgttcccgtttccagcattatttatttctatgacttctttggattttattatctaatagtaagtacagttgatgtgggtagatgactctaagaaatgctgaagtatcggcattacatgtgtttatttacatgtcctagtatgataatgttgattcaatctgaacaaaagataatataaaaataacccttcagagtttggacatttcaagttggtaataataaaaaataatatttaagaagagatatatatatatatatatttagttttttccacttcattttacatgccactatattgactttaattgatatacagtattaagtttttaggtgccattatttttaaaaaattctatatttccaatgaacgatgttagattttacacagaacatattctctgcatgatttcagaaaagaaaatctaaaaaggtaatacgggtatttcaaataaaatcctttctggtatgaaaggctccattgattttattaagccttcctttaccttgtagtacaaggtgctttaatgggatagaactaagcatatcaatatctataactgcattttgtgctagacaattactgttcttttctctaaaatgtatatgtcaatttacaaggccagggatagaaaacactccataattgctttccttgattttgctgaggatttggtatgattttagtaagcaaactgttttttggtttttccttaatgtttttaattttttttcctcttgcaacaatgacggtgcatgttcttataaatataggaaggtccagatataaatagtaacctaaagttcttgctgtgcttaaaaaaaaaaaatcatgtggccctttcaatatttgaactgctaagcaatgacatctgtagttttatctccttttttatgtcatagaaattaatatgatactttaaatatgtaaatataatacattaggtaatgctattatttatatctgtcttaacataatttaagttgtagctgtgtcttggaaatatttttaaggtaatctatattcacattgcctgtgttaatgctttttaaagtttgtatacatcagatgtatatttttggtttggcataagctacgattgtaatttttcttggctttttgttcataaagaattttttgaaggaatggtaacaaatggtaatttacaaatggttgtgaataaacacatttttacacttaaaaaaaaaaaaaaaaaaa

SEQ ID NO: 28498 - DNA, 7132 bp, Homo Sapiens
gagaaccccgatcgctgaggagcaagggggcgctaggaaagggaactgggttgcgacggtccggcgagagagagctggggtgctggggtgcggggaagttggggagcagaggccgcttggtgtccgagtagggtaagaccgcaccgacccagtccgttaggaaagaagggaaacgaggcaattgtcgggcggatccccggacggagggctaaggttgtgtggaaggcgctgctccccggatggcgaccgcagatactccggccccggcctccagtggcctctcgccgaaggaagaaggggagcttgaagatggggaaatcagtgacgacgataataacagccagatacggagtcggagcagcagcagcagcagcggcggcgggctgttaccctatccgcggcgaaggcctcctcactcggcccggggcggtggatctggcggaggcggtggctcttcctcgtcatcgtcctcttctcagcagcagctgaggaatttctcacgctcgcggcacgcgtctgagcggggccacctcaggggacccagcagctaccgacccaaagaaccgttccggtctcatccgccttctgtacggatgccttcgagctcactgtccgaaagcagtccccggccgtctttctgggagcggagccacctcgccttggaccgtttccgctttcgaggcaggccttaccggggtgggagtcgctggagtcgggggcgaggagtgggtgagcgaggaggcaagccggggtgcagacctcctctgggaggaggagcaggatccgggttcagcagcagtcagagctggcgagagccctctccacctcggaagagctccaaaagttttggaaggtctccatcaagaaaacaaaattattcatcaaaaaatgaaaactgtgtggaagaaacttttgaagatttgcttttaaagtataaacaaatacagttggaactagaatgcatcaataaggatgaaaaactagcattgagtagcaaagaagagaatgtgcaggaagatcctaaaacattgaacttcgaggaccaaactagcactgataatgtcagtattacaaaggattcaagtaaagaagtagctcctgaggagaaaacacaagtcaaaacttttcaggcatttgaattaaaaccactcaggcaaaaattgactttaccaggagataagaaccgtttgaaaaaagttaaagatggagcaaaaccactttccctgaaatccgacactactgattctagtcaaggattacaagataaagaacaaaatttaacaagaagaattagtacctcagatattctgtctgaaaagaagcttggtgaagatgaagaggaactatctgaattacagcttcgccttttggctcttcagtcagccagtaaaaaatggcaacaaaaagaacagcaggtgatgaaagaaagcaaagaaaagttgactaagacgaaaactgtacagcaaaaagttaaaacaagtacaaaaacacattcggccaaaaaagttagcactacagctaaacaagcattgaggaagcagcaaacaaaggcatggaagaaactacaacaacaaaaagagcaggaaagacagaaagaagaggatcagcggaaacaagctgaagaagaagagagaaggaaaagagaggaagaaatcagaaaaattcgagatctctcaaatcaggaagaacagtacaatcgattcatgaaattggttggtggcaagaggagatcaagaagtaaatcttcagatcctgacctgaggcgatccttagataagcaacctactgatagtggaggaggcatttatcagtatgataactatgaagaagttgctatggatacagatagtgaaaccagttctccagctccttcaccagtgcaaccgccatttttctctgaatgttcattggggtatttttctccagcaccatctctttctttgcctccaccacctcaggtttcttctctgccacctttgagccagccttatgtggaaggcttgtgtgtttctcttgaacctctacctcctctaccaccattaccacctctcccacctgaagatccagaacagcctccaaaaccaccttttgcagatgaggaagaggaggaagaaatgctgcttcgagaagaactacttaaatctctagcaaataaaagagcttttaagccagaggaaacatccagtaatagtgacccaccttcacctccagttctgaacaattcacatcctgtgccaagaagcaatctatcaatagtcagtattaacacagtgtctcagcctaggatacagaatccaaagtttcacagaggaccccgtcttccacgaactgtgatctcgcttccaaagcataaatcagtggttgtaacactaaatgattcagatgatagtgaatctgatggagaggcttccaagtcaacaaatagtgtttttggtggattagagtccatgattaaagaagcaagacgaactgctgagcaagcttcaaaaccgaaagtacctccaaaatctgaaaaagaaaatgatcctctgcgaacaccggaggctttgcctgaagaaaagaagattgaatatagattgttaaaggaagagattgccaaccgtgagaaacagcgtttgattaaatcagatcagctgaagacaagttcatcatccccagcaaactctgatgtggaaattgatggtattggcaggatagcaatggttactaagcaggttacagatgcagaatcaaaactgaaaaaacataggattctcttgatgaaagatgaatctgttttaaagaatttagtgcaacaagaagctaagaagaaagaatctgttagaaatgctgaagcaaagattacaaaacttacagaacagcttcaagcgactgaaaaaattcttaatgttaacagaatgtttttgaagaagcttcaggaacaaattcacagagttcaacagcgtgttacaattaagaaagctttgactctaaaatatggagaagagcttgctcgggcaaaggcagtggccagtaaagaaataggaaaacgtaaactggaacaagatcgctttgggccaaacaaaatgatgagactggacagttctccagtatcaagtccaagaaagcattcagcagaactaattgctatggagaaaagacggttacaaaagctagaatatgaatatgccctgaaaattcaaaaattaaaagaagcccgtgtccttaaagcaaaggaacaacaaaatatctctccagttgtggaagaggaacccgaattttctttacctcaaccctcacttcatgatctgacacaagataaattaaccctggacactgaagaaaatgatgttgatgatgaaattttgtctggttcaagcagagagcgaagaagatcttttttagaatccaattattttactaaacctaaccttaagcacactgatactgctaacaaagaatgcataaacaaacttaataaaaatactgtagaaaaaccagaactttttctagggttaaaaattggtgaattgcaaaaattgtattcaaaagctgacagcctaaaacagctgattttaaaaaccaccacaggcattacagagaaggttttgcatggtcaggagatttctgtagatgtggattttgtcacagcacaaagtaaaacaatggaagtgaagccatgtccttttagaccctaccatagtcctcttctagtttttaagtcctacagatttagtccatattatcgaaccaaggaaaaacttcccctgagctcagtatcatacagtaatatgattgaaccggatcagtgtttctgccgttttgatttaacaggaacatgtaatgatgatgattgtcaatggcagcatatacaagactatacacttagccgaaaacagttattccaggacattctgtcatataatctgtctttgattggttgtgcagagacaagtactaatgaagaaattactgcttcagcagaaaaatatgttgagaaactttttggagtaaacaaagatcgaatgtcaatggaccagatggctgttctccttgttagcaatatcaatgaaagtaaaggtcatactcctccatttacaacctacaaagataaaagaaagtggaagccaaagttttggagaaaacctatttcagataatagcttcagtagtgatgaggaacagtctacaggaccaattaagtatgctttccagccagagaaccaaataaatgttccagctctggatacagttgtcactccagatgatgtcagatactttacaaatgagactgatgacatcgctaatttagaagcaagtgtgcttgaaaatccttctcatgtacaactttggctcaagcttgcgtacaagtacttgaatcaaaatgagggggagtgctcagaatccttggattctgctttaaatgttctggcgcgagcattggaaaataacaaagacaatccagaaatttggtgccattacctcagattgttctcaaaaagaggaaccaaggacgaggtgcaggaaatgtgtgaaacagctgttgaatatgctccagattatcaaagcttttggacttttctacacctagaaagtacctttgaagaaaaggattacgtatgtgagagaatgttggagtttctgatgggagcagccaagcaggaaacatccaatattttgtcctttcagcttttagaggctcttttgtttagagttcagctgcacatatttactggaagatgccaaagtgcactggcaattttacagaatgcattgaaatctgctaatgatggaatagtagctgaataccttaaaaccagtgatcgatgtttggcatggttggcctacatacatcttattgaattcaacattctcccttcaaaattttatgatccatctaatgataatccttcaagaattgttaacactgaatcatttgtaatgccatggcaagctgttcaagatgtaaagactaatcctgacatgttgttagcagtttttgaagatgcagtgaaagcttgcacagatgagagccttgctgttgaggaaagaatagaggcctgccttccactttacacaaacatgattgctctgcaccaactcctggagaggtatgaggctgcaatggagctttgtaaatctttattggaatcatgtcctattaactgccagttgctggaagcccttgttgcattatatttgcaaacaaatcagcatgacaaagccagagcagtgtggcttactgcatttgaaaaaaatcctcagaatgcagaggttttttatcatatgtgcaaattcttcatcttacagaatcgaggcgataatcttcttccatttttgcggaaatttattgcatccttctttaaaccggggtttgagaagtataataacttggatctgtttcggtatctcttaaatattccaggaccaattgacattccatctcgtttatgtaaagggaattttgatgatgatatgtttaaccaccaagttccttatttgtggctgatttactgcctttgtcatcctcttcaatcaagtattaaagaaacagtggaggcatatgaggcagcattaggggtggctatgagatgtgatatagtacagaagatatggatggattatcttgtctttgcaaataatagagctgctggatccagaaacaaagttcaagaattcaaattttttactgatttagtgaatagatgtttggttacagtccctgcccgataccccattccttttagcagtgctgattactggtccaactatgaatttcataatagggttattttcttttatttgagctgtgttccaaagacccagcattccaaaaccttggaacggttttgttcagttatgccagctaattctggacttgcattgaggttacttcaacatgaatgggaagaaagcaatgttcagattctgaaacttcaagccaagatgtttacatataatatcccaacatgcctggccacctggaaaatagccattgctgctgagattgttctaaagggacaaagagaggtccaccgtttatatcagagagccttacagaagttacctctttgtgcatcactgtggaaagatcaactcttgtttgaagcatcagaaggaggtaaaactgataacctgagaaaactagtttccaagtgccaagagattggagtcagcctaaatgagctcttaaatttaaacagtaacaaaacagaaagcaagaatcactgaacactgggtgcagtcagttctaagtccttataataattgccaaaattatttgaatgattcttcaagattaggctgatccctggctaaggtctgtgtaaggcagacaagcgttattgatcatatcaagttccctacaatatcctgtcctcaaaaccggaagcaatgaacatgatcctcttcggttggataaatgaacttcctgtttggcctgcttctaggccctgccagattctcataacatcatatacgtaagtatagttcctcaaagtgactgacatttattttaattttgctttgtttttttttattttctcccccattcctttattttgtgttattcctgactcacttgacactctctgatgcctgagagattcctgtttgggatttaatatccagggctgtgtttacagtaaaaaaagcaggcagtcccttttagtttttcctttttaaatttttttgagattcttcatttcaggatttaaaactatagcagtccatcttaaggaaagtgtaactgccatggccacaagtctgctagttgcacttgaatgctctatcagggttgtttattaccctttctacgttctggactccttgccgagactgtttaacttgaagattaaagaaactattgcaaatgccagtgcatcagaacctaagagtggtcaaatattatgtgcaatttttttgtaaagaaattttaatttataataaagtttaacagtttaaagaacagttaatatttgaactgctttgtattgaaatactactttgtagtattgaaattgtttatatacttttttaatataagttaactttctaaaaaaaaaaaaaaaaaaaaaaaaaaaaaaaaaaaaaaaaaaaaaaaaaaaaaaaaaaaaaaaaaaaaaaaaaaaaaaaaaaaaaaaaaaaaaaaaaaa

SEQ ID NO: 28499 - DNA, 1885 bp, Homo Sapiens
gggggaggggggcgcaggaccccaagtgggggtcccggagccagagggccaattcctgtccccccagcagcatggcatcgtgtgctgaaccctctgagccctctgccccactgcccgccggggtcccaccgctcgaggacttcgaggtactggatggggttgaggatgcagagggtgaggaggaagaggaggaggaagaggaggaagaggatgacctgagtgagctgccaccgctggaggacatgggacaacccccggcggaggaggctgagcagcctggggccctggcccgagagttccttgctgccatggagcccgagcccgccccagccccggccccagaagagtggctggacattctggggaacgggctgttgaggaagaagacgctggtcccagggccgccaggttcgagccgcccggtcaagggccaggtggtcaccgtacatctgcagacgtcgctggagaatggcacacgggtgcaggaggagccggagctggtgttcactctgggtgactgtgacgtcatccaggccctggatctcagtgtcccactcatggacgtgggggagacggccatggtcactgctgactccaagtactgctacggcccccaaggcagcaggagcccatacatccccccgcacgcggccctgtgcctggaggtgaccctgaagacggctgtggacgggcctgacctggagatgctcacggggcaggagcgcgtggccctggccaaccggaagcgggagtgcggcaacgcccactaccagcgggcggacttcgtcctggccgccaactcctacgacctcgccatcaaggctatcacctccagcgccaaagtggacatgacgttcgaggaggaggcacagctcctgcagttgaaggtgaagtgtctgaacaacctggcggcctcgcagctgaagctcgaccactaccgcgcagccctgcgctcctgcagccttgtgctggagcaccagccagacaacatcaaggctctcttccgcaagggcaaggtgctggcccagcagggggagtacagtgaggccatccccatcctgagggcagccctgaagctggaaccttccaacaagacgatccacgcagagctctcaaagctggtgaagaagcatgcggcgcagcggagcacggagaccgccttgtaccggaaaatgctgggcaaccccagccggctgcctgctaagtgccctggcaagggtgcctggtccatcccatggaagtggctgtttggggcgactgctgttgccttggggggtgtggcactctctgtggtcatcgctgccaggaactgaccacctaggtggctgccaccccctctgcacaccatggaccctgccctgcgctccccaactcccccaggctccctgtccactgccctccctggtctggccccctcctccgggttaggggagcaaggattgggggtcgtgcagcccagccagcaggagggactgaggccctctaggaggaaagcccagagggagggggccctcattccttcagacccagttttcccccaccctccttaccccgctgggctaggtctccgccagggctggcctcagtttctcctcaacaggcctgggggcagcccttcccctgcctagtccccgcctgagtgccagccccccaccccgcctgccgccccctgtccaggttccctccccgccacagtgaaataaagcatcccaccctgcaaaaaaaaaaaaaaaaaaaaaaaaaaaaaaaaaaaaaaaaaaaaaaaaaaaaaaaaaaaaaaaaaaaaaaaaaaaaaaaaaaaaaaaaaaaaaaaaaaaaaaaaaaaaaaaaaaaaaaaaaaaaaaaaaaaaaaaaaaaaaaaaaaaaaaaaaaaaaaaaaaaaaaa

SEQ ID NO: 28500 - DNA, 5988 bp, Homo Sapiens
gggcgtgacgatggcggccgtagggtccggaggctatgcgcggaacgatgcaggggagaagctgccctctgtcatggcgggagttccggcgcggaggggccagtcctccccgccccccgccccaccaatctgcctacggcggcggacgcgactctcgacggcctccgaggagacggtgcagaaccgggtgtcactcgagaaggtgcttggcatcacagcccagaacagcagtggcctaacctgtgaccccggcacaggccatgtggcctacctggcaggctgtgtggtggtgattttggaccccaaggagaacaagcagcagcacatctttaacaccgccaggaagtctctcagtgctctggccttctcccctgatgggaagtacatagtgacaggggagaatgggcataggcctgctgtgcgcatctgggatgtggaggagaagaatcaggtggcggagatgctaggccacaagtatggtgtggcgtgtgtggccttctcacccaatatgaagcacatcgtgtccatgggctaccaacatgacatggtgctcaacgtctgggactggaagaaagacatcgtagtggcctccaacaaggtatcttgtagagtcattgccctctccttctcagaggacagcagctattttgtcactgttgggaaccgccatgtgaggttctggttcttggaagtctccactgagacaaaggtgacgagcacagtgccccttgtagggcgctcgggcatcctgggcgagctgcacaacaacatcttctgtggtgtggcctgcggtcggggccggatggcgggcagtaccttctgtgtgtcctactcgggcctcctctgccagttcaatgagaagagggtgctggagaagtggatcaacctgaaggtctccctgtcttcctgcctctgtgtcagccaggagctcatcttctgtggctgcacagatgggatagtccgcatcttccaggcccatagcctgcactacctcgccaacctgcccaagccacactaccttggggtagacgtggcacagggcctggagcccagcttcctcttccacaggaaggcggaagcagtctacccagatacagtggcactgaccttcgaccccatccaccagtggctgtcctgcgtgtataaggaccacagcatctacatctgggatgtcaaggacatcaacagagtgggcaaggtgtggtcagagctcttccacagctcctacgtttggaacgtggaggtgtatcctgagtttgaagaccagagagcttgtttgccatcaggatcctttctgacttgttcttcagacaacaccattcgcttctggaacttggacagcagccctgattctcactggcagaaaaacatcttcagcaatttggctcctgctctgcagatgtgtggacgtggccactcccggcagcccaacacacccagcccaggtgaaattgcttcctaagtcttgagatggaattccctgggagggcacctgatgagccagcccattcagctgccacacaaccctgctgaaggtcgtgtacgtggagaatgacatccagcacctgcaggacatgccacacttcccagaccgggggagcgagaatgggacacccatggacgtgaaagccggggtgcgggtcatgcaggtcagtcctgacggccagcatttggcttcaggcgaccgaagtggaaatctgaggatccacgagctgcacttcatggacgagctggtcaaggtggaggcccatgatgctgaggtgctgtgcctggagtactccaagccagagacggggctgaccttgctggcctcggccagtcgggaccggctgatccatgtgctgaacgtggagaagaactacaacctggagcagacgctggatgaccactcctcctccatcaccgccatcaagttcgctggcaacagagacatccagatgatcagctgtggggctgacaagagcatctactttcgcagtgcccagcagggttcggatggactacactttgtccgtacccaccacgtagcagagaaaaccaccttgtatgacatggacattgacatcacccagaagtacgtggccgtggcctgccaggaccgcaatgtgagagtctacaacactgtgaacgggaagcagaagaagtgctacaagggctcccagggtgacgaagggtccttgctgaaggtccatgtggacccctcaggcaccttcctggccaccagctgctctgacaaaagcatctcagtgattgacttttactcgggcgagtgcattgccaagatgtttggccattcagaaattattaccagcatgaagttcacctatgactgtcatcacttgatcacagtatctggagacagctgcgtgttcatctggcacctgggcccggagatcaccaactgcatgaagcagcacttgctggagattgaccaccggcagcagcagcagcacacaaatgacaagaagcggagtggccaccccaggcaggatacgtatgtgtccacacctagtgagattcactccctgagccctggagagcaaacagaggatgatctggaggaagagtgtgagccagaagagatgctgaagacaccatccaaagatagcttggatccagatcctcgttgcctgctaaccaacggcaagctgccactgtgggcaaagcggctgctaggggacgatgatgtggcagatggcttggccttccacgccaagcgcagctaccagccccacggccgctgggcagagcgggccggccaagagcccctcaagaccatcctggatgcccaggacctggattgctactttacccccatgaagcccgagagtctggagaactccattctggattcactggagccacagagcctggccagcctgctgagtgagtcagagagtccccaggaagctggccgcgggcacccctccttcctgccccagcagaaggaatcatctgaggccagtgagctcatcctctactctctggaggcagaagtgacagtcgcagggacagacagccagtattgcaggaaggaggtggaggccgggcctggagaccagcagggcgactcctacctcagggtgtcctccgacagcccaaaggaccagagcccgcctgagggtgagtgcagggcaggcagggaccctgtgacagtctgtgcgttcagccaagcccctttctgggcaccgatggtgactttgacccagtactgaagctcagagtctgtcgaggaagacacatgtggtccctgctgctgcctgaggattctgggcccagctgcctacagctgagagcccagctctgccacctccttgatgtggaacttcccttattcataaaatggggggcagctgctcttaccatccctcctccagatggggaaactgagcccagggaagggtagccctggccctggctcaccagaatggtcaggctgtgggctcctgaccccgactctgtccttcagactcgggggagtcagaggccgacctggagtgcagcttcgcagccatccactccccagctccgcctcctgaccctgcccctcggtttgccacgtcgctgccccatttcccaggtaagcaggggccagacacgcaggggactcgctgctcgggcctggcttagggccagtcacaatgtctaagcacaggccctgcacttggagcccactgagcctggaagacggggatccctgcttctcagcctgcgggcaacagggcagggatgggtggggcccgctttctccatttcaggtggcgtctgctgtgactcatggtgttggctcctcttgtccctcccctccttccctgtcaggatgcgcaggtcccacagaagatgagctgtccctgcccgagggacccagcgtccccagcagctccctaccccagactccggagcaggagaagttcctccgccaccactttgagacactgactgagtccccctgcagaggtagggccctgcctcacccacacctgccgaggccgtctgtgcagcctgggcacagcattggcgtccctggagttggctccccagcagggccaggagggtgagtggagagcaactgcttcgttttttttgagacggagtctcgctctgttgccaggctggagtgcggtggcccaatcttggctcactgcaacctccgactccctggttcaagcaattctcctgcctcagcctcctgagtagctgggattataggcatccacaaccacgccctgctaattttttgtatttttagtagagatgaggtttcaccatgttggccagactggtctcaaactcctgcctcagatgatctgcccgccttggcctcccaaagtgctgggattacaggcgtgagccaccgtgcccggcccactgcttcactcttgacctgagcctcacgatgcctcctcacccactgcccctgctcgtaccctgtgtctgtacataagggtttctggggagtgccccgctgggctgtgggctggcctagggccagggctgctcggcgggaagggttatgagggtcccctcgggatcttcccctagagctcttctccgcagctctgggagacgtggaggcctctgaagctgaagaccacttcttcaatccacgcctgagtatctccacgcagttcctctcaagcctccagaaggcatccaggttcacccataccttccctccccgggcaacccagtgccttgtgaagtctccagaggtcaagctcatggaccgaggcggaagccagcccagagcaggtactggctacgcctccccagacaggacccacgtcctcgctgcagggaaggctgaagagaccctggaggcctggcgcccaccacctccctgccttacgagcctggcgtcctgtgtccctgcttcctccgtgctgcccacagacaggaatctcccaacgcccacatctgcacccaccccaggcctggctcagggtgtccatgccccctccacctgttcctacatggaggccactgccagctcccgtgccaggatatcacgcagcatctccctcggtgacagtgagggccctatcgtggccacactggcccagcccctccgtaggccatcgtccgttggggagctggcctccttgggccaggagcttcaggccatcaccaccgcgacaacacccagtttggacagtgagggccaagagcctgccctgcgttcctggggcaaccacgaggcccgggccaacctgagactgaccctgtcaagtgcctgtgatgggctcctgcagccccccgtggatacccagcctggcgtcaccgtccctgcagtgagcttcccagcccctagccctgtggaagagagcgccctgaggctccacggctctgcctttcgcccaagtctcccagcccctgagtcccctggccttcctgcccaccccagtaacccccagcttccagaggcccggcctggcatccctggcggcactgcctccctcctggagcccacctccggtgcacttggtctgttacagggcagccctgcccgctggagtgagccctgggtgccggttgaagccctgcccccatctccccttgagctgagcagggtggggaacatcttgcacaggctgcagaccaccttccaagaagccctcgacctttaccgtgtgttggtctccagtggccaggtggacaccgggcagcagcaggcacggactgagctggtctccaccttcctgtggatccacagccagctggaggctgaatgcctggtggggactagtgtggccccagcccaggctctgcccagcccaggacccccgtccccaccgacgctgtaccccctggccagcccagacctgcaggccctgctggaacactactcggagctgctggtgcaggccgtgcggaggaaggcacgggggcactgagggcgcagcccctccaccgcagccctgctgcttctgaggacttaggtattttaagcgaataaactgacagctttgaggaaaaaaaaaaaaaaaa

SEQ ID NO: 28501 - DNA, 7609 bp, Homo Sapiens
gggcagagagccttggaggctcgggtagggcgtccacgctctcgccggaatgtgtagatacatcctggaaagagatgctctctgagatacatcctgtagccctatttgccatgagactttctggcaccttttagtactactttttgccaggggtgggatacaatcctaaatccttcactcagcaaatcttgaagaagaccgtgggtggtccgtgtgtccaggtgggatgcttctgcttcctagcgccccctgaggtttctgctggccattggctcttggcttaacactccacgatttaggcagttccccattaaacagatgccactttcagcaacagaacacagcccctggagccagtttcacaggggtgttctgaggcccagtgaggtgacatgagccgtgttggtgacgtaatgacacaagcatgcagaaccatgctgccgggagagcaggtgacagccagacacagccacaaactggctggcagcatccccacctggtggcacctgagccacatgttgacatcactccttctgtgtggaggggaaaggatgacaggacccaaccccagacaggagattttggtgccactcctcggggcaggaatgtgggaaatggcaggccagccctctggaggaggaactgtgaagggcccagtgccgcatgccccagtttcctgcctggctcttccacagaggccagctggtgcatctgagcatggcgcctcagggcagagctccacggtgggcactgggggaagagatgcagagcttgtctcctcagcccacgtctgtgcagtccttttgtgtttttctagccaagcagtcccttacactggttccaagccctgtgacctctctgccctcactgccagcgttactaaaatgttccagcagagctccactcgatagagaatatgggtggaggaaacccagaagagtcggtcccacatgctctccatcacttttaccttcctgctctgccccagctttctcatccccttttatcccttcgcctcccttggtgtttcgtcttgcttagacctgaagttctgcgagcgctgttggcagtgccaagcttagtgcagttccttggggtgaaagcgttggtcccacccaagactgtgcagccagcatgtggcagtagccgctgggggagttgtgcagcctctgtgtaaagatctctccatcccaagtagcaccccttagcatggtgccctataccatctgtaccacatgagttgcagagaaaatgctccttgaataatttcatgatttaaaaaggcaaaaaatacaaagggttattaaaaggaaaagcaaatcagaagccacaaaggaaaattttaataatatttgaatcaaaacgttctctaattgcagctcgtgtactgttcagagtctccccttcactcctacctcaagcactgttcagtaggggcttttgctaacttccctttgcttttcctgtttcatttcatcatcactgtcttgggagcatctgtagttctgggccctgtgaaacacattccacccacaggagctgcccgcacctttccccaggacaggcacctcgggaggatcgagcgcacacaaaacggagcacagcctgctccaagtgtgggcactgcctgaggggacgagtcactgcaggggcggagcgaggccagaggaagtggctagggaagggtcaggacagttgtacaaatagcaagccgacagtgtagacgtggtgtcagatgggaggcctcagaggagcttgatggggacaaagattcgagcagggctcgtatgggagagcggtgtgagacacgtcctgagtgtgggcatcaggtcagcagatccacagaaccagcgaggaggggcccatgtcatcaaggggtgagagtgggcgggtgggagacaggaccgtgagtctggcaccagtaccagcagcactggggaaggtgagagagaaggtagcaggcagccctgaggatggcggagtggagagcacgggcttccaagggaaggctgctttgctcggcagggccatgctggaggcttgacctagccaagacatgggaaaccttgagccctgagccctgggggtaggggagaagcagcttgtgctacagggtgtgaccagggaagcaagaggcagcaggcagagcggctgcaatgtggcagtgaggggacgggagaagtggagcggggggtactcagggtacgcggaaatctcacaaggcaggaggggccagccaggtagcgagctggccaggcctgggctggggatcgtgccctgtggtgatgggaattcacaggtccaagctctcccccaccttcttcctcttgcagtagctacagcagcaccaagttgcacacaatagatgtgcaaaatgatacatttttctgataaaaggtatacatatttccgtttactgagtagagaatgttattttatgactgaaattttttgttttaatttcagagatggggtcaggctggagtgcaatggtgtgattatagctcactgcagcctcaaactcctggctcaagcctcccacctcagcctcccaaagtgctgaggttacaggtccgagccactgtgcccagcctgttttagatttttaaaacagctgtatagacattactttaaagggcacaggaatatactaggagcttaatagggatcagagctgcacatcccagtcacgccaatggagaggctttactgaacttggggattcagcccggaacactgcacctcccacagctgtaaacctgcgtgtaggcacaaggattttccaggtccccaggcagcggcctcagctgtccacccctggaggatgtggaagaccctcctcccctacctgaggtgggagaagtgaagacattgactgtccgccacacaacacagcagggaccgggcacgctcttgctcccctcaaatccccgagtgcagagagatgtggctgctttctctttaaaacctgttaaacagaacacatctaagagctttcgtttgttttctttgtagaagggcttgagttatgcatagtcttagagaacattcaaagtgatttggaagagcgctaatcaaaacaccacactaacgagcccgtttgtttttaatttccagctactgatagtctttataaactttctctgcaaaccctcaacgcagacattttcttaaaacaacgccagacctcaccgacacctgcttccccgtctcccccagctgccccctgcccctttgtggcccggggcagctacagcagcatcgtcaacagcagctccagcaggtaggcctgctgcttcctttccggttctcagcttgaaatgtgcctaaaacccgatgtcacaccctttaaatggaaacacttagcggccacaggccactgtctggtgttacttctgatggctgccagcttgtgtggacccttttacctggggtccacccccgcttcctgctgctgtgcccagctccaacagtaacccggttcccattctaatccattcattcttaccacctgtggaccgagaaatgcaccatttaactcactagagtgatattctcagtgagccaatgaacatttactaagccttacatgaagacctaaaggggattcctgtgagttgggagtatgggtttatgtgacactaattttggcctttggacaatttggcttaggacttagaagggcaggacctggtccaagaccgttgtgctgggtgaggtgctgcagtaggggatgtgtgcacccgggagggcagcctcctgaccacacagacaggatgcaggaagcatgctgttctccgaggcacggagcctcactcgtgtccgcctgccacagtgtaccgcaagcctgacagtcacggatggcactctcaccgtgtgcctcgccgtggcgtgggtttctgtgcatcgcgtcatcggccagcctagggtcaggtcctccccgccgttgcccaagaggcagtaaccactgaggctgggggagccaccccgcttctgggccttgccacaggagcacctcgccgtgtcctggcagggaaggagactccctgaggccccgccctttccggtgtcggtggctgccctctgcatttcctgccgagtggctctctagcattcttcacaaaagtgtgatcgaagcctctgccagtccctaaattgtgatccctgccctggtctctttcatagtgatcttttgttttcttacctttctccagaaagccctctatctctgtctgattaagcagtctgaggccccagagcatgtgacatgaggctgagcgatgctctgtgagctgccccgctgcagagaagcccactcagggctcagtcctgccagccccacacctccccgagacagggcactgctgatgaggaatgagttctctctttgcttctttttcaagtgaccctaaaataaaacagccaaatggaagcaaacacaagttgacaaaggcagcctcgctcccgggcaagaacggcaaccccacttttgctgcagtcacggctggctacgacaagagcccaggtcagtgcctttgcttcagagacctgccacgccaggcgccagacctggtggaatgacctctgtcctaatgtgccttccattgattgaacgtccattgttacaggtgggaatggctttgctaaagtttcttcaaacaaaacaggtttctccagcagccttggcatttcacacgctcctgttgacagcgatggctcagacaggtacggtagaccaccactaaccgctagaaagacggaaggcttctcaagtcgggttagcaccttttatccataaatgggtttcagggcatttttcccctaatttacaaggaggcatttgtcagaagtggtcaagtgcctctaagaaatcatgtctgctgggtggaagcagaaagccggctgcggtgccttccccagggggtccagatagagaaagggggcacccatgcctgtctcagccaggcagacacacgttacacctgttctcactctcctccatctcctggtctgtggtaagatgtgatctgatcattaaaaatagaagagcgaaagtgacttgggaggggggaaatctggagcaaatactagccaatttatagtaaatcactggccacgcctctttcttgagcaggcttgtttatcatgcagggggtgtggtggcctgcagcagtcaccttggttgacttttccagataagcaacaatagagccccaatttacctactttgcactaataggaaatgagttctagatttgaaatagtttttaaataaatcttccagtaccaaaaagcaaacagaaggaaaaaaatgtctgtttctctgcaaaacacttgctttgaacctggctgtgagctagtgatagggcatccggagctctggggctccctccgactcaacccttgtggtaagcagccattgttcagctcttccttttgtctgtttttaatatttgagtacccccagttgaagcagtgtctcctgtttgtgaagctgtgcactatggatccgtttgcactaaccaccatacatttttgtgtgttgcgttttcctcttgtaacatttagctcgggtttgtggagtcccgtcagcaacccaagcagccctgacttcactcccctcaattcgttctccgcctttggaaactcttttaatctaactggtggtgagtgtttaacactagatgtgtaactaataagcctgtggacagaggaagggagaggaggtgtggttttgtgtgctggagaacacagcacagcagcactgtggaagaggccccgcaggaagctccctgggaagggtcccctcccctcttcctccctcatccacaccagcagcccagaggggcagtggaccaggctcgacacggtgtgcgcacaccagttggtgtgagttccatggcgggtattgaagggcttcacagaagggttctggtctgaaatgggacccctgagtgtgccaggggtcctcttcttgctgtccagaactagaggtcaccatggaagcttcccattagctatcatgtgagagtggggaaagtttgcatttggatgtcatcggtggcatatcagctcgtgcactatgcgtttgagttctggaggacactcctgcccctacttcctctgggctgtggtgggctggtgaagtgggtgtggtggctccaggagcagtggttggaggtatgccattgagtgaagccccatatgctatagtgatcatggcaaaaccaaatatggacttgatgactgttgctttatttccagaagttttcagcaaactcggattatctcgatcgtgcaatcaggcctcacagaggagctggaacgagtttaatagtggcccttcatacctttgggagtcgccagcgacagatcccagtccttcctggccagccagttccggctccccgacccacacagccacatcggtcctcggtaacaccagcggcctgtggtccaccactccattcagcagctccatttggtccagcaaccttagcagcgcccttcccttcaccactccagcaaacacgctggcaagcatcggcctcatgggcacagaaaactcccctgctcctcacgctccctccacctccagtccagctgacgacttgggacagacctacaacccgtggcggatatggagccccacgattggaagaagaagctcggacccttggtctaattcgcactttcctcacgagaattaaattaagcaaaaaacaaacaaacatagtgggccctcgtctagatcatgatgtgccagtttctgagacatctttttaaggctcttactgcagctcccctccccaccctcctcttctttgcaaaacagacccaagcagggcaggctcagaccactcgcttctttcagatctttcttgcaattatgataacatgagatttgctgttgtgcttttagagaaaagtctggactcagccacaaactctaataagacctgtacatctgagaacctttcccgttactgcgttttcaccacctgtcttccccatgctttatttatctgtatgaacacagatttgacattacagctaaggaaataatttgagttgattcagaaatcctggcatgtgacaattttgttaaattaccaagtttggtttttaataatttctcaatattatgcgccaagatctaattttaaaactgtatgaggactttgtgctgaaaatagagtattttttttaaagtaaggctgtcttggtttaaaagcagattacagaaatgtaagtcaacttaagaacggtgaatgaatgtaaaaacattcagttgagaccatatgcattttctgtgctgtttgtacttgaggtatgtaacatttgtatacctgaacttattttaaagatgaactgaaatgcacatagccaagtcttgagatacaagattgaatgtgtatttcttaaaaatacaactttgtgttgtactttgaaataaatgatgcttttttcaaaaaaaaaaaaaaaaaaaaaaaaaaaaaaaaaaaaaaaaaaaaaaaaaaaaaaaaaaaaaaaaaaaaaaaaaaaaaaaaaaaaaaaaaaaaaaaaaaaaaaaaaaaaaaaaaaaaaaaaaaaaaaaaaaaaaaaaaaa

SEQ ID NO: 28502 - DNA, 1861 bp, Homo Sapiens
ggcccctgacatatgtgtccttctcttccctctctccacctggtttctcttacctttccaaaagctcaattgaatctatatttagcttcttgaagcttttttcaaacgttctgtgactgggctaatgctaatgtcagcagacagattgaggacactgtattatacggttactatactttatattctgttatattgttctgtgtgttcttctggatcccttttgtctacttctattatgaagaaaaggatgatgatgatactagtaaatgtactcaaattaaaacggcactcaagtatactttgggatttgttgtgatttgtgcactgcttcttttagttggtgcctttgttccattgaatgttcccaataacaaaaattctacagagtgggaaaaagtgaagtccctatttgaagaacttggaagtagtcatggtttagctgcattgtcattttctatcagttctctgaccttgattggaatgttggcagctataacttacacagcctatggcatgtctgcgttacctttaaatctgataaaaggcactagaagcgctgcttatgaacgtttggaaaacactgaagacattgaagaagtagaacaacacattcaaacgattaaatcaaaaagcaaagatggtcgacctttgccagcaagggataaacgcgccttaaaacaatttgaagaaaggttacgaacacttaagaagagagagaggcatttagaattcattgaaaacagctggtggacaaaattttgtggcgctctgcgtcccctgaagatcgtctggggaatatttttcatcttagttgcattgctgtttgtaatttctctcttcttgtcaaatttagataaagctcttcattcagctggaatagattctggtttcataatttttggagctaacctgagtaatccactgaatatgcttttgcctttactacaaacagttttccctcttgattatattcttataacaattattattatgtactttatttttacttcaatggcaggaattcgaaatattggcatatggttcctttggattagattatataaaatcagaagaggtagaaccaggccccaagcactcctttttctctgcatgatacttctgcttattgtccttcacactagctacatgatttatagtcttgctccccaatatgttatgtatggaagccaaaattacttaatagagactaatataacttctgataatcataaaggcaattcaaccctttctgtgccaaagagatgcgatgcagaagctcctgaagatcagtgtactgttacccggacatacctattccttcacaagttctggttcttcagtgctgcttactattttggtaactgggcctttcttggggtatttttgattggattaattgtatcctgttgtaaagggaagaaatcggttattgaaggagtagatgaagattcagacataagtgatgatgagccctctgtctattctgcttgacagccttctgtcttaaaggttttataatgctgactgaatatctgttatgcatttttaaagtattaaactaacattaggatttgctaactagctttcatcaaaaatgggagcatggctataagacaactatattttattatatgttttctgaagtaacattgtatcatagattaacattttaaattaccataatcatgctatgtaaatataagactactggctttgtgagggaatgtttgtgcaaaattttttcctctaatgtataatagtgttaaattgattaaaaatcttccagaattaatattcccttttgtcactttttgaaaacataataaatcatttgtatctgtgtaaaaaaaaaaaaaaaaaa

SEQ ID NO: 28503 - DNA, 1943 bp, Homo Sapiens
acataaactgtgcagtaaccattgctttaataagtacagattggccaatggtctaataatgaactgctgtgaacactgtggagagtacatgcctagtaagagtactggaaacaacatcctggtgattggaggtcagcagaagagattttgctgccaaagttgtattaacgaatataaacagatgatggaaacaaaatcaaaaaaattaacagcatcagaaaatagaaaaaggaatgcttttagagaagaaaatgagaaacaattatatggatcgtcaaatacacttttgaaaaaaatagagggaatcccagaaaaaaaggaaaagacttcacagctacagctttcagtagaatgtggcacggatacattactgatccaagagaatgtgaatttacctccttcttccacgtcaaccatagctgatacatttcaagagcaactggaagagaaaaattttgaagactccattgtaccagttgtgctttccgcagatccaggtacgtggccccgaattttgaatattaaacaacgggacactcttgttgaaaatgttccgcctcaagtaagaaattttaactttccaaaagataatacagggaggaagttttcagaaacttattatacacggattcttccaaatggtgaaaaaaccactagatcctggttactttattcaacctcaaaagattctgtgttttgtctatattgcaaactctttggggaaggaaaaaatctactgaaaaatgaaaatgggtgcaaagattggcaacatttatcacatattcttagtaaacatgaagaaagtgaaatgcacatcaacaatagtgttaagtactcaaaattaaaatctgatctgaaaaaaaataaagctattgatgctgcagaacgcagattatatgaaaatgagaaaaatgatggtgtgctgttgttgtacacgtaatatacctgagttgttttttggcatgatgatcagaatcttacattactcagaaaacatctgtcctgcaatagtcagtactattgtgttgtaagtctcctctacagagtaacttgcagcagttccttagcaataagtatgatagcaaataaatagcaaagaatgtttccattctaaatctaaaactaattagattcaatcatcattaggcaatgacttcattaggcaatgaagattaacaataggtaattgttaatcttcaaaatctatcaatttacacctatttaaaaattggcatttaatgactgccatttgatgggtttggttaatattctgttcttggccgggcgcaatggctcacgcctgtaatccaagaactttgggaggctcaggcgggtagatcaattgaggtcagaagttcaagaccagcctggccaacgtggcaaaacctcgtctttactaaaaatacaaaaattagccaggtgtggtggcacacacctgtagtcccagctactcaggaggctgaggcaggagaatcgcttgaacccaggaggcagaggttgcagtgagctgagattgcaccactgcagtccagcctgagcaacagagcgagagtcagtctcaaaagaaagaaaaatattatgttctaattaccttgaaagaggaaagaaaggcttgaattgatcaataccagtttgaataagatacttatgtgaacaagcattctcaacattattattaaagtaaaactactcagtttacagaatgggatctgaaactacagctttttgctattaaaccaaatacttgtgatctactttgtttgagcaaaacagcattatttgttatgttaatgatggttaatttccattttattggttttatgtttattttaatttgtaaatgttttagcatttattattgtatgtgaactatatttacctattttatgttgataaaaatataaaaaatattaaaataagtatatattaagtttaaaaaaaaa

SEQ ID NO: 28504 - DNA, 4754 bp, Homo Sapiens
ggaggggggcgggtccgggaggctgtgcgtgtcttgtgagagctcttgaaccaagtcagcgctggagtcggctaggcggctggaaacggcggctgccgccggtgactcagggaggcgggaggcgggggaggagctcttcctgcaggcgtggaaaccatggtgctcacgctcggagaaagttggccggtattggtggggaggaggtttctcagtctgtccgcagccgacggcagcgatggcagccacgacagctgggacgtggagcgcgtcgccgagtggccctggctctccgggaccattcgagctgtttcccacaccgacgttaccaagaaggatctgaaggtgtgtgtggaatttgatggggaatcttggaggaaaagaagatggatagaagtctacagccttctaaggagagcatttttagtagaacataatttggttttagctgaacgaaagtcacctgaaatttctgaacgaattgtacagtggcctgcaataacgtacaaacctctgttggacaaagctggtttgggatccataacttctgttcgctttctgggagatcaacaaagagtatttctttctaaagaccttttgaagcctatacaggatgtaaacagtcttcgactttctcttacggataatcagattgtcagtaaagaatttcaagctttgattgtgaagcatttagatgaaagccatcttttaaaaggtgacaaaaacttagttggttcagaagtaaaaatttatagcttggacccatctactcagtggttttcagcaaccgttgtaaatggaaacccagcatcaaaaactcttcaagtcaactgtgaggagattccagcactgaaaattgttgatccgtcactgattcatgttgaagttgtacacgataaccttgtgacatgtggtaattctgcaagaattggagctgtaaaacgcaagtcttctgagaataatggaaccctggtttccaaacaagcaaaatcttgctctgaggcctctcccagtatgtgtcctgtgcagtctgtacctacaacagtttttaaggagatactgcttggctgtactgcagcaactccacctagtaaggacccaagacagcaaagtactccccaggctgccaactctccacctaaccttggagcaaaaattcctcaaggatgtcataaacaaagtttaccagaggaaatttcttcctgtctaaatacaaagtctgaagctctgagaacaaaaccagatgtctgcaaagcagggttgctctcaaagtcctctcagattggaactggagacttgaaaattctgactgagccaaaaggcagctgtactcagcctaagacaaacactgatcaggaaaacagattggagtctgttccacaagcattgactggccttcctaaggagtgcttacctacaaaggcttcttctaaggcagaattggaaattgccaatcctcctgaactgcagaagcacctagaacatgcaccttccccatcggatgtttcaaatgcaccagaagtgaaagcaggtgtcaatagtgatagccctaataactgttcaggaaaaaaggtagaaccttcagctttagcttgccgatcacagaatttaaaggaatcttcagtaaaagtagataatgaaagctgttgttcaagaagcaacaataaaatccagaatgccccatccaggaagtcggttttgacagacccagctaaactcaaaaagctgcaacagagtggcgaggccttcgtacaggatgattcttgtgtgaacatcgtggcacagttgcctaaatgccgagagtgtcgcttggacagtctccgcaaggataaggagcaacagaaggactcacctgtgttttgccgcttctttcacttcaggaggttacaattcaacaaacatggtgtgttgcgggtagaaggcttcttaacaccaaacaagtatgacaatgaagcaattggcttgtggttacctttaaccaaaaacgttgtggggattgatttggacacagcaaagtacatcttggccaacattggagaccacttctgtcaaatggtgatttctgaaaaggaagctatgtcaactattgagccacacagacaggttgcttggaagcgagctgtcaaaggtgttcgagaaatgtgtgatgtgtgcgacaccaccatcttcaacctgcactgggtgtgtcctcggtgtgggtttggagtatgtgtggactgctaccggatgaagagaaagaattgccaacagggtgctgcttacaagactttctcttggctaaaatgtgtgaagagtcagatacatgaaccagagaacttaatgcccacacagatcattcctggaaaagcactctatgatgttggagacattgttcattctgtaagagcgaaatggggaataaaggcaaactgcccttgttcaaacaggcaattcaaactcttttcaaagccagcctcaaaggaagacctaaaacagacttctttagctggagaaaaaccgactcttggtgcagtgctccagcagaatccctcagtgttggagccagcagctgtgggtggggaagcagcctccaagccagccggcagcatgaagcctgcctgtccagccagcacatctcctctaaactggctggccgacctaaccagcgggaatgtcaacaaggaaaacaaggaaaaacaaccaacaatgccaattttaaagaatgaaatcaaatgccttccacccctcccacctttaagcaaatccagcacagtcctccatacgtttaacagcacaattttgacacccgtaagcaacaacaattctggtttcctccggaatctcttgaattcttctacaggaaagacagaaaatggactcaagaatacaccaaaaatccttgatgacatctttgcctctttggtgcaaaataagacgacttctgatttatctaagaggcctcaaggactaaccatcaagcccagcattctgggctttgacactcctcactattggctttgtgataatcgcttgctgtgcttgcaagaccccaacaataagagcaactggaatgtgtttagggagtgctggaaacaagggcagccagtgatggtgtctggagtgcatcataaattgaactctgaactttggaaacctgaatccttcaggaaagagtttggtgagcaggaagtagacctagttaattgtaggaccaatgaaatcatcacaggagccacagtaggagacttctgggatggatttgaagatgttccaaatcgtttgaaaaatgaaaaagaaccaatggtgttgaaacttaaggactggccaccaggagaagattttagagatatgatgccttccaggtttgatgatctgatggccaacattccactgcccgagtacacaaggcgagatggcaaactgaatttggcctctaggctgccaaactactttgttcggccagatctgggccccaagatgtataatgcttatggattaatcactcctgaagatcggaaatatggaacaacaaatcttcacttagatgtatctgatgcagctaatgtcatggtctatgtgggaattcccaaaggacagtgtgagcaagaagaagaagtccttaagaccatccaagatggagattctgacgaactcacaataaagcgatttattgaaggaaaagagaagccaggagcactgtggcacatatatgctgcaaaggacacggagaagataagggaatttcttaaaaaggtatcagaagagcaaggtcaagaaaacccagcagaccacgatcctattcatgatcaaagctggtatttagaccgatcattaagaaaacgtcttcatcaagagtatggagttcaaggctgggctattgtacagtttcttggggatgtggtgtttatcccggcaggagctccacatcaggttcataacttatatagctgcatcaaagtggctgaagattttgtttctccagagcatgttaaacactgcttctggcttactcaggaattccgatatctgtcacagactcataccaatcacgaagataaattacaggtgaagaatgttatctaccatgcagtgaaagatgcagttgctatgctgaaagccagtgaatccagttttggcaaaccttaatctccctgcacattggaaatgaattacaggcagctgttcaaactcttcaggcaggattcctgtggactttgagattcatgttacctcatcttcttttttaaactgtacccaacttgtgagggtactctgtctaatgtatatttctagtgtttacagacagtaaatgtgtatatgtagtaactatttacagaacatgcatccttaaactgtgacttctcacctagtgcagaacttttaccaggctgtaaaggcaaaacctcgtatcagctctggaacaatacctgcagttattcttcagctgtttggacaacttagattgggtttataactattaggaatcactgcacagtttatttgggttgtgttttgtgtctgagtcccctccctcatcccttagggtccagaagagcaatggaggaagtgacagctaatgttgcagttcttattgtatggcataggactggcattatatagcagaaatcaactactgtacaatttcttggggttaaccatctttagttaaatggaattttaatttaaatgacgctttgctaattttaagtgttaagcattttgcattaaaatattcatataataaaaaaaaaaaaaaaaagaaaaaaaaaaaaaaaaaa

SEQ ID NO: 28505 - DNA, 5210 bp, Homo Sapiens
  misc_feature (5209)..(5209): n is a, c, g, or t
ggccccagccaggctgcgggcccgagacccccgggcctccctgccccccgcgccgccccgatttgccctcagagagggtatcgatcttatttctgggtctacggcaaactccaaggtctacaaacgtagaggtcagctgtgaccccgggccaggccgtgaaggtccccaggacacagagctgctctctcctcctagtaaaggtgagaggcagcccaggcctcgtgaaaaaacccagaactggagtcccaaaaggccacgctgatctagctaccctcccagtcaccttgcactcagtcccgagctgccaaagcctccgccgccaccacctccgctctacttccggccctggctccgcccccacacgcctacccgccatcgcaatgcattatgggccgccgtttcagtcggtcgacgctcaccggacaggaagcgtctcggagacagtctgcgaccggacgggtctaggtgagacagaagccaaacaggaggaggaagtggagggactgatcctttgaaatactccagccatgactaaaagagaagcagaggagctgatagaaattgagattgatggaacagagaaagcagagtgcacagaagaaagcattgtagaacaaacctacgcgccagctgaatgtgtaagccaggccatagacatcaatgaaccaataggcaatttaaagaaactgctagaaccaagactacagtgttctttggatgctcatgaaatttgtctgcaagatatccagctggatccagaacgaagtttatttgaccaaggagtaaaaacagatggaactgtacagcttagtgtacaggtaatttcttaccaaggaattgaaccaaagttaaacatccttgaaattgttaaacctgcggacactgttgaggttgttattgatccagatgcccaccatgctgaatcagaagcacatcttgttgaagaagctcaagtgataactcttgatggcacaaaacacatcacaaccatttcagatgaaacttcagaacaagtgacaagatgggctgctgcactggaaggctataggaaagaacaagaacgccttgggataccctatgatcccatacagtggtccacagaccaagtcctgcattgggtggtttgggtaatgaaggaattcagcatgaccgatatagacctcaccacactcaacatttcggggagagaattatgtagtctcaaccaagaagatttttttcagcgggttcctcggggagaaattctctggagtcatctggaacttctccgaaaatatgtattggcaagtcaagaacaacagatgaatgaaatagttacaattgatcaacctgtgcaaattattccagcatcagtgcaatctgctacacctactaccattaaagttataaatagtagtgcgaaagcagccaaagtacaaagagcgccgaggatttcaggagaagatagaagctcacctgggaacagaacaggaaacaatggccaaatccaactatggcagtttttgctagaacttcttactgataaggacgctcgagactgcatttcttgggttggtgatgaaggtgaatttaagctaaatcagcctgaactggttgcacagaaatggggacagcgtaaaaataagcctacgatgaactatgagaaactcagtcgtgcattaagatattattacgatggggacatgatttgtaaagttcaaggcaagagatttgtgtacaagtttgtctgtgacttgaagactcttattggatacagtgcagcggagttgaaccgtttggtcacagaatgtgaacagaagaaacttgcaaagatgcagctccatggaattgcccagccagtcacagcagtagctctggctactgcttctctgcaaacggaaaaggataattgagccccaggacattctgagactccaaagtctttcttaaaatgtttagagcaagtatagctcttacctttattactgaatttgaatcttcttttatttctaggctgtacagtctgatgcatgatttttttataaatatttcatactcttgtgaatttggatctttttactttgagcatatattttagaatatgtgtatgttaaaggatctccacaatgtctgcagtgtgaaggcaggttcattgtggaatagtttaacagtcaggaaggctaaactggtcagtattaatgtgtagccctaccaaaaatagccagtagtatctgaaaatgaaaaataaatgaagtatctctaggaaacagtctggcttaactatttttgaaaatataactgtttcccctctctgctgctttagatgttgctttacatagaaccagaaaatggaatttctcagctaaagcatgtgtgcctgtttcatctaatcaagcagagctaaaatgttcataccgaataaatttatattaataaattactaaactaagagtatcaggttatttatatatttgcaagcaaaggacagtaagaagttgactggcaaaagagcagtgctgaaggaggagatccaggtttaaatctggcttattaactcaagccaattttaaggattttctgtatagattactcatgtcagaccaagaatttaaattattttgagagaggcatttaattctaataaaccagctgttataaaaattataaaatgatctctgtttttcctgtcagagatttaaaaaactgaaaaggtatacctcaacccaaaaataaaggtttgttttggtttgttatggcttccttttttaaaaaattaccctgtagtgccagtttattatgcaaagcagcttatattcctttgtttctgataaaatgaagactttaaatcagtcagtagtactttacctttcaaggcattagtaaattacttgcaaatagttttaaaaggaaaatacgacctttgttataggcagtcttctctttaagacaatacttttccacttgttttccttttccatattatatatgtgtattcatatagctgtatacatattcagttgatcattttataaacatatgaaggcataaagatatacagaagaaaaattattaaacaactcattttaagattcaaattaactaattcctgcatatatgacattccttacataagcgaacactaaacaaaaatggctagaaatgtctttttctttcttttctctctttgttgtttaaggtattaagcacgaattattacatgagactggcagatagctattaatcctcttacagatttgagaaagttgattctcaaatatttatgcaccttctccttcattgttttctttaaatctgtcctcttaaaaagcttcttaagagctcagttaatgcttttgacttaactaggagaaaaaggcatgataatacaggcaagatggcattgttagcaattctggtagtggtttggaatgaatcctaagaggcagggatcttaaggacaaggaagagaagagagagagggagggatctttgatctctttctctggtaatcttaatgcataattttactaaaacatgttctcaattcattcatattattaagctcttcctgcagttgatatctgagcagagtaagatttgtatttccatttttacttttttgaaagagaatatatggacagattattagtacaatttgggcactgtggttttaagaatatctgagtaaaataacaatatgaaataataaacagaagctctaacgtcaggtaacaaatagacagcaagaaaggttttgcaccatcctcttacggcctagagagttgataagttgcttgtagttttaaaaaaataataaagtatacccttctggtatatcatcaagagcttaagaatcttggctttcatatttaaaatgcttttggggagacatatattaaaattttagccaagatgatagacatgtctcaattatatatgtgtgtgtatgtttttaaagctaaaaacattacttttagatccctagaatgaaaatttttttctcatctatgcaattcccatatggtttttttttaaatcatattttattcattttctccctttagcaattttcattttatttctcataatttgaacagagacagttctcatacatgatcagatgctttttttttcttcttaccatcatttatgcatgacataggtaatgtgactaatttctccagttgattcaagaaactcattactttgcctcaaattatatgtaaaatatttgttttacttaggttacagttatcagaaaggtagtttttttcttctattaaaatataacattgtgaaagaaaataaaatttatgctattctttgctttgtttttataaatgaatttttcatagaatttacagtatattcaaaggaagaaagataaaattattggtcatcatttgtaccttagaagtacaagaatttaagtaaaagaaatgttcatttttgttttaaaatttgttttccatgtgaagtttttattgagccaactttcatacatatcttgctagcctaaagtctaaatatttgtgttggcatcagaaaaacaaatgaggcagaattgctatgtgtggttgatcttcagataaattgactgatcacagttatttttgtatcagtctatgttattaggaaaaattgtttagttgttttctcccctgattaatggtgatattcaagtatgatacaaaaagaattgtaccaccaaatatttttgtgaggtctgctgttttccatattcattttatgctactgcctttaagaaagaactagtgtatccttgaaatagcacaaaaatgttttaaaattcatagttgcaaaacaaatctgtgactaacttaatgtcttcagatctaaagggtgtaaaaatattgatacttcaatatttcacttgctgccaggaaaaacaaaattctcaatcttttgtaaatgggaggaggacttttgcatacatttttactctttaaataacgacaacgacacttatactgtcataataacaattatgtatttctttgtggttttaattttttttgtaattttacataaaacagttattttctatttcttacgcagataaatatttgtgcataaaatgtaaaaatagtaaaatgagaaaaataaaactattatacagtaaaaaaaaaaaaaaaaaaaaaaaaaaaaaaaaaaaaaaaaaaaaaaaaaaaaaaaaaaaaaaaaaaaaaaaaaaaaaaaaaaaaaaang

SEQ ID NO: 28506 - DNA, 4636 bp, Homo Sapiens
gattcttatttctagtcatgagcaatatggcccttcagttttgaaagatttattctaaattggccatggaagaattctggttttgtcactctctaaaattcaacccaaagtccaattctatttgagttagcattctgagagtatatccatattattaaggtagtaagtgtatgaagtaacttttttatgcgttgcttttcaggagtagaggtttaccactcttaggtgactaagcagtatcacaaataaaccctccagcaagtttaaaaataattaggtccaactcagaggaagtggagtttctcctgttgcacaaaaatgatgtctaacagctccagtgaaatcgatgtggtttgtattcaaattgaaaatctgtctttgttctttttactgtgctatacttctactctaaatttagtttaattttatacagtgaaatgcatagatcataagtaaatttttgttatatattttaacagtaatatataaagctcttgtgacaatttgtgtacaagtttctttgtgaacacacacttaaatttcttttgggtgaacagacagaagttgaattactaggtcatggagttcatgtgaatttaactctgtgagaatctgccatacagtttttcaaagtggttgtgctgtttttacatttctgttatattcttctatatttcttcatccttcaagttgaatcagtatgtagattattaaactataaataatttggcttaacagaaaacaccttttttttagtcacataaggacatagatattaatgctacctaagtagtctaggcaattctcttaactactgtcagtcctaatgtttttcaaaaatctttggagataatgttaactgcctatcaagagtcatttttctctgacataactatgtaaaagcactttgaaaagcataaggcactatacaagggtaagatagtatatttttaaaagtactgaactgtaacccaattccatatgtttttgtgatttctgtcatgtattttgaaacaaaaacatacatagctaccaagtatgtttattataaaattattcccatagttcataattcattcttagaacgaagagttattatactgaagtgtaatggctatttactccttacttatttataccctgtcttatttttaaaagttttaaggtactttagagattaatgtatcaagaaaaataggtgctcaaatgttttctgtcttgtccacagaggggcactgttggattatttagatatcaaaaaacatgtaacatttatttctttgttcatggttagaaatatttgcttttaaagtatttctggtgctaaaggactagtctttctaccatgaagcatataaagggttaagctcagtgaaaactgttgtcttaagtgtagttgggttaatgagaacacagttctgcaaatacatcttttcatgtagtcatagtatttacagtgagcaaaggtcctttgatatcacaaataggcctttgtaacagcctcttgaaagtgaaattaaaccctcaacttttcttttagttctgtctttcatcttcccttttaatttgttggtaaattttcctcagataaaaacaagaatacctacttacgatgaagatgacaacactattctttatgcgtatgaaacaaaacctgaatttgtcaataaagtatgttaattgctaattgccaaatatattaacatttgctgttttaaaggaaaagatgtaaattcctcgtatactatggagttcccgtaaactcacactcaagaaaatacctctcccctgaatttgtatgcttgctttcatcagagaatgagcacttaaccaatttaccttcccctttttcttatatagtagaaaattaagagcagttttgtactcactttcagtataaaactctaaacctggattcttctgatataataaattcttttcttgcccccttcctcaattgtcagtttttcattctcatattaatgtgaattttaaaaatctctgcttaatttaagacttctgaaaccccttgaaaagttggtgataaataaaaacaatttaaataaataaatatagctcccccctgcccccagtgttcagtttggctgttacagaaataaatcattaactacttttaaaatattagcaggaaccgaatattgtatctgacgcatcctgtaatactgaagagcaactgaaggcagttgatgatgtccttattcattgccaggttatatatgatgccctgcaaaacctggataagaagattgatgtgattcgtagaaaggtttcaaaaatccaacgtttccatgcgagatccctgtggacaaatcataagcgatatggatataaaaagcattcttaccggcttgttaaaaagcttaaactccagaaaatgaagaaaaatgaggtttacgagacattctcctaccctgaaagttacagccccactttaccagtgtcaaggcgtgagaataattccccgagcaaccttccaaggccatccttttgcatggaagaataccagcgagctgagctggaggaggacccgatcctcagccgcactccgagtccagtgcatccctcagatttctctgagcataattgtcagccgtattatgcatctgatggtgcaacgtatggttcttcttcagggctctgccttggcaaccctcgggctgacagcatccacaacacttactcaactgaccatgcttctgcagcaccaccttcagttacaaggtcaccagttgaaaatgacggttacatagaggaaggaagcatcactaagcacccttcaacctggtcggtggaagcagtggtcctatttctaaaacaaacagatcctcttgcattatgccctcttgtcgacctcttcagaagccatgaaattgacgggaaggctctgctcctactcacgagtgacgtgttgctgaagcacttgggggtgaagctgggaacggctgtgaagctatgctactacattgaccgacttaaacaaggaaaatgctttgaaaattgaaaaaatccttgtgcaaatttagattgggccaacttctagaggcaccaatgccttcttagtgtggaatcatttttctgccctttagtcgtttttgttttgtagaaagtatctctcaaaatatattatagctagaattgtagaactatgttatagtccagtctacttctttaaaaaccatttaaactgctagatagtattagaatagtccaatagaaaattcattctttataggtctttaaaaattacttttattatattgtttacaaatatatttcatgcaagaaacagaaaaaaaaaaaaaaccctttgattctggttcatctcgatacagagaaccaaaacagctaagagaggtattatcagggttgacaactcctatgattgaatctatgggaattattcctcagaagagaatttaaaggtgtacccatatatatctctttctggagtattttatctgtctgatgttgcagtattctacaagtttccagaaagagaatagccatataaattattttcctttctgctattatttctctatatgttttatttattcagatttagagtaaaaaataagcatataaacttttattatgtgctcttaacagttttaagataaactataggatagatagaatggttattttatgcaagaaatattgtaccgcaagggtggtttggatgaagtctgactactttttttcaaacaaactattatattaaaactgtcatattttggctaagtttggacctataactacactttcattgtttgcatctctctatgaagatacgtctgtccaaacttttaaaaggcataactgtattttatgtgtttattctttatatagatagtattttatattttattctcacccgaagtattcacacaatctttttaaaaaaaatttgaaatggcattttgtattgccacagaggtaggatgagccatatattagtgaaatgttttattttgtaaaatataaatggattatttgccatcattagtacctctcaacttactttttagaggacaagaaacaatctgtagattggtttccatacagggaagttctccgtcctatgcaatgtttctaattaatttgcttaattctgagccattaatcctgctacactttgaatgatacattaattcagactaatctttgggggctttattttgtaagttagaactttcaagggaaacatgttcaacactattattttgttataaatttataactttgttattacattgtgtaacaaatataaggtttacgagctatgagaattggtgctatcaccattagctatttgctgtaatgtcaagaaaatgttcaccagatgcaagaatgtaccttttctttttagaaagccaaatgtactttagacatgaatgcaactatttaaagaatagcttcatcaatgttattccttacatgtcataagattcttacttaaacttggtcttctttcaaattgtttgtatgaagatgctgtacccacttgaacagtcctcaggtgtttacataaatactatgttttacagttttcatattttaaaatattaataaagttaaatcacaatagttcagaaaaaaaaaaaaaaaaaaa

SEQ ID NO: 28507 - DNA, 3130 bp, Homo Sapiens
ggggaccaagagcggaagtgggtgtgacggggacgggggcccggtgggcccgcggaggaaagatactggggagtgggagccgcggggttcagagcgatgattcccccacaggaggcatccgctcgacggcgggagattgaggacaagctgaagcaggaggaggagactctgtccttcatccgagacagcctggagaagagcgaccagctcactaagaacatggtgtctatcttatcatcctttgagagccgccttatgaagctggagaactccatcatccctgtgcacaggcagacggagaatctgcagcggctgcaggagaatgttgagaagacgctgtcctgcctggaccatgtcatcagctactaccatgtgatcagtggtgacgatgatctggaggcccaggaggacgtgaccctggagcacctgcccgagagcgtgctccaggatgtcattcgcatctcccgctggctggtggaatatggccgcaaccaagatttcatgaacgtctactaccagatacgctccagccagctggaccgctccatcaaaggactgaaggagcatttccataagagcagttcttcctctggggttccctactcccctgctatccccaacaagaggaaagacacacctaccaagaagccagtcaagcggccagggagagatgacatgctggacgtggagaccgatgcctacatccactgcgtcagtgccttcgtcaagctggcgcagagcgagtaccagctgctggccgacatcatccccgagcaccaccagaagaagaccttcgactccctgatacaggatgccctggatgggctgatgcttgaaggggagaacatcgtgtctgctgcccggaaggccattgtgcgacacgacttctccacggtgctcaccgtcttccccatcctgcgacacctcaagcagaccaagcctgagtttgaccaggtgctccagggcacggctgccagcacaaagaacaagctgcctggcctcatcacatccatggagaccatcggtgccaaagcgctggaggacttcgcagacaacatcaagaatgacccggacaaggagtacaacatgccgaaggacggcaccgtacacgagctcaccagcaatgccatcctcttcctgcagcagcctttggacttccaggagacggcaggcgccatgctggcctcccaagagaccagctcttcggccaccagctacagctctgagttcagcaagcggctgctaagcacctatatctgtaaagtgctgggcaacctgcagttgaacttgctgagcaagtccaaggtgtacgaggacccagctctgagcgccatcttcctgcacaacaactacaattacatcctcaagtccctggagaagtctgaactgatccagctggtggcagtgacacagaagactgctgagcgctcctaccgggagcacattgagcagcagatccagacctaccagcgcagctggttaaaggtgactgattacatcgcagagaagaatctacctgtgttccagccgggagtcaagctccgggacaaggagcggcagattatcaaggagcgttttaagggcttcaatgatggcctcgaagaactgtgcaaaatccagaaggcctgggctattccagacacagagcagagggacaggattcgccaggcccagaagaccattgtcaaggagacctacggggcctttctacagaagtttggcagcgtgcccttcaccaagaacccggagaagtacatcaagtacggggtggagcaggtgggcgacatgatcgatcgccttttcgacacctctgcctgagcctgctgctagccctgcctggttccaccagactggcgtgtcattggacagataaaccagtgttagcttgcctctgggctgggtgagcttgaagtcctctgggacagagacctgtctccacgcctccgggagctgtgtccctgagccccctagtcctggctcctgctttttccccacagcccgtgttcccagccgaaccagcactctcccggaagcctggggtccctccacaccttggcttttatgaccctgatggcttctgaaacaggaaaagagagaaggaagacagaggcctgtgcccactgctgctccatgtgtaccaagagcagcagggcagaagggccctccctccagcctaggtcagaggtggggacagagaactcccctacagcccagagatgtggcagggctcagagaagcagccagagctcctggaggaaaggcagtcgggactgaccccctctcttaaaacacattcccgcccgcccacaggcctgaggtctgggacctttccctcccaggagtcccctaggtggctgggggaggcaggctcactggccattttccctagagtccagcacactgcaggaggcgttcggaggaggagttccgccccaccctctacagccttcctcaggcccctgtctctggcccccagcctcagtgcctcttggcccagggccaggcagtcgtggttgcagaaggagcaattaggctgcctgcctgtgggctgggagacagggacaatggggaaaagttaaggagcaaaatgggggttggaagcaaaaaatagggccccacctatttaggacgagattgaagactgacccttgaggcacacttgcactggagatgggtttatttcacgctctgtgcttgtgtgctagcggagggagagctcagggtggcttaatccagaggccctgtcatggcccgcccccagccatgggaaagcaaacttcatcctaaggtgtgcagcccaggccctgcccctttacagtctaggccgcctgccatggggtgcagcctctccaggggctgcgtcagacttgcacgctgcccacatccagattcctgcaaagacgaattgggtgcacagcaccccaaccacatacacgaggaagaagatgcggtcagcagtctcaggccagcttctctgtgacccctttactcctctggagggctctgtggggagagatacagggaaaggagctgttcttcaaggtcccctcaacatgagcggaagagcgaaaaaaaaaaaaaaaaaaaaaaaaaaaaaaaaaaaaaaaaaagaaaaaaaaaaaaaaaaaaa

SEQ ID NO: 28508 - DNA, 2624 bp, Homo Sapiens
gtggtcctgtgggcctctgcagtggacgcagaggcacctgctttctggcctggactttcctgtcagtttctcctgcctgttcaggatgtcctgctcagtgtctgtgcctgaagaggcacagaattcaggaggtctctgtagggagctcattgttcactttctcaggcaaaggtagtaaacactgctgcttcccaccggcctcaggttcttcctggtgattctgtccaatttggagctcccaaacaactgatttgcctccttgatgacgataattcccagaaagcaggtgatgttagagacagtgctggttagctaggctcctatttcaactaggtctcatcctagttttctgcagtttggctgcaggtttcttgcccttttttttcatctcaaatactgtttattacatgacaggaaacatcattggatagtgaacctatgttttcaagattgtttgcagtttttttgatactctataagttacttggtaaatactatgggattcgtttcaaaattgtgatcacttgtgtctggagatatgtgcttggaggcaggtacatcctctgctcttttgctgtagctaagggtgaattattgtgcagtttaagcacacatagcacacataggcgtggctgattgttggcctacatgtgcccagggcattgtttcatacattacatcaattcacattcacaagtaccccttggctacactgggatttgagttcaggacagtagggcctgatcctaaagtcaacatttttttgccctcttctcctaccactgaattcccttcctgtttcttgatccccttactgaatcctcttttctctcctcataggcggatgaagaccccatcatggggttccaccagatgttcctattaaagaacatcaacgatgcttgggtttgcaccaatgacatgttcaggctcgccctgcacaactttggctgacctcctctcagctaggcactcacgctgtttcctcctccctcctcttcccaatactattcccactcctccagatgctccaaatatcatgcacaaatgagcagggccgcggtgggagtgggcgcagtgcgctgctgccactgaggtgttgtgcatgatgtttggatgctagactagttgcatctgacgggagaagtttgtgttgtaccagcgcatgccttggaaagacttaagtaatgcaaaaggttgtccttttttttttttttttttttttaatctactgacaagttgctctagtaacccaaagaagtgaaggagaaagcagctgcctcaccgcccagacattgatttgttcagatgtttcaatgcctcatgatacaataaaaccacaaaaattttcttaacagtttaaattgttttaattagtttactagttggctgggcatcagaagctacccagacccgttgtctctctcatgtttcaccctcccacttctgccccaactctgaatacctgttgcagggagaaactgctgaagcagcactcccagctagcctctcagaagccgtgtagggcagttctctcccactccacagggcgactggtctttggaaagcaggcaggaagagctcaggtctggcctgaagcttctctcactgaagcctgtgcagtcagttctgatacctcctgtgacttctgctctgggtaggttcagggccctagtagcaggagagatgatcctgaatcctgttgaagctggagaggccttggcaaaatggctcatcacgttcaggccctccgggctgagttgtcagcagtatcaagggaggggcctgctctatccccagaaggatcaggatcatatccaggatgccccacatacaccaagccaggcagagggcagctcagctcctgtcccatctgctttggatatctttacccaaaggcaggtaacccgaagagccagcctccactgcccacagagccaggcccagttgtgttggagtataggtcaggagctgtggaaggaggcagtctgtgagggactcatgctttaggagtcctcacccctcagactgctgcaggacattgccaggcctctctccacttccttcctcagcatacagacttcatgctatcttccaattccggggagtcttagctattagggcagtttctgcttctccattttggggacaaaggccttgcccagtacaaatctagccccttgtcccacagacttctggatggtataaacctagtggcaatgtagcaaccataggctagaaccaaacccaagatttgggtcagtgccctgttaagggttttaggattggtaaggacaccacagctaaatctgacatgtaaaaggatacccttcccctgtcccactacgggtggaggctaaggacctcctcagatcccacagattgcctggtgacattgggcacagggctggatggtgtgctgtttgagaggacagcatgctcaggagatttcagtgggaatgatctctaggctgatgtgtatttggggaagtgggggtggggaagaggtaggtgcctgctgcctcaaaccaccttgtgtaaaatctgcaatacggcttcttccatgtacctgtgcctgaactgtctgcaataaagaagaatttgtaaaaaaaaaaaaaaaaaaa

SEQ ID NO: 28509 - DNA, 6043 bp, Homo Sapiens
ggaagtcacttcccatcccggttcgcttggggggaaaccaggcgtccctggaagggaagggaagggagtccgggctgcgcgggtcagcccgtcgcctttctgaccgcgtccctacggtttcccggcatccgcctccctctccccaccacacctgaggaaaacttttccctcgcccctcaattcaaattcagcagtgcccacggttgccgcaaaccgcccggtccctagcaacaaggttccggccgtagagcgagagcctctaggtgtaaggaaggtgatgtcgtaaagccgggagtgtcgtaaaccagttttcagtttaaattctcaactggcaattggccgaaaactcccatctgaagacatgatcatccaaatgtcattttgtgatttggctactgtctgcttgacataggaaagcactatcaagaaagactaatggagtgactatcaaaaggaagtcaatgatttcttaagaatttacaacaaaaccctgtcaaagcagcattcttacgtgagaatttcacttacgggagagttcttacaggatttcaagaaggaaagccctgaagagggacactgatttcctcaactgaatttaaaattgttacatgcagacatttttaaaggacaaccttaaacttccaccacaagaggaatataaagaggtccctcctgcaccaagaaagatctgcagatctttttcagtgttcttggaggtgtggggtgtgagaacttgatcagtttgtgtcagccaccttgttctctaaagttacaaattataatactgtggtagaaacaaattcagattcagatgatgaagacaaactgcatattgtggaagaagaaagtgttacagatgcagctgactgtgaaggtgtaccagaggatgacctgccaacagaccagacagtgttaccagggaggagcagtgaaagagaagggaatgctaagaactgctgggaggatgacacaggaaaggaagggcaagaaatcctggggcctgaagctcaggcagatgaagcaggatgtacagtaaaagatgatgaatgcgagtcagatgcagaaaatgagcaaaaccatgatcctaatgttgaagagtttctacaacaacaagacactgctgtcatttttcctgaggcacctgaagaggaccagaggcagggcacaccagaagccagtggtcatgatgaaaatggaacaccagatgcattttcacaattactcacctgtccatattgtgatagaggctataaacgctttacctctctgaaagaacacattaaatatcgtcatgaaaagaatgaagataactttagttgctccatgtgcagttacacctttgcatacagaacccaacttgaacgtcacatgacatcacataaatcaggaagagatcaaagacatgtgacgcagtctgggtgtaatcgtaaattcaaatgcactgagtgtggaaaagctttcaaatacaaacatcacctaaaagagcacttaagaattcacagtggagagaagccatatgaatgcccaaactgcaagaaacgcttttcccattctggctcctatagctcacacataagcagtaagaaatgtatcagcttgatacctgtgaatgggcgaccaagaacaggactcaagacatctcagtgttcttcaccgtctctttcagcatcaccaggcagtcccacacgaccacagatacggcaaaagatagagaataaaccccttcaagaacaactttctgttaaccaaattaaaactgaacctgtggattatgaattcaaacccatagtggttgcttcaggaatcaactgttcaacccctttacaaaatggggttttcactggtggtggcccattacaggcaaccagttctcctcagggcatggtgcaagctgttgttctgccaacagttggtttggtgtctcccataagtatcaatttaagtgatattcagaatgtacttaaagtggcggtagatggtaatgtaataaggcaagtgttggagaataatcaagccaatcttgcatccaaagaacaagaaacaatcaatgcttcacccatacaacaaggtggccattctgttatttcagccatcagtcttcctttggttgatcaagatggaacaaccaaaattatcatcaactacagtcttgagcagcctagccaacttcaagttgttcctcaaaatttaaaaaaagaaaatccagtcgctacaaacagttgtaaaagtgaaaagttaccagaagatcttactgttaagtctgagaaggacaaaagctttgaagggggggtgaatgatagcacttgtcttctgtgtgatgattgtccaggagatattaatgcacttccagaattaaagcactatgacctaaagcagcctactcagcctcctccactccctgcagcagaagctgagaagcctgagtcctctgtttcatcagctactggagatggcaatttgtctcctagtcagccacctttaaagaacctcttgtctctcctaaaagcatattatgctttgaatgcacaaccaagtgcagaagagctctcaaaaattgctgattcagtaaacctaccactggatgtagtaaaaaagtggtttgaaaagatgcaagctggacagatttcagtgcagtcttctgaaccatcttctcctgaaccaggcaaagtaaatatccctgccaagaacaatgatcagcctcaatctgcaaatgcaaatgaaccccaggacagcacagtaaatctacaaagtcctttgaagatgactaactccccagttttaccagtgggatcaaccaccaatggttccagaagtagtacaccatccccatcacctctaaacctttcctcatccagaaatacacagggttacttgtacacagctgagggtgcacaagaagagccacaagtagaacctcttgatctttcactaccaaagcaacagggagaattattagaaaggtcaactatcactagtgtttaccagaacagtgtttattctgtccaggaagaacccttgaacttgtcttgcgcaaaaaaggagccacaaaagggcagttgtgttacagactcagaaccagttgtaaatgtaatcccaccaagtgccaaccccataaatatcgctatacctacagtcactgcccagttacccacaatcgtggccattgctgaccagaacagtgttccatgcttaagagcgctagctgccaataagcaaacgattctgattccccaggtggcatacacctactcaactacggtcagccctgcagtccaagaaccacccttgaaagtgatccagccaaatggaaatcaggatgaaagacaagatactagctcagaaggagtatcaaatgtagaggatcagaatgactctgattctacaccgcccaaaaagaaaatgcggaagacagaaaatggaatgtatgtttgtgatttgtgtgacaagatattccaaaagagtagttcattattgagacataaatatgaacacacaggtaaaagacctcatgagtgtggaatctgtaaaaaggcatttaaacacaaacatcatttgattgaacacatgcgattacattctggagaaaagccctatcaatgtgacaaatgtggaaagcgcttctcacactctgggtcttattctcaacacatgaatcatcgctactcctactgtaagagagaagcggaagaacgtgacagcacagagcaggaagaggcagggcctgaaatcctctcgaatgagcacgtgggtgccagggcgtctccctcacagggcgactcggacgagagagagagtttgacaagggaagaggatgaagacagtgaaaaagaggaagaggaggaggataaagagatggaagaattgcaggaagaaaaagaatgtgaaaaaccacaaggggatgaggaagaggaggaggaggaggaagaagtggaagaagaagaggtagaagaggcagagaatgagggagaagaagcaaaaactgaaggtctgatgaaggatgacagggctgaaagtcaagcaagcagcttaggacaaaaagtaggcgagagtagtgagcaagtgtctgaagaaaagacaaatgaagcctaatcgtttttctagaaggaaaataaattctaattgataatgaatttcgttcaatattatccttgcttttcatggaaacacagtaacctgtatgctgtgattcctgttcactactgtgtaaagtaaaaactaaaaaaatacaaaatacaaaacacacacacacacacacacacacacacacacacacacacacaaaataaatccgggtgtgcctgaacctcagacctagtaatttttcatgcagttttcaaagttaggaacaagtttgtaacatgcagcagattagaaaaccttaatgactcagagagcaacaatacaagaggttaaaggaagctgattaattagatatgcatctggcattgttttatcttatcagtattatcactcttatgttggtttattcttaagctgtacaattgggagaaattttataattttttattggtaaacatatgctaaatccgcttcagtattttattatgttttttaaaatgtgagaacttctgcactacaaaattcccttcacagagaagtataatgtagttccaacccgtgctaactaccttttataaattcagtctagaaggtagtaatttctaatatttagatgtcttagtagagcgtattatcatttaaagtgtattgttagccttaagaaagcagctgatagaagaactgaagtttcttactcacgtggtttaaaatggagttcaaaagattgccattgagttctgattgcagggactaacaatgttaatctgataaggacagcaaaatcatcagaatcagtgtttgtgattgtgtttgaatatgtggtaacatatgaaggatatgacatgaagctttgtatctcctttggccttaagcaagacctgtgtgctgtaagtgccatttctcagtattttcaaggctctaacccgccttcatccaatgtgtggcctacaataactagcatttgttgatttgtctcttgtatcaaaattcccaaataaaacttaaaaccactgactctgtcagagaaactgaaacactgggacatttcatccttcaattcctcggtattgattttatgttgattgattttcagaatttctctacagaaacgaaggggaaattttctaatctgctttatccatgtacttgcatttcagacatggacatgctattgttatttcgctcataactgtttccaaatgttagttattatggacccaatttattaacaacattagctgatttttacctatcagtattattttatttcttttagtttatagatctgtgcaacatttttgtactgtatgtcttcaaacctggcagtattaatacccttcttactgacatatgtacttttagttttagaaaacttttatatttatgtgtcttatttttatatttctttatttattacacagtgtagtgtataatactgtagtttgtattaatacaataatatattttagtatgaaaatttggaaagttgataagatttaaagtagagatgcaattggttctcctgcattgagatttgatttaacagtgttatgttaacatttatacttgccttggactgtagaacagaacttaaatgggaatgtattagttttacaactacaatcaagtcattttacctttacccagtttttaatataaaacttaaattttgaaattcactgtgtgactaatagcatgatgctctgcagttttattaagaaatcagcctaaccatacaactctcatttccttagtaagccaaattaggattaacttctataaacagtgttgggaacaatgtttaacattttgtgccaatttgttcctgtattcatgtatgtaagttacagatctgactcttcatttttaagttccttgttacatcatggtcattttctagttttttaccagactcccatctcacaataaaatgcatcaacaagcctaaaaaaaaaaaaaaaaa

SEQ ID NO: 28510 - DNA, 2480 bp, Homo Sapiens
aagcagtggtatcaacccagagtggccattatggcgggggttggtgattacggaagaaccaggagtttggcgtgaccatggggaagcaaaagaaaacaaggaagtatgcgaccatgaagcgaatgcttagtctcagagatcagaggcttaaagaaaaggatagattaaaacctaaaaagaaagaaaagaaggatcccagcgcattaaaggaaagagaagttccccaacacccttcctgcttatttttccaatataatacacagctgggcccaccttaccacatcctcgttgataccaactttatcaacttttccataaaagccaaactggacttagtgcagtcaatgatggactgtctgtatgccaagtgtatcccatgtataaccgattgtgtaatggctgaaattgagaaattggggcagaagtatcgagtggctctaaggattgccaaggatccaagatttgaacgattaccatgtacacacaaaggaacctatgcagatgactgcttagtacagagagtaactcagcataagtgttacattgtggccacagttgaccgggacctgaaaagaagaatccgtaagattcctggagttcctatcatgtacatttctaaccatagatacaacattgaacggatgccagatgattatggagcccctcgattctaattcttacaagacacagttcctctgcctttcttcgaccaactttctcttgttgccagttcattacacaaaatgtagcgggatttttaaggaatcagagagactgatggagttcagggagatatttattatttaggtgcaccagcccagtcagattaacatccaaaggactgaaccctgaacagagttaagttaccttttaagcattttgtggggccgcgggggttggggggaatctgtgcagggggaagcatattacagaagcaagaaagacagttattcaattaactgagacatgcattacatcatttcttacttttcaaggaaaatcatgttttacgacttgagtttatctgtctagttaccttgcagctgcacagctagagaaacagggtatttacaatgcctgggaaaggaggagagataaggctcactagccacagaaaaacaggcagttaatttttaaaggactccagctctttctctttctcacggggaattggattttcttacatgcaactgaatttctgcttacacatttttaaatttcttttaattgcttttccaatgcaatagcatgaattattattctgttgacctatttgccttactatgagctgagggtagttcaatatgctcactcttttttttttttttcttgagatgaagttttgctctgtcaccaggctggagtgcagtggcgtgatctgggctcactgcaacccctgcctcccatccttcgggtgattctcctgcctcggcctcccgagtggctgggattgcaggtacacaccaccatgctcaactaatttttcttttttgggcggggggggtggatatttttagtagagacaaatacttttgtatttttaatacagaaaggtatgcctcggcctcccaaagtgctgggattgcagacatgggccactgtgcctggcctgctcactttctgatgctgcttttttgttgtttgtttgtttatttgtttgttttgagacggagtctcgctctgtcaccaggctggagtgcagtggcgcaatctcggctcattgcaacctccgcctcccaggttcaggcgattctcctgcctcagcctgcggagtggctgggactataggtgcgtgccaccacgtccagccactgatgctgttttgccactgatgctgttttgaaattgatattttgtctcataaaaactaggccaggcatggtggctcattcctgtggtcccagcactttgggaggccgaggtgggtggatcacctgaggtcaggagttggagatgagcctggacaacatggcaaaaccccacctctactaaaaatacaaaaaaaattagctgggtatggtgtcacgtgcctgtgatcccagccgctggggaggctgaggcaggagaacctcttgaacccaggaggtggaggttgcagtgagctgggattgcgccactgcattccagcctgggtgacagagtgagactgtctcaaaaaaaaaaaaaaattaatgatggtcaaagggtataaaatctcagacaggaagaatatgttttatgctttttttgagttctgttgtacagtgtggtgcctatacttaataatggggtattatacatttcaaaattgatgttctcatcacagaaatgtatttgaagtattgcatatgttaactagcttgatttaactattccatattgtatccgcaatttatgatatcactttgtaacccatacatttatacaattataaattgtcaatttacaataaaaaaaaaaaaaaaaaaaaaaaaaaaaaaagaaaaaaaaaaaaaaaaaaa

SEQ ID NO: 28511 - DNA, 4717 bp, Homo Sapiens
gggcggcggcgggtgaggagcctgaggcggcggcgggggtggctccgcgcgcggtggtctcgggggcaaaataacatggcagccagacgaattacacaggagacttttgatgctgtattacaagaaaaagccaaacgatatcacatggatgccagtggtgaggctgtaagcgaaactcttcagtttaaagctcaagatctcttaagggcagtcccaagatccagagcagagatgtatgatgacgtccacagcgatggcagatactccctcagtggatctgtagctcactctagagatgccggaagagaaggcctgagaagtgacgtatttccagggccttccttcagatcaagcaacccttccatcagtgatgacagctactttcgcaaagaatgtggccgggatctggaattttctcactctgattctcgggaccaggtcattggccaccggaaattggggcatttccgttctcaggactggaaatttgcgctccgtggttcttgggaacaagactttggccatccagtttctcaagagtcctcttggtcacaggagtatagttttggtccctctgcagttttgggggactttggatcttccaggctgattgagaaagagtgtttggagaaggagagtcgggattatgacgtggaccatcctggggaggctgactctgtgcttaggggcagcagtcaagtccaggccagaggtcgagctctaaacatcgttgaccaggaaggttccctcctaggaaagggggagactcagggcctgctcacagctaaggggggtgttgggaaacttgtcacattgagaaatgtgagcacaaaaaaaatacccaccgtgaatcgtattactcccaaaacgcagggcactaaccaaatccagaaaaacactccaagtcctgatgtgaccctggggacaaacccagggacagaagatatccagttccccattcagaagatccctctggggctggatctgaagaatcttcggctccccagaagaaagatgagctttgacatcatagataagtctgatgttttttcaagatttgggatagaaataatcaaatgggcaggattccacaccataaaagatgatattaaattttcccaacttttccagactctctttgaacttgaaacagaaacctgtgctaaaatgcttgcctcattcaaatgttccttaaaaccagagcacagagatttttgcttttttactatcaaatttttaaagcactctgctttgaaaacacccagagttgataatgagtttttaaacatgcttttagacaaaggtgctgtgaagaccaaaaattgcttttttgaaatcataaagccttttgacaagtacataatgagacttcaagaccggcttctgaagagtgtcacacctttgcttatggcctgcaatgcctacgagctaagtgtcaagatgaagaccctcagtaaccccctggacttggctcttgccctagaaaccaccaactctctctgccggaagtctttggcccttttgggacagacattttccttggcctcttctttccggcaggagaaaatcttagaagctgtcggcctgcaagatatagctccctcacctgctgcgtttccaaacttcgaagactccactttgtttgggcgagagtacatagaccacctgaaggcctggctagtcagcagcggatgtcccctccaggttaagaaagccgaaccagagccgatgcgagaggaggagaaaatgattcctcctacgaaacctgaaattcaggccaaggctccaagtagtctgagtgatgctgtcccccagcgagcagatcacagggtagtgggcaccatcgaccagcttgtgaaacgtgtcatcgaaggcagcctgtctcccaaagagagaactcttctcaaagaggaccctgcttactggtttttgtctgatgaaaatagtctggagtataaatattacaagctgaagttggcagaaatgcagcggatgagcgagaacttgcgaggagccgaccagaagccgacctcagcagactgtgcagtgagggccatgctgtactcccgggctgtccgcaacctcaagaagaaactccttccgtggcagcggcgggggctcctccgtgctcaagggctccggggctggaaggcgaggagagcgaccaccgggacccagaccctcctatcctcaggcaccaggctgaaacaccacggccggcaggctccaggcctctcacaggcaaaaccatccctgccagacagaaatgatgctgccaaggactgcccgccagacccagttggaccttctcctcaggaccccagcttagaagcctcaggcccatcccccaagccagcaggagtggacatctctgaagcacctcagacctcttctccctgcccatctgctgacattgacatgaagacaatggagactgcagagaaactggctagatttgttgctcaggtgggaccagagatcgaacaattcagcatagaaaacagcaccgataaccctgacctgtggtttctacatgaccaaaatagttctgctttcaaattctatcgaaagaaagtgtttgaactatgtccatcaatttgtttcacgtcatctccgcacaaccttcacactggtggtggtgacaccacgggttctcaggagagccccgtggacctcatggaaggggaagcagagtttgaagacgagccccctccgcgggaggctgagctggagagcccagaggtgatgcctgaggaggaggacgaggacgatgaggatgggggagaggaggcccccgctcctggaggggcgggcaagtctgagggcagcacccctgccgacggccttcccggcgaggctgccgaggacgacctggctggagcacctgccttgtcacaggcctcctcaggtacctgcttccctcggaagaggatcagcagcaagtcattgaaggttggcatgattccagctcccaagagagtgtgtctcatccaggagccaaaagtccatgaaccagttcgaattgcctatgacaggcctcggggtcgtcccatgtccaaaaagaagaaacccaaggacttggacttcgcccagcagaagctgaccgataagaacctgggcttccagatgctgcagaagatgggctggaaggagggccatggcctgggctccctcggaaagggcatcagggagccggtcagcgtgggaaccccctcggaaggggaagggttgggtgctgacgggcaggagcacaaagaagacacattcgatgtgttccgacagaggatgatgcagatgtacagacacaagcgggccaacaaatagatcaaaaccactgatgtgaaagataagccttgaagcagcaattgcccttaaaacatcatccctgccctggatcggcctggagccagtgcccaagtacggtttggtgtgtacatgaaaacaaacgtctctgcagtctctggggcggaggtttcgctggcttttctttctctcaaagaaaaaaacatgcaccattttcaatgtgcttttgcctctcctctctgttcacatgcttttagcagcaagtcccctccaaatctgtcttggttccccttcagaaggtggcgctgcccccgaaaggcacctcagcctgtgagtgctgaggaaccagctcctctggctgattttccagttggactggccattgctctccagaagtgctctgttagcaaacgtgatgtggaaacgatcacagatggtgttttctcgttgttcgccagaatttatacgggggagacaaattcccggtaattaccaagtctgcactcgggtaccaaagctctgaagctctctgaacagttgccatacttgagttgatgaatgtgttattcatggtgtctcatctcatcaatgcatcttgagagacttaatgaaattttagcaacagtatagaatagctctatcgggtggggagtaatcattaaacagatgaaatcggccccagatttacatgtctctttagaatccacagtgtaagcaaactacagttacaaagggatgggggttgtaaaccctctgagactctgcacttttcgcacgtatggcatcgtcaagtgctgtcttattacagcctttgtaaggagaggcaggctcctcctggggtgggctctgcagctgctctatttccaggcatgtgatcgcccccgctctccagattccccagcactctgctgcgtgtaactccactcaattctccactcatccttccttgtgaagcaggatcgttgaagttttaagtatgggcaaaaatctggaaaacttaggatccctctgacaccccaggattaggggacacagcagtggctagggcatcagccacagaactgagcgggaaatgccacttgtattggctgtaaagaaatcctggctttgggccaggcacagtggctcaagcctgtaatcccagcactttaggaggttgaggcggatggatcacctgaggtcaggagtttgagaccagcctggccaacatggtgtaaccccgtctctactaaaaatacaaaaaaattagccaggcgtggtagcgggcacctgtaatcccagctactcaggaggctgaggcaggagaatcacttgaaccggggaggcagaggttgcagtgagctgagatcatgccactccactccagcctgggcgacagagcaagactccatctctaaaaaaaaaaaaaaaaaaa

SEQ ID NO: 28512 - DNA, 3880 bp, Homo Sapiens
ggagagagggctgggaggaaaagtagttcatctaggaaactgtcctgggaaccaaacttctgatttcttttgcaaccctctgcattccatctctatgagccaccattggattacacaatgacatggagaatgggaccccgtttcactatgctgttggccatgtggctagtgtgtggatcagaaccccacccccatgccactattagaggcagccacggaggacggaaagtgcctttggtttctccggacagcagtaggccagctcggtttctgaggcacactgggaggtctcgcggaattgagagatccactctggaggaaccaaaccttcagcctctccagagaaggaggagtgtgcccgtgttgagactagctcgcccaacagagccgccagcccgctcggacatcaatggggccgccgtgagacctgagcaaagaccagcagccaggggctctccgcgtgagatgatcagagatgaggggtcctcagctcggtcaagaatgttgcgtttcccttcggggtccagctctcccaacatccttgccagctttgcagggaagaacagagtatgggtcatctcagcccctcatgcctcggaaggctactaccgcctcatgatgagcctgctgaaggacgatgtgtactgtgagctggcggagaggcacatccaacagattgtgctcttccaccaggcaggtgaggaaggaggcaaggtgagaaggatcaccagcgagggccagatcctggagcagcccctggaccctagcctcatccctaagctgatgagcttcctgaagctggagaagggcaagtttggcatggtgctgctgaagaagacgctgcaggtggaggagcgctatccatatcccgttaggctggaagccatgtacgaggtcatcgaccaaggccccatccgtaggatcgagaagatcaggcagaagggctttgtccagaaatgtaaggcctctggtgtagagggccaggtggtggcggaggggaatgacggtggagggggagcaggaaggccaagcctgggcagcgagaagaagaaagaggacccaaggagagcacaagtcccaccaaccagagagagtcgggtgaaggtcctgagaaaactggccgccactgcaccagctttgccccaacctccctcaacccccagagccaccacccttcctcctgccccagccacaacagtgactcggtccacgtcccgggcggtaacagttgctgcaagacctatgaccaccactgcctttcccaccacgcagaggccctggaccccctcaccctcccacaggccccctacaaccactgaggtgatcactgccaggagaccctcagtttcagagaatctttaccctccatcccggaaggatcagcacagggagaggccacagacaaccaggaggcccagcaaggccaccagcttggagagcttcacaaatgcccctcccaccaccatctcagaacccagcacaagggctgctggcccaggccgtttccgggacaaccgcatggacaggcgggaacatggccaccgagacccaaatgtggtgccaggtcctcccaagccagcaaaggagaaacctcccaaaaagaaggcccaggacaaaattcttagtaatgagtatgaggagaagtatgacctcagccggcctactgcctctcagctggaggacgagctgcaggtggggaatgttccccttaaaaaagcaaaggagtctaaaaagcatgaaaagcttgagaaaccagagaaggagaagaaaaaaaagatgaagaatgagaacgcagacaagttacttaagagtgaaaagcaaatgaagaagtctgagaaaaagagcaagcaagagaaagagaagagcaagaagaaaaaaggaggtaaaacagaacaggatggctatcagaaacccaccaacaaacacttcacgcagagtcccaagaagtcagtggccgacctgctggggtcctttgaaggcaaacgaagactccttctgatcactgctcccaaggctgagaacaatatgtatgtgcaacaacgtgatgaatatctggaaagtttctgcaagatggctaccaggaaaatctctgtgatcaccatcttcggccctgtcaacaacagcaccatgaaaatcgaccactttcagctagataatgagaagcccatgcgagtggtggatgatgaagacttggtagaccagcgtctcatcagcgagctgaggaaagagtacggaatgacctacaatgacttcttcatggtgctaacagatgtggatctgagagtcaagcaatactatgaggtaccaataacaatgaagtctgtgtttgatctgatcgatactttccagtcccgaatcaaagatatggagaagcagaagaaggagggcattgtttgcaaagaggacaaaaagcagtccctggagaacttcctatccaggttccggtggaggaggaggttgctggtgatctctgctcctaacgatgaagactgggcctattcacagcagctctctgccctcagtggtcaggcgtgcaattttggtctgcgccacataaccattctgaagcttttaggcgttggagaggaagttgggggagtgttagaactgttcccaattaatgggagctctgttgttgagcgagaagacgtaccagcccatttggtgaaagacattcgtaactattttcaagtgagcccggagtacttctccatgcttctagtcggaaaagacggaaatgtcaaatcctggtatccttccccaatgtggtccatggtgattgtgtacgatttaattgattcgatgcaacttcggagacaggaaatggcgattcagcagtcactggggatgcgctgcccagaagatgagtatgcaggctatggttaccatagttaccaccaaggataccaggatggttaccaggatgactaccgtcatcatgagagttatcaccatggatacccttactgagcagaaatatgtaaccttagactcagccagtttcctctgcagctgctaaaactacatgtggccagctccattcttccacactgcgtactacatttcctgcctttttctttcagtgtttttctaagactaaataaatagcaaactttcacctattcatgagttattgttgaaacctcaaatcataaagacatttaaaagaattgtttttctaactggaggggctctagtgctaaataatagtactgaaaattgatattattttccttttcttatatgaaggaccttatttggcatataaaattttataaaatatgtatttaaagctttttcttattttttgtattaattggtaagtgaaaactctgttaaagatcacaccacaatgttttcaagaaacatctgaaaagataaaacaaagaacaaataacttataatacttacttaaattgacactttttgaaatgccagtctgaaaataattaagatatctctgctttgtatgagtttcttttatgaaacttgataccacgggagtccagtaatattggccacaaaagccagagaaagtaccaagcccagctttgttatcatagccacttcctgccctgcttctgttatttttagtgttttttcagatataaatcggggtccaggaaatcctcaccagaatctggcactgcagccaaaggcgatacttccagagttctagtaggctgctatggaatttctggcatgaaaattcttgacccctcacactttaccccctgtacagcacaggcataccatggagatattacaggatcagttccagaccaccataataaagtggatatcgcaataaagtgagtcacacaaaaaaaaaaaaaaaaaaaaaaaaaaaaaaaaaaaaaaaaaaaaaaaaaaaaaaaaa

SEQ ID NO: 28513 - DNA, 8505 bp, Homo Sapiens
gggacctgcgacttccgaacaaccctggcaggaggagcggcgttcagccgggggaggcctgaagaaacgctccggggcccagtggctctacccctgctcctgcccgaccctgccgcctccctcacggagccagcggccggaatgcagacatcagaacgtgaggggagtgggccggagctgagccccagcgtgatgcccgaggctcccctggagtctccaccttttcctaccaagtccccagcgtttgaccttttcaacttggttctctcctacaagaggctggagatctacctggaacccttgaaggatgcaggtgatggtgttcgatacttgctcaggtggcagatgcctttgtgttccttgctgacctgcctgggcctcaacgtcttgttcctcactttgaatgagggtgcatggtactcagtaggtgccctgatgatttcagtgcccgccctgctgggctaccttcaggaggtttgccgggcacggctgcctgattccgagctgatgcggaggaagtatcatagcgtgaggcaggaggacctgcagagagttcgcctgtctcgtcccgaggccgtggctgaggtgaagagcttcttgatccagctggaggccttcctgagccgcctgtgctgcacatgtgaagccgcctaccgcgtgctgcactgggagaaccccgtcgtgtcctcacagttctatggggctcttctgggcacagtctgcatgctgtatttgctgccactctgctgggttctcacccttttaaacagcacgctctttctggggaatgtggagttcttccgagttgtgtctgagtacagggcatctctgcagcagaggatgaacccaaagcaggaagagcatgcctttgagagtcctccaccaccagatgttggggggaaggatggtctgatggacagcacgcctgccctcacacccacggaggacctcacgccgggcagcgtggaggaggctgaggaggctgagccagatgaagagtttaaagatgcgattgaggtgggtggcccttccccagcatcctctactcagcaggccagaaattgggtggtcctggagctgttttttgtttttgttttttaatgtccaagtgagaagctaaaacttgctgtgagctagaactcactggttggaagagtgccactgaacccctccccactcctgtttctggttgagccagctgtcctgggtgcccagggcaagagtggttctggaagtctccgggtaatgccctgctaggggggctggacgatttctggcctttgctggagaccgtgggcttggcgcctttgatataggaaaggcagcttttgaggaggctactgccctgggtctccgctcttctgcagagtgagttccgtaagatgtccctttgcggggctgggaggggaggttggagaaagtagttgcatggccaagtgctaggtcagaggaagttaaacagctttcttgattttaggatggtaattcaaattggtagtttgcagaagtgttttatttggcatgcaaagtttcaaaataattttttgagccaatgtttaaatatggagagatttttattagaactgcaggtttccagtttctctggtagtcctgagtctgcagcagtaggtgtagctaaggagctgctgtcccctttacgcaggtcacatgctgtggctacaggtggtcctcaacaccccctgctgtattttgtcactgaggtcaagtggcagttgccatttgtcacatttgcgtttttgtttttcttagagtaggatatcatttctctttatttatttctctttgtaaagtgggaaattgagatataagaaaaacacctcgtggatttccaccaggcctgtgatttaccccaactcacctcaatcatacatcagcccaggccatgcaggcatttgactttctgatggctaaaagattgctccaaaactttgatatatgattgtagaccgtgaatcttggtggagggaatatgtagagcaggggttttcaagcatttttgttcatgacccatagtaaggaacacattttgcatcttgacccaggtcacacttaggtctataaaatatgtaaaacttaagtgaaacaaaagtttccggaaaatacgttgtaagggatattttctttccttttctgttctattcaaataaagacctactaaattattttcacccagtttgagaaactgtagtacctagctttctccaaggctgtttgatgctgggatcctcttgtggggggcgtctgtcaacgtcaccatttgggaagtgcgcagagctcagagcagcgcttccatgcttccttctgcttgggggcccctccaggtagcttctttcttcttgctatctttttctttctgttttctctcctcttccccgcaccttgggaggcaggagacccacttggtggtgctggaggatgatgagggcgccccgtgcccagcagaggatgagctggccctgcaggacaacgggttcctgagcaagaatgaggtgctgcgcagcaaggtgtctcggctcacggagcggctccgcaagcgctaccccaccaacaacttcggtgcggccaggggacagggctgggctggtgggggagtgggggtggacttctgggactctagtggggaacacccagccacaggggcagagtctcagaactgtgggtactgacttgtgacaagagcagggagtgaaggtgtgtccgcgggaccccggggagctagcagatgcccggcaggactgctgagggagtgggtgtgggttccttcttgtccctccatcctgattggacattcagttgtgggaagacaaggaactcagtttgggaaatgccatcccaggactgtagagaaccataatcctgacagaacttcagaaggcagtgtagcatgatggtgaggaacagagtagagtctcactgcctgctgcaaatcccagctcagccaggtgtccttgagcaaattatttcacaccccgtgcctcagtttccccttctgtaaaagggggatcatcattcttacctcatagggttgttacaggtctcatgtcaaatgagacagtagtacttacgaagggctagcacagtgctggttggttcatagtaagtagtgggtgcggttaatgtgggaggccctgacccacgctgtgggttcctaggatcctgtcttggtctttcttatccagctggaagcaagttgaagcaaacattgtttctctggacgtgatagagccctgagttcacctctccccagccagtccttattttactgagggtcgggggagagcggtcaaggaaggcagctttggagaagggtggacttgacagcacagcttagagacctggctcagatcagcagcgctgagagctgagccacatacaattatggtggaaacctagagtagctaggttgacctgggagctgctgtgctcctgaggaagggccctcctgcctgctgtcagatgggagcagggtaagggggcagtactgtgtgttctggtgttgagtgagttctagggtctgtgccctggaagaagacaatggagtttatcttgaggaatttgactcagggcccccagggtcctgccttcctacccctgcagcagccagggcagttgttttctcaggattagatgtcctggacaggctctttctttctgctgtgtgaatgtcccccagttattcaagatcccttttttttttttttttttgagacaaggtctcactgtgtctcccaggctggagtgcagtggcatgatcacagctcactgcatcctcgacttcctgggctcaagtgatcctcacagctcagcctcccgagtagctgggactacaggcatgtagcaccatgcctggctaatttttgaattttttttgtagagacagggtcttactttgttcctcaggctggtcttgaactcttgggtttaagtgattcttgtaccttggtcttccaaagtgttaggattacaagtgtgagccaccacgcccggcccctttgttttatttatgctgcctgctgacttctgcagggcattctgtatgttcagtgatctgtttaccctccatacttgcacatgtgtgatctcatttcatccttaccgtaggtgtgacaggagcaggcagttcttaagggttcagagcagccagattccagcagtgcccggtaacactacacacaagaagtattactctggtccagcaaataatttgtctatttctacaacttctaagtaaaggtacttagctgttcccattttacagatgagtaacctgaggtaaaaagagtgctttgcccagagactttggcctggaaatggtggagctgtgactcaaattcaggttgtctgattcggctcttgtcttctttctacctcttcatcctccctctctgttttccctttgcccttgcctgtgaagtcccttgttttatgcctgtcctgcttttgtatttgatttttggtttggataatctctaccagcatgggcagaggccttttcagcctccctcaaggatggcaagggcagaaagtgcttcttttcctaaactcctcttagttcctcatccttcaagaccacttgctactttcccttttctgagatgttcccaagctctttgccatgagggcaggtgtagcagctcagctcctgcggcctctgctcctgaacctgggtcctgagagcagggcgaggggagctgctttgggggctttctccatttcagcgactataacgaaatacactaagctggggggcttttaaataatggaaatctctcatcacagttctggaggctggaagtccaagatcagggtgtcagcaggatcaggttctggtgaggtccatttccgtcgtcatagacagcaccttctcactgtgtcctcatgagaaggtgggaggggcacggcagttctctggggcctcttttataagggcactaatcccattcacgagggctccaccctcatgacccggtcacctcccaggggccctgctttgggtgttaggattccacatgtgaatgttaggggactgtggtgggggctattctatttacccctgccagtggatgagggggtgcatggggagaatgagggcagactgcaaaggagcttctctgtggcctccgtatgggagaggtcttggtggggagggcccccctttgtcctggaggctccatgactgttgccctggcaggccccactgggccttagtgcccctgctgtcatggcctcggtggcatcgtcacgtggtgagtgaggatgggtgagtccaggctgttgctgagaaggggcagaaagagttggtaggtgttggaagggaacgtcacctggctgagctgctctcagctcccagagccctccctggctccggtctgtgagtgggttcacagctgtctccccagcccacttggctgccctggggtgcttggccctgacattccattcagtttagaggagaccttgggctcaggtcagtgtcagtctttgagtagctccttttgcctgtcccattccccttgtgtcccttgctaaggagaggctggggcaggctgccttccccaaattcttggtgtagggacagaatcttggagcagccagtttcctggtttggcaccagcagtaggcttgttcttctctttccctggctgactgacagggtgggcatttacctgaagcaccttggcctcagatttcccctggctctagcagaggtcttcctttccctgaacctagggagtctcctttagcaagaacttcaggtgattttggctggacagaggaagggaccacatgtagccgtcaataaagctttggggcctttctgtgaaagtgaggcctggtgctctgtacttgcccagacaggtggtccggctgggtcatagcaggcctatgggccccacatcccagaaacctcattctctgtctctcctctccccttacacccccttgttgtcttctagccattttctaagctgccgttgcccctccactgttgccgggcacttggccatcttggcatctctggtggtttaggcaggacctctccctgctctgcgtccccccatgccactcactgcccaccacaattgagcattctacccttcgtgtctttacagttgagcattctacccttcatgtcttcttggaatgtgcctggctctgagtttctctcctgcagtcttcaggggacagaaagcaggagtttaggtttttaggagtttctgtctttagcctgtgggtggagtatttgtaaggcattgctccggaaagggtcatgttaggcaggtgtcatttggggatgcctgtggtcaggtccctgccagcttagctggctttcttggagtggattctgctgggtgctctttgatttctgttgaacctgtaggtagggccactcagctctggaagggttcagggactggtagctatgtatggctggagacatcagtcctcaggggctatcagtcttcttagtttgagtccttctttctgtctctgaatctggccttgctccctggctcactgtgtccagccaaggaggctgggctgatgtcctgagtgtcccatttagaagcaccaggagcaggtgagcgtgagagtcctgggatgggcgggggttgagctgctgcctctgtttctcagggaactgcacgggctgctcggccaccttctcagtgctgaagaagaggcggagctgcagtaattgtggaaacagcttctgctctcgatgctgctccttcaaggtgcccaagtcctccatgggggccacagcccctgaagcccagagggagactgtgtttgtgtgtgcctcgtgtaaccagaccttgagcaagtgagaagagaggccagggtccaaccaggcacccgtccttggggccagcagtagaccccccactctccccacccctggcccactgtggtgtgtgctgggcaaatgtggcctgaatgctaggtaggcttccccttccttcctcactctctccagctggattctggagctgttctccatccatgagagtggctggcaatggctgctctcaatcccttgagggagaagagcccctggagggcctggcatgtttgccctgctctgcctgggactgagcgagtggacttagggctgggcaggcagtagccaccagagggcagcagcgaactaggccaggcctgactggggtctgaagatcagggtcagtgtggctatgcctgggaattccagacctgaggttgggaaaagaggtttttctcctgcagggtactgggccaggccctcagcctcagagagcctgcagaagggcttgggagtgccacaccccatctctgctgattgaatgtccctccaggcaccaggatctcatcatttccccatcagagggtgtggccaggcctaacaagaccatgggtgcttctagaaacagggttgaagttcccagattccctgagaggagaatgtgtataggagggtttggctgagtccttcagcgttaagtggaggaaagcttggggaagccccaatagctggacagacctcagcctcccctcgaagacacctcaattcacagactctcagcccacacaatgccccagtgtccccagctccgctggagcagctgcagggcacttggatcacaacttctgcaccctctgtccagagtctagggcagtcctccactggcccagcactccagtttcctttccctgcctcttgtccaatggagtgggaggccaggtgagtggagcagaggtcctgaagcccttgacccctgggggcctgggtagtgtaggatctcgctgggctgggtcctggattccagggctattccctggaggacagtctcagttatgggataaggccccctgggggtctccatttctttccaacagtttcatgttcactactggactcttacgggctcagtatctctcccttagccatgagctggctcaggcatcccttcccttccctggagctgccctgcctttctcaagtatttatttatttattgcatggttcctgggaacatgtggcacaagtaatgggatgaggaggaattgggggtgggggtcttctacctaggactcttccctggagtcatgggctgcctgggacccaggacccatgagggggctgagaggtttctacactcgaggagcaggggtccagagaggcaggctggggaggcaagggacccatcctaggcccgctttcttgccgagccaagcagcttagctggggctgtgcagccaggggcttacccaggccagtggaggtgccacagccctggggagccagacaggctttggtatcgtatcgcctctgtgtccttttaagagaggagagttcagtaccccgtgctttctttacactggagaggaactaaaaggatctctgtgtctatggagaattgtcaataaaaaggcctcaagcttcaaaaaaaaaaaaaaaaaaaaaaaaaaaaaaaaaaaaaaaaaaaaaaaaaaaaaaaa

SEQ ID NO: 28514 - DNA, 6615 bp, Homo Sapiens
tacggctgcgagaagacgacagaaggggccttttcgcaaccctaacgggagagaagtgatggaagaagggtagccggaagagtttcctcaaaataccataggggttttaaattattagtacgtatttaaactcatctactttcacgttgtcccgttgaacgtcacttccgcttaggggcggacacgtcccaaacctgtggcgggagttggagattctgcggcgaatacgccaggatcatcatgcctagggttcataacataaaaaagtctcttacacctcacatttcttgtgtgacaaatgaatctgataatctgctggattttttgcctgacagactaagagcaaagctacttccattccagaaagatggcatcatttttgccctcaaaagaaatggcaggtgtatggtggctgatgaaatgggtctaggaaagacaatccaggcaattggaattacttacttctataaagaggaatggcctctgttaatagtggtcccttcgtctctgaggtacccttggacagaagaaattgaaaaatggatcccagagctaagtccagaagaaatcaatgttattcagaataaaactgatgttaggagaatgtcgaccagtaaagtgacagttctgggttatggtctcttaaccgcagatgcaaagactttgatagatgcactgaataatcagaacttcaaagtagttatagtggatgaatcacactacatgaaatccagaaatgcaactcgcagcaggattttattgccaatagtacagaaagccagacgagccattcttcttacaggaacaccagctttaggaaggcctgaagagctttttatgcagattgaagctctctttccacaaaaatttggaagatggaccgactatgcaaaaagatactgtaatgcacacatcagatattttggtaaaagacctcagtgggattgtagaggggcatcaaatcttaatgaacttcaccagctattaagtgacataatgattagaagattaaagactgaagttttaacccagctaccccctaaagtcagacagcgtattccatttgatcttccatcagcagctgccaaggaattgaataccagctttgaagagtgggaaaaaataatgagaactccaaattcaggtgccatggagacagtcatggggttgataactcgcatgtttaaacaaactgctattgccaaggcaggtgctgtaaaggattatattaagatgatgcttcagaatgattcgcttaaatttctggtttttgctcaccatttaagcatgctccaagcttgcacagaagcagtcatcgaaaataagactcgttacattaggatagatggaagtgtttcatcttcagaaagaatacatctggttaatcagtttcaaaaggatcctgacactcgcgtggctatcctaagcattcaggctgctggccagggattaacatttactgcagcaagtcatgttgtatttgctgagttgtactgggaccctggacatataaaacaagcagaagaccgagctcacagaattggccagtgcagttctgtgaatattcactaccttattgcaaatggaaccctagacacccttatgtggggaatgttgaatcgcaaggctcaagttacagggagcacactgaacggtaggaaagaaaaaattcaggctgaggaaggtgataaggaaaaatgggatttcctgcagtttgctgaagcttggactccaaatgacagttctgaagagttaaggaaggaagctttgttcactcacttcgaaaaagaaaaacagcatgatattcgatcattttttgtaccacaacctaaaaaaagacagttgatgacctcctgtgacgaatcaaagagattccgggaggaaaatactgtagtgtcatcagaccctacaaaaacagctgcaagagatatcatcgattatgaaagtgatgttgaacctgaaacgaaaagattgaaattggctgcctcggaagaccactgcagtccgtcggaagagacaccatcccagtccaagcaaatccgaactccactcgtggaaagtgtacaggaggccaaggcccagttaaccaccccagcctttcctgtagagggctggcaatgtagtctctgcacctatatcaataattcagagttaccttattgtgaaatgtgtgagactcctcaaggcagtgctgttatgcaaatagatagcctcaaccatatccaggataaaaacgagaaggatgattctcagaaagacacctccaaaaaggttcaaactatctcagactgtgaaaaacaagcccttgcacagtcagaacctggccagttggctgacagcaaggaagaaacaccaaaaattgagaaagaagacggacttacatcccagccagaacagtggaagagttcagacactttgccagtgtatgacaccttaatgttctgtgcaagtaggaatactgaccggattcacatctatactaaggatggaaaacagatgagctgtaatttcattcctctggatataaaattagacctttgggaagatttaccagcaagctttcagctgaaacaatatcgctcactgattttgagatttgttcgagaatggagtagtctaactgccatgaagcaaaggataatcaggaaaagtggacagctattctgtagcccaattcttgctttggaagagatcacaaagcaacaaaccaaacaaaattgcaccaaaagatacataaccaaagaagatgttgccgtagcctcaatggacaaagtgaagaatgttgggggccatgtccgtctgatcacaaaggagtccaggccacgggatcctttcacaaaaaaacttcttgaagatggagcctgtgtcccatttctaaatccatacacagtccaggcagatctcactgtgaagccctctacatccaaaggctatttgcaagctgtggataatgaaggaaatccactttgccttcgctgtcagcaacccacttgccagactaagcaagcatgtaaagcgaactcttgggattcacggttttgctctctgaaatgtcaggaagagttttggattcgatctaataacagttacctgagagccaaagtatttgaaactgaacatggtgtgtgtcagctctgtaatgtgaacgcacaagaactctttttacgtctgagagatgcccctaaaagtcagaggaagaatcttctgtatgctacctggacttcaaagctcccattagaacagctaaatgaaatgataagaaacccaggggaaggacatttctggcaggtggatcacatcaagccagtgtatgggggaggaggacagtgttccctggacaacctgcagactctctgcacagtctgtcacaaagagagaactgccagacaagctaaggaaagaagccaggtgagaagacaatctctagcatcaaagcatggatcagacatcacacgatttttggtaaagaagtaaagtagaaaaatatatgaatgaatgacaaatggtttacatgtggaagactttaatacagaagttttccatgtttgtttaatatatcgagagtaaaaattttcagaacaaaaatcaagaattcaaattctcttctactaattacttttagtattaaatacattttgaaagtacttaacagaaactaagatacaatactgaatatttctgtggtctttttgatttgattcagactcgcaattatgtttcagcaatgttttgtaaagctctttacccctaatatgcctaatcactgtattgtgcatagattgtgtttaaaaaatgtactctcaattacctaaaaatgcttctggattagtattgttctggactgtcataggtatgagtggaacattgcaaaaccttatgggaaatttcagacgcaaatcattatttggggattctgggccaagcatgaccagcctgcttaggattcaagagagactgtccactaaatacctccagaatgagctaggggcacacattttgggtgttgcttttcttgctttatttcttagctagtcatctttatcaaaaatatccttttcaaaatgaggtacctatggtgtttgtggacaatttgggggttctgtgtaaagtaattgttaaaactattaaataactgaaaacataaaatgtaaaatgccacttaagcttgattttttagatctttttttaaaaaatgaataaaactaggcttactgttggctgggcgcggtggctcacgcatgtaatcccagcactttgggaggccaaagcgggtggatcatgaggtcaggagatagatcgagaccatcctggctaatacggtgaaaccccatctctactaaaaatacaaaaaattagccgggcatggtgttgtgcacgtgtaatctcagatactcgggaggctgaggcaggagaattgcttgaacccgggaagcagaggttgcagtgagccgagatcacgccattgaactccagcctgggcgacagagcgagactccgtctcaaacaaacaaacaaacaaaaaaaaaaactaagcgtactatcaaaatacactttgtcttctggttctcattttctgtttttaaaaccctgtgttattaaaggtatgtttctggtacttattttaaaaagagtgatgatgacaaaacactttataataaggcataatcagatggttatatgcatttaaatatacaataataacattaaaatgtaattgacataaaataagagtgacgatgaaacaaacccagggcctagtcctgcaatatgtcagaatcatgagggcaaagagtcagaactatacaaaatacaggaccgaggaagaattacattcccaaaagggagctgtttgtaaatactattaggacatatacctctttagtttgagcattttcccacgttaattaatagctagtgttttacaacataaaggacttgtttttagaaagattatacaatcaaagattatacaaccacagttgttcctcagtttctatttcattgtatgagatcaagtcatgttggttattttataaatgaagttgggctttctttggcctcctttctgcttagttggtcaggtgctctttgcagttttctgcctcatttccaaggtaacctaggatttgtcacggttgagagccaagaagcaggcacgctgcctttcctccagcatggggttttgcaagcgaggtctaagtaggtcaaatttgaggggaacttgctcttcagatcacactaaggtgataattctaaggagaaagttctcagatgtaagaactgtgtgatggtttgaggtgaaacaatccatgaagataggctcagtctataccaggtttcagaattctgactaattaaaaatgccgtaaggagcattgagcatttgctgtacaggacactgactggcccgtccccatcccttcctgacatgtctcagagctttgtgtcctgccttcccctaatttggtctgcattacttgtggggcacattgagatgaagggttctgagacagaaaataaagatagagattgatctaataaccgagaccgaaagggcatcttgaggactgttctttcctcctcacaatctgaaacagaagctccccactatgtattgcaaatgggaggttatgacagagggacacagaaagtgtcagagcaagtggcagatcctgagtgcagaaggaagtgcggatgccccaggaagaagacagctgctgccactcaggagatggagatggagtgaaaacacaggtgggtacaatgagtgtaaaaggataggcctggctctgaaaagactcagagaagctgcaagatacagtttaggctaagaaaacaacaacaaaaaagggctctggccaggtatgatggcacttgcttgtagtcctagctacacaggaggctgaggtaggagggtcacttaagcccaggggttcatgaccagcctgggcaacacagcaaggccccatctcaaaaaagaaaaaaggctctgggtccagggaacagagctgggaagtggtaggtgacgaaggaactcgcttacgatagggaaccatatgaaaatatgcctgtgggtaggggtagggtggggaggacttccggagcatggtgggctcacacactcaaaccttgcacagccagcatcaggctggcctgccttcctgttcccgtcactgggtgacattgatcccagacacattctgatgactagtaaagttgcttttagtagccccagagccaggaggaataattcatatggaatttttaaagacgcccactcttggcgttaattacagcccaacgtacatttcttggggagattttcctgtgacaagtgaataccctctacattttcttaactggatgggaaaaggattttatgcccatacatcttgctaataaaccaaatcccttcttcagattcttgagtgaaacatttaaaatgtagtttctttagaaataaaagtatgaggcattttaaattatatgacagacaaaaaagtcaatgctcttgagctctttacagtaaataggttgtgtttactcataggatacagaatcatggatatcaaacatcaaaaataaattataaaaacaagaaaaaaaaaaaaaaaa

SEQ ID NO: 28515 - DNA, 4428 bp, Homo Sapiens
acggctgcgagaagacgacagaagggggggccggggctgggtggcagcggccatggaccgcttcgtttggaccagcggcctcctggagatcaacgagaccctggtgatccagcagcgcgggataaaatttgatgctgggactctccttcttagcacacaccgactgatttggagagatcagaaaaatcatgagtgttgcatggccattctcctttcccaaattgtgttcattgaagaacaggcggctggaattgggaagagtgccaaaatagtggttcatcttcacccagctcctcctaacaaagaacctggcccattccagagtagtaagaactcctacatcaaactctccttcaaagaacatggccagattgagttttacaggcgtttatcagaggaaatgacacaaagaagatgggagaatatgccagtttcctagtcattacaaacaaatagaggaccccagccaggaagaataagggctgtaggaattgtaggtattgaaaggaaactggaagaaaaaagaaaagaaactgacaaaaacatttctgaggcctttgaagacctcagcaaactaatgatcaaggctaaggaaatggtggaattatcaaagtcaattgctaataaaattaaagacaaacaaggtgacatcacagaagatgagaccatcaggtttaaatcctacttgctgagcatgggaatagctaacccagttaccagagaaacctacggctcaggcacacagtaccacatgcagctggccaaacaactggctggaatattgcaggtgcctttagaggaacgagggggaataatgtcactcacggaggtgtactgcttagtaaaccgagctcgaggaatggaattgctctcaccagaagatttagtgaatgcgtgcaagatgctggaagcactgaaattacctctcaggctccgtgtgtttgacagtggcgtcatggtaattgagcttcagtctcacaaggaagaggaaatggtggcctcggccctggagacagtttcagaaaagggatccctaacatcagaagagtttgctaagcttgtgggaatgtctgtcctcctagccaaagaaaggttgctgcttgcagagaagatgggccatctttgccgtgatgactcagtggaaggcctgcgtttttacccaaatttatttatgacacagagctaagggttttgtatttaaaatcctttttgtccatatgcttgcgtcatgtagaggttgtatgacattgagctaagagataaaccccgatcaattgagaatttattagaacttcacagtgcaatgtaaatctcttttaatttctcactaaatatggtccaggaaatttatttagtatacgcataggaaaattcagaaaagtgaatgccaatatgaatttaaaatcatgctatagtgcagaaccctcagagtttaacttggaatatagtggattttaacttgatcctcaaatctaatcattttataaagaagggaatttagttttgcagagaataaaaagagaagttgcatgttcagacaggttagattattattttggtgtaactgaaattcactgattgcacatgacaatgttgggacaaaatatactgcagcatgctatatgaggctcctccccagggcttttagaagcagtcatagacatgtcttcaacataccaaataaaatacctttaaaaatgaaataattttatttgacacatatatttatatatattctatctagtttctctttgtttttttaagtgatgatttcatgactggcatttaaagaatgcaactgtgtcattttgtttccaaatgctgtggattttgaaactgaactagagaagctgtatagacatgcccagagttatgattacaaatttaggaggtagacggctcaggaattccctgggattgttgtgctggtggaatggcagagggaacttcacaggaaccttagtgttcttttacctcaaagccacagacaggaaatagaaagtggaaaagtaatatctccttttcttttccataaggagtttcaacactgaactttaaaaagtctatcatattccagcaatattttttctttgtcctttatgttgtaagttgtgtggaaaaactacttcggtaagaaatgttactgagataacaacaactggctaatactgcatgtagattgcttaggttttaaagtgactgcctgacttcacatgttattgctacagcctccagtatgttcgcattatctcaaactcagggaccccacaggacaggagacaccctttctgaaactgagttggaagtgaaagggtggtgatggttttggccaagcctgcgggagggaaagtattgtattgggagcacccttgggaccaggaagagggatgcccaggttcacactctgggacccctaagacattgtcagtgggtaaggtggagggccactgccagaggctgctgcagtgccctctgggaagtgccagggaccctcagctgcagacccaggggatcccaatcccttatctctgcctgaaaagtggctattgctgcttcgtatcctccagtgtcacaggaatgctgtgcctgagacatcccactttagtttttgttttccaaacctgtcactgactcttcattgtggtgacagatcctctggttcccccattgctcagcctcaggtttattttgagggtaactcagtgtctgactgcccaagtcttttaggggttagttggaccattgtgtaagcttgtttgtatgtctcacctctttctggttggtacttactgtctcacactgctctggcaaacttgtacacacacacacactctctctctctctcacctggctaaggcttttaaaattatgaagataaataatctgtttcaccagctggagtgagttgcaaggaagattgctggagctactcaatctagcgctaatggtttggattcattactgcaaacctacataatttaacatatttgtttactttagtgtgacaactgatgaaaaaaaatggagcaatctgaattgtataaaataacttaagaaggaagaaaagtgatatataaatatattttgcaaatgtcacattaatttaaaaatgagtatgattgattttatttttaaagtgggcattcttcactgtttcgagacctttgtatgtatttgtgtatttttatctttttttttcaggccattattataaggtgttattttggccctctaatgtagaagttatgtttaaatacaaccaatcaggccctaagtgcaaaaaagttctgtcttggtgcttatcactggtataattattatttttttgttttcctaactttgctcttaggagcatgagcctctttgtagctttatggtaatgcaatatttctggtcatttactgtcaaaaaatttttttacattgtgttagtgaagactgtgttttcagggttaaatgattggtatcaatgtatatagagtaaaattattgcaaaatttaaaaatgatttttcttggcattctttttaaacactctgaaacatatatgcaaatgagaaacctttaatcatactaaagccagttatgttaagaatttttcctttggattttataattaagagttgcttataaatacttatgacattgagctcttactgttttagttgtcttaaaagaatgggacatgtcatgaactggtttctttttttaaaaaattcttgatgtgaattccactgttacctgaccatgtatattcagatgaatgtactctttcttgttccttgttaccagattaatctgagagaatgtggattcatcctgtcatctttctcatactcaaatacttaaaatggttcttttgcccaaaagtctcagagtcttcattttggtacagtggagtcacaacttgtaaggtggttaggttttaaagaccgtgcctaaggacaaaattgagcatgctcagaatggtccttgaaaatctcctaaattaccaataaatttctctttgtagtcttaaagtttaaatccctgtggagtgatatgtaggtatgaatatattatgcttatattaagtacaaaaatacaaactgcatatcaagagattcttatagcattaataatttccatgcatgtgtctttttccagtaggtatggttgaatttatgtaaatttattgctaatcccatcccttacgatctagagtataagctgcgcaagggcagaagtttttatctggtttgttcatggatgtattctaagagctgagaacagggcctggacacaataagcattcaataaatatttactgaatgaatgaactcctacctatattcctatttataatttggctccactttatcctactttagctcccattcaattcaataaaaaaaacatttttttgaacacaaaaaaaaaaaaaaaaaaaa

SEQ ID NO: 28516 - DNA, 2241 bp, Homo Sapiens
ggagtcccaggagaaccagtgagacaagactggtggttctcaaagactcatatgtcccttacaggcgcctgcccccgcaaccgattcgaccactccctagatttggtgagactaattccaccccattttctttctcctacatgcccactccccacccctcaattcctgagtctgagcccttgctgggagcagacacgttggtcaccttctctccatccttcagctctgtcccccccacatagctccacttgtgaaaaccgagccccagaggccagtaaaggaggaagagcccaagattccaggggacctggaccaggaaccggtaaggagcatggggatgggaaggggatagccagaatctctgaggaaaatggaccaaaaaaaaaaaggcctgaaccccaaggaagactgtggagaccatcttgtcttcctccccttcctcctccagagcctgctctatgcggatctggaccatctagccctcagcaggccccgccggctgtccacagcggaccctgctgatgcctccaccatctatgcagttgtagtttgaagggaagcccttactccaaacctcccaagctaggggatcccagctccccataatccctctcccctccttggttcctcacctggaagaggaaggcaccatggtatagaaataagtgctagactgggagttgggagacctgggttccaggctgtctctgccactggtcttacttctaaacttactcccatctctcctataacctccatgtctccctcaccaccagtgtcctctctatacccaatcaagccctagctccttttttttttttttttttttgagacggagtctcgctctgttgcccaggctggagtgcagtgacaccatctccctcactgcaagctccgcctgccgggttcacaccattctcctgcctcaggctcctgagtagctgggactacaggcgcccgccaccacgcccagctaattttttgtatttttagtagagacggggtttcactgtgttagccaggatggtcttgatctgctaacctcgtgatccacccgccccggcctcccaaagtgctaggattacaggtgtgagccaccgcgcccggcctgattctttaagctgtttttctttgttgctggtgttttctttttggactcctcttccttgctccatatccctacagtatttcccaccattctaggtttgtccctttctcttcttctgggacactctcatcaacagtcagtcctcagccccctcctctgcaaatgacactcagaactctctctggctcagatctcagatttgggattaacaaacttccacttagacattctgcctgactgacctcaggcatttcgcactctgaatgtcaaacccaactcattgtcatctctgaagctgctcacttaattctcctctgtattctctttaacaacccagttgcccaacccagaaactgggagtcacgcagacctcctttctctcttactcccacacaatgagccatgaagtccagtctttctatcttaacatcactgtcaaacccacactgtattccatgcccagcgctgccacgtgaatgtactctgctcacttccttcctggattacccatagccccacctcatcctcctacccttgctttcctccctgaagtcagagagatcctactcaagagataactgctcctgacagcccttattacagaactgaagtactctccttagcttcagctctgtgcccacgtgccttggctttggatacaaggtactacagcactttgtccactctccaggcttacctgtgtcattccacatgcacatcttagaaaatgccagccttagagaattctccctagccccaaaatgtctttgcccagtgcaattccttcttcctgtattacccctttccctccttcacactatctgcctggctaattcttatttatccttagttcaagtatggccttttctgggaaggtgaccctccttggccaccccttgcatatactttgatgccctagggcacaccccctttatttccctcatagaaacagccttctgtaaattgttccatgacaacctgtatttcaatttgtaagaaatttgcatgtactgtgagctccccaacgtcaggagactgacccttttgatatcattgctaagcctcattaaatgaatgaatgaaaaaaaaaaaaaaaaaaaaaaaaaaaaaaaaaaaaaaaaaaaaaaaaaaaa

SEQ ID NO: 28517 - DNA, 3279 bp, Homo Sapiens
ggagagaagatggcggaagcggaatttaaggaccatagtacagctatggatactgaaccaaacccgggaacatcttctgtgtcaacaacaaccagcagtaccaccaccaccaccatcaccacttcctcctctcgaatgcagcagccacagatctctgtctacagtggttcagaccgacatgctgtacaggtaattcaacaggcattgcatcggccccccagctcagctgctcagtaccttcagcaaatgtatgcagcccaacaacagcacttgatgctgcatactgcagctcttcagcagcagcatttaagcagctcccagcttcagagccttgctgctgttcaggcaagtttgtccagtggaagaccatctacatctcccacaggaagtgtcacacagcagtcaagtatgtcccaaacgtctatcaacctctccacttctcctacacctgcacagttaataagccgttcccaggcttccagttctaccagcggcagtattacccaacagactatgttactagggagtacttcccctaccctaacggcaagccaagctcaaatgtatctccgagctcaaatgctgattttcacacccgctaccactgtggctgctgtacagtctgacattcctgttgtctcgtcgtcatcgtcatcttcctgtcagtctgcagctactcaggttcagaatttaacattacgcagccagaagttgggtgtattatctagctcacagaatggtccaccaaaaagcactagtcaaactcagtcattgacaatttgtcataacaaaacaacagtgaccagttctaaaatcagccaacgagatccttctccagaaagtaataagaaaggagagagcccaagcctggaatcacgaagcacagctgtcacccggacatcaagtattcaccagttaatagcaccaggtgggataaaacttttgttgaaaatagttgtattattcattttcttagcagacagagcaaaacaaaggatgttcatgacttgaacaggagtgacacctttaaaacattttaaaatgtgaattttataaacttaatcttaatgtgtagcttgaaaagagacaaaaaagcccaaaagataaaataaattgtaacaatataataggttttttaaaatcaaattacatttgattatcatctttaagcactggtctctccttatattgataaaaccttctatctttaaaaaaagatttgcctgtagtttatttaatatacttcagtgggataatttttaaagcttttaaaaaagcagtatactattttgtttaaagttgttatcagtgggagaaatttgtcactttgaaacataggattatgcataattattttccttatgttgttgtctttttctgcctttgatttcatctctgagaggatcatctcaggcaatcacctgagtcactgtcattcttctcaagctttgaattctacctttgcttcctttactttatccagataatcttgcctcatggttctcatactgaaaatgtgggggccatccagagtgagcttactgtctcttctgttcatctcagaatttctcaggattgaattttgtttacttttgataagataaagagttacatgtattcttaaacttagcaccatttgcccctgttgttgatcctacctttttttttttaaatttcctgaccttctttagtacataattgttacagcgtcttttatcttctcatgctagaccttttcctttgtttctcaaccataattaggtctcccttattcttaatgtagctgcatagttttctaaatcactataactatatattgtttgagtgtgtgtgtatgtgtatgtgtgttgcactgggctatacaccttacaaatgtttcattaaaaaaaaaaatctgggcgggtgcagtggctcagcctcccaaagtgccgggattataggcatgagccactgcgcctagcctgttgcagctttttaaagcaggaaaatatccatataaactgttgggttagaatctatattagaatctttcaaactaattgaaaacaggaagactatcatctaagtagccagataatctgggtttcaaaaagttattccatggtactggtttaaaaaatacttttcaagtgttttaatttttaaagtgtaactaattcttcaaatatgttatgctgttaaaatatgtattccataagtactttttgtatatgtattcttaaattttaaaaagtcaactgaatgcgcaaagatgatataattttggatgtagacatttaaactagattcccagtcctctccttcaaaagcttggtctttgtttttcctatagggaaaaaagtcaaaataagttccaaaaactatcctcaaagtagtattgtgcttgtagtaaatgaaggttggatggatggatactgacaatggtggcaggcatttcaagccttttaaattagtactttttgtcgtcttgcttattaaaattttgttaattttagcaaagaccaattgttgtgataaactggtgttttttggatgcttcaagcacacgttaaccaattttttaattccccttttggttcctcccattgttctaaaataggactttcatattattaaaacctcaaaagatgatccacccaggatgaacaaagatcaccaaggggaaagaaaacattttttatctttacagaaaacatgttaagattatatatagatgtattctttacattggatattgtattagagtcctccttacaagaaatgaaatagtttttagcactcttagcattagagttcctagattggtgttgatagctacagttttaaaatgtataacctgaaaatgaaggttaattttgcattgtaagagcacatttgatctatgtaaaaagtgtccatttggtgtatttttttaaaaaagagaaagcactttcatattaagtagcatgtgtatgaatttagattttcatatttgttgtgtctgtattcagtgaagtaaattgagcatttaaatgtttgttgatggcaacattaactattaaattaaagcaccttatactctgctgcttaacttgcttgtaattgcacctttgttacctgcacattttcatatagaatattgttgtaacattgcttcatgtgggtctggatggaagattagtgggcctacaggatcatttatttatattgtttatattacaataatatattgtagatcagttgtaagttcatttctttacaaataaaagcctcttccatttaaaaaaaaaaaaaaaaaaa

SEQ ID NO: 28518 - DNA, 1921 bp, Homo Sapiens
gataaccattccttcaccaagtagcaacattcttgccagagttcttgggaaacctgtttttttctctactctccatctctgctgctctcatgctttaaattgataaaatatgggctcaaaaaaagaaagccgccaaagactcttatccttattggtgccccatcattggccaccccagccataggtgtgtgctgttggtgggaaatggtctccttcctcagcgttgtgtttgggttactggtgaggccagctcacagagtgacatcatggtcaccagtacatgtcgctggagtaaaatcttgcctttagaaactaggttgagctgttcagaaaggtcaattctcttctgtattccccctcaacatttatctgggtctaaagctcagcactgagtcacaatttcacacaagatcaaagtgaggcagtgttaggaaaccatgggctgggtgcagtgcctcccaaagtgctgggattacaggcgtgagccaccgcacccggcctcaaatggaaatatttcacagaggagtggttcagtttagccctgcaagacatctataacttgactgtttgctaaaccacaactctttttggctacttgggtcatagagacagcagagttgctccaagtataaatgtgacttaggctccctccagcacacagtgtgtatgttggagggagtgtggattagcagagaatgagaactacctcagctattcctgccataaccacactgagagaggggggcacggtggggagcctatttagctttttttttttttgagacggagtcttgctctgtcgccaggctggagtgtagtggcgcaatcccggctcactgcaacctctgcctcccgggttcaagcgattctcctgcctcagcctcccagggtagctgggattataggcgcatgccgccacacccgactgattttttgtatttttagtagagtcagggtttcaccgtgttgcccaggctggtgtcgaactcctgacctcaggtgatctgcccacctcggcctcccgaagtgctgggattacaggtgtgagccaccgcacccggctctatttagctttttaaaaattatttcctttcaagggccctttaatatctatcaagctccctcccctaacaaaatgggctgtccctgcccaacaagtctgaaatagaccttaaaactgtgctgccttagtggtaagtaaggggtgggggttggacagtgaatcttaagatttcatccttcattcagtaagcatttgagtacctactgtgagcaggcattggggcggagcagcgagagccctgccgatgttgggttctcctcctattggggaaacttgatcacagatggaacacgtgcagattgattgatgagtgctgtggagaaagcagcagcgtagcgggaccgtttgggaaaggctactttggctgggggtggctgggaaaggcccctctgggaaagagacagttttactgagtcagatggtggaaagacagatgtctctatactttcttaacaagccactctgtcccataacatgcacttggaatctctcctaagttccagaggccccactgttccagtttcaagccttcattttggagtctgtttgggaacttttaagacttcaaagcaaagttagctaccagcaatttctgtaaaccaagagaagattgtcacaaagattcactactttccaactgaatctatgcagtagaaaaatcattagaaaatgcaaaggttggccgggcgtggtggcacatgcctgtggtcccagctactcgggaggctgaggcaggagaatcacttgaacccaggaggcggaggttgcagtgagccaagatcccgccactgcactccagcccaggtgacagagcaggactctgtctcaaaaaaaaaaaaaaaaaaaaaaaaaaaaaaa

SEQ ID NO: 28519 - DNA, 2949 bp, Homo Sapiens
gagcgtaaagtaggaagtacatatgacgttgttgtcccgcctaaacacccagcacatatattaatatagttaaacataaataattgaagcagaagttcataaaatgacactgaacctttctatgtgtaatgtatcttcatgtttttcttctatttcattttttacaaatgctggtggccagctatcacattgacttcatgatgctgttaatggattacaggcaacaggtttttttgtttttttgttttgattttggtgtttttttttttttttttttttaagacaggatctagctctgtcactcaggctggagtgcagtggtgtgatcatagctcactgcagccttgacctcctgggctcaggcaatcctcccacctcagcctcctaagcagctggagccacaggcgcacaccagcacacctgactgatttttaaattttttgtcgagacagggtctcaccgtgttgctctggctgggaggcaacagtttttaaaactgcagtggttgccacacttagctgtatatcagaattaccttaaatgtttgttaaaactacagatttatcctcacccccaatttaggcctgctggatctgaaattctagaactgtgtctgtaaagtgttttttgttttttgtttttttgtgtgttttttgttttttgtttttttgtttgttttttgtgacagagtcttgctctgttgcccaggctggagtgcagtggcgtgatctcggctcactgcaacctctgcctcccaggttcaagcagttgtcctgcctcagcctcccaagtagctgggactacaggcatggaccaccatgcctggctaattttcgtatttttagtagagacggggcttcactgtgttggccaggctgatctcaaattgctgacctcaggtgatccacctgcctcgacctcccaaagtgctgggattacaggtatcagcaccatgcctggcctgtgaaatgtatttttaaaaagctctgtagggccttccagtgttcagtctgtgtttataataggtgctaaacaaacatgtattgaatgaatcaaaatcataacctgaaaggctttatataacattttaaataaattttctttcttttaacacagggatacaccaacatcagctggaccaaactccttcaataaaggaaagcatgggttttctgataaccagaagctgtgggagcgaaatacaaaatctcatcttggaaatgcccatgaccaagacaattaaatgatgttttgaaattggggtgtggggtgggtgtaaagttaaaaggaacagtttcctttttttaaagaatggtataagactatctttggagccgcttttttttttctttttcatttttttaaaagattgagtggtacactaataaatgagagtttgaaattagaggtaatttatgttttatatacagatttcaagacatttgctaattttgtagtttcatgtgattagtttccaaaggttacagataataaagaaatcagaaatggtacctttttaagaattgcatatttttttagacacaactattagcacattaagagggaagcaaagttactgtctatttaaaactgcaagcagttaactctcttaactcccttattacctaaacttgtctggctcccaggaacagccttatagagagagggagtattgtattgggaagaaaatgttactgaactattgactgaaagtaaatttagataaaatacagcttttttccttatgggcatttgttttgtttcaagtcatcataaactaggtattgcattgctatccgtggatacagacgcttagctcttaaaagattttttttttatgtaaactgttgaatatttgaaatagtccacttcaccttaatgggtcttgtctatcttcattagtcttcaaagaaaaaccatttgctaccaaagtaaatcagtattttgaatgtgcttctcttgttttttgtttattagctagttcctgtaagcatttccaccagaacttgaggcaaatcgtaaggaagctgtttcttttaaaacacaaaccaccaccaaaaatttaaatgtacatattgcttaagtatttggctgtttttattttttaaaaggtataaacaccaaaaaaaaaaattaacattgtatgaagatggaaaataagaagatgcactttctgtaactttgtctaaggatttaaattactaacttatgaactccaatttgaattgaacttaactatcggctttcttactggtaaaattatatggtttattttaaatgcgtacatattgaccaatggcctctgaaaaagcacattttagatactgaaattgaaggaaagaaaatgcatcttcaaacattttttggaatctcaccacatatactttgttagatttgtgtattgtagggtgtttgttttgtatttttgtattgtatatgaactttttttaaatgtgacagttaaacacatctttaaaagcatagtcacagacaaaagcatacagtataaaaatttccttgaaaactcctacaatattatatttggaggcagcttcagactgttttattggtggtagctgcttgctgaggtcttttagttggtaataactccagagaagcagcctgtgtatattcctaacactttgttcactagcatttaagtttagaataagcccaagtaagacaatggaaatgtatatagaactcttagttcttacatgatttaattatatcgatacatgaatttaacttactttaatgtaggcaaactatcaattttttgtccattttcctgtttgttaaaataacatacctctcctacgtattattttcttgacccaaatgaaatattaacctaaggtcaagctgggagagagaaatgactgagatgaatgtctttactaaagtaccaataaatttgtcaaactcaaagaaaaaaaaaaaaaaaaa

SEQ ID NO: 28520 - DNA, 5501 bp, Homo Sapiens
gggacctgctcctatctgcctaggaatttgtctgccattatcacttttatttcttcaactgtcactccattgcctgccattcattgttgcctccctgtgggaggggtgttggagccaggttatcaaagaaaggctgagatttcttgtcacgtctttctgttaatttttaattactgtggcgatgatcacagatggttctgctctttccctcctgctacccccttaagtttaccacaggcaggaaagaagagcagagtcacatgttggtttcaacgtgcattgtactcctgaagtcatagcagagcccgtgtgtggtagcttgttcccatgggcagctgtaattcttagttttagatggagggtggctgtgattctcttcgacctgttctgcaccctccaccctgtagtatcagaaatgaaagatctgtgctgtgcaagaaggttgagaacatgcgtttatgtgacagccccaggctggggatggccgtgctgaatcaggatctcaggcacccagcattgttttaggtgagcattccttctttttacagagtggactggcatctttgttagcagcttgttctgtatctttcccacgtgtagcggttcacaatttaaaaacaatcctcgcagtaccaaaaactgatttcagagggttctagaaagatagtggggcaggaagaccaggaattcatctcctcacctagacaacagttccactggcagaatctgtctgatgtaactattttggaactctggagtctactgaaggtttgcaacttctaggcgggaagctgggacggttaatttcagtcagtttcagctctgctgcccactgccttcctcagccctgtggtgcagggtgtgcggtgttcctggaacagtgtgcgtgcagcttgtgggagccagggtgagcaaagaggaccttgtccccaggtgcatacagagaggccctctcatccggttgtaagcctttcttccatgtgacggccaagaaatctaaagggccagtgctctttttatctccccacttcatttttattgttttctccttttgggagccagacattaaagactaggatattcagaagcaactgtgtatatggggtaaattataaagtgactgcatgtgcccagggaaaggcacaggctaagggaagacatgaaaagaccttaagtttaaatctcaggctcaccctcctcacagagacagcctacaactataaaaaatgacaacaacaaaaacaccccaaaaccagtaacagcaacaaaacagtacaccctggaaaaggaggagaatcagcttttcagagtttctacattattggattcaaatgtccagttttcagcatagaactacaaggcatacaaagaaacaggaaggtatggcccaatcagatgcaaaaataagtcaacagaaactgttcccagaaaagatctgatgccagatccaccagacaaagactttaaagtaactgtcttagatatggtcagatcctaaaggaaggtatggagagagtcaagaaaatgatgtatgatcaaaatggaaataccaataaagagctagaaaacgtaaaaaggaaccaaaagaaattctggagctaaaaagtataataagtgaaatgaaaaattcactagaggaaatcaaaggcagatctgaacagacggaagaaagagatagcaaacttgaagataggacagtgaaaataatcaagtttgagaagcaaacaacaagactgaagggaagtgagcagagcctggggacctgtgggcatcatcaggaggaccaaacagggattgtgggagtccaggaagaagagagtaagaaaagggtggagagaatatctgatgaaacccatgagtataaacacccagggagcctggtgaactccagtaagatgaactcaaagagacccacagtagacacgttatacttgagacacttctgtagaaagacaaagagaatcttgaaagcagatgagaaaagagactcatcacatacacgtttcctcagtgagatcattggcaggtttctcatcagaaactttgggggacagaatatatcaccggtatattaagagtgataaaaaatctttcaaccaagtatccatatccatggaaactgtcctttaagagtgcagaagaaattaagatattctcagataaacaaaagctgagggaatttgttaccacctgacctggacctgcaagaaatacttaaaggagcctagcaggttgaaaagaaagaacactagacagtaacttgaagccatatggagaagtaaagacatgggcagttataaaagctagtattgtaacagtggtttgtacctccactttttgttttctgtaagatctaagagacaaatccgtttaaaaaattagtctgcaagctagtatcattgcaactttggtttgtaactccacatttttcctgcataacaagagactaatgcatttaaacgaattgtttatgttttggggcacagcatgaataaagatgtagttttgtgacatcagcaaatgaaaggggtgggaacagatatgtaaaggagcagagtttttctgtgttactgaagttaagctggcataaatttaaattagaatgttattactttaggatgttaaatgtaatccccatggtaaccacaaagaaaatagctatagaacatacacaaaaggaaatgagaaaagaatttaaacattccactataaaaaatcaactaaatataaaagaagacagtagtgcaagaaatgagggacgaaaaaagctataatacatgtagcaaacatagcaaaatgacagaagtaaatcctcatcaatagttgttttaaatgtaaacagatgaagatttccaatcaaaagacgaagattggcagtgctatggtttggatgtggtttgtccacaccaaagctcatgttgaaatgagatccccaatatggcagtgttgtgaggtggggcctagcttgaggtgattggtcatgtgtgtggattcctcatgaatagatcagtgccctccctccaggtgagtgaattctcgctcttagttgccttgagagtgaggtgtttgaaagaatctggcttccttggtttctctgtctcttccttcttctctcaccatgtgatcgcttgcacatgcctgctccctttccaatttccaccatgagccagagcatgaagccctaccaggtgtacctgctcaatattaaactttccagccaccagactcaggagacaaatctctttatcttttatggcaacactaaatggacaaaggcagatgcatcaagagaaaaaaaacagatgatcctactacatgctgtctataagagacccaccttagatccaaagacagaaatagattgaaagtgaaaggatgaaaaaagatattccatgcaaacagtaaccaaagagagcaaggtggctatcagacaaaatttaaaaataaaaatttatttctttttaaataaaaaaaggttacaagagactaagaaggacaatatatagtaataaaagtttcaatacaataagaaggtataacaattacctgggtaaacatttacatacccaacgaatgatagactatcaagatacaagaagtaaaactgatagaattgaagggagacatagacaattctacattaatagttggagacctcagtatccacttatcaataatggatagaataaccatatagcaaataagaaaggaaatggaggactaaacaccataagccaactagatttagcagacatacagagcactctgcccaacagcagcatgtacactcttctcaagtgcacctggaagactttctaggatcgaccatatgttaggccacaaataagtctcaatgttgattttaaaatacagagatttgagccgggcgcgatggcgcacgcctgtaatcccagtactttgggaggctgacgtgggtggatcacttgaggtcaggagttcgagaccagcctggccaacatggtgaaaccccatctctactaaaaatacaaaaattagctgggcgtggtggcacgtccctgtaatcccagatacttgggaggccgaggcacgagaattacttgaacctgggaggtggaggttgcagtgagccaagatcataccactgcactccagcctgggtgacagagtgagcctgtgtctcaaaaaaaaaagaaaaatatatacagagatttggctgggtgtggtggctcaagcctgtcatccatgcactttgagaggccacggtgagctggtcacttgagctcaggagttccagagcggcctgggcaacatagcaaaaccctgtctcttaaaaaaaatacaaaaattagccaggcatggtggcaagtgcctgtggttccagctactccagagccccagaggctgaggtgggaggattgctggagtccagaaggtcgaggctgcagtgagccatgattgtatcactgcactttagcctaggtgacagagtgagacactgtcttaaaaaataatatatgtatatgtggaaaaagacagagattcaaaacttactacaaagctatagtactcaaaacagtgttattccagcataaagacagacatataggccagtgggctagaaccgagagcacagaaataaacctttgtgttatatgatcagttgatttttgacaagagtgccaagaccattcaacgggggaaaggacagctttccaacaaatggtgcggggaagactggatatccacatgcagaagagtgatactggacccttacctcacaccatatgcagaagttagcctaagacaggtccaggacctaaatgtaagacctaaacatataaaattctgagaagaaaacataggacaaaggctccacaaccttggatttggcagtgatttcttggacatgacaccaaaagtgtaggtaacaaaaaaaaaggagacacactgggtttgatgagacttggtgtcttttgatgcacaaagctttctatctccttgtttccctgtttccctgcttcttactgctgcacttggctagtcgtaaagaaaagacactgttaacggaataaaaaggcacctgtggagtaggagaaaatatctgcaaatcctatgtctgatgaggaattactacccaaaatatacaaaaaaaatcccacaactcaacaataaaaacaacttgattaaaaaatcagcaaaggaggccgggtgcagtggcttgcgcctgtaatctcagcactttgggaggccgaggcaggcagatcacctgaggtcaggagttccagacgagccgagccaacatagtgaaaccccatctctactacaaatacaaaagttagctgggcatagtggtgcatgcctgtggtcccaggtacttgggaggctgaggcaggagaatcacttgaacccgagtggtagaggttgcagtgagccgagatcggaccactgcactccagcctgggtgacagagtgagactctgtctcaaaaaaaaacaacaacaaaaaaaaaaaaaaaaaaa

SEQ ID NO: 28521 - DNA, 3191 bp, Homo Sapiens
gctggtcccggagtcgccgctgggcctgtccgctggcgtcatggcaccgaaaaagaaagggaagaaaggcaaagccaaaggcaccccgattgtcgatgggctcgctccagaggacatgagcaaggagcagctgtttatttttaggtgaagttgagtcctccctctttcttccttgcctttcgccggccacacgccccgttgccgtgcatgggcccctgctcagtgcctcacctgacccactgcacctggccaggtggaggagcatgtcagccgcatccgggaggagctggaccgcgagcgggaggaacgaaactacttccagctggagcgggacaagatccacaccttctgggagatcacacggaggcagctggaggagaagaaggctgagctgcggaacaaagaccgggagatggaagaagccgaggagaggcaccaggtggagatcaaggtgtacaagcagaaagtgaagcacctgctatatgagcaccagaacaacctgacagagatgaaggctgagggcactgtagtcatgaagctggcacagaaagagcaccgcatacaggagagtgtgctgcgcaaggacatgcgggcactgaaggtggagctcaaggagcaggagctggccagtgaggtggtggtgaagaacctgcggctgaaattgaggccaagtatgataagaagatgaagatgctgagggacgaactcgacttgcggagaaagactgagctccacgaagtggaggagaggaagaatggccagatccacacgctgatgcagcgccacgaggaggccttcaccgacattaagaactactacaacgacatcaccctcaacaacctggccctcatcaactccctcaaggagcagatggaggacatgcggaagaaggaggaccacctggagagggagatggcagaggtgtctgggcagaacaagcgcctggcagaccctctccagaaggctcgggaggagatgagcgagatgcagaaacagctcgcaaactacgagagggacaagcagatcctgctttgcacaaaagcccgtttgaaagtcagggagaaagagctgaaagacctgcagtgggagcatgaagtgttagagcagcgattcaccaaggtgcagcaggagcgggacgagccctatcggaagttcaccgcagccatccaggaggtgcagcagaagacagggttcaagaacctcgtgctagaacgcaagctgcaggctctgagcgccgctgtggagaagaaggaggtgcagttcaacgaggtcctggctgcctctaacctggaccctgcagccctgacgctggtgtcccgcaagctggaggatgttcttgagtcgaagaacagcaccatcaaggacctgcagtatgagctggcccaggtctgtaaggcccataacgacctgctgcgcacgtatgaggcaaagctgctggccttcgggatccctctggacaacgtgggcttcaagcccttggaaacagctgtgatcggacagacgctgggccagggccccgcgggactggtgggcaccccgacgtagctgccccccctggggggccacagcccagagaaccagcctaggaacactcgggatgacaccccttatcacaccaaggacagcaagttttttagattttatcatcagcaaatgaaagcttttcacatgttcttgccatcctctttcctggctctgtggaggagaaccacctgcaggaccctcacccatggtgtccctgtcgctcccttccctgggtgccgcacgtccagcctgtgtccaggcctactccctggtctcacctccgaccacagtcggcagcaccttctcagagtgccccgcactcacctgggggttggggcagtgccgcgctgtgctgcctgtcttcgcgccactgttgtcccaccgaatggacagctttgcaggtgctggcactaacttcattgacacctgagtcacagctgcccagtgggattctccagggggccgggacttccctaggaagtggtgagccaatgctccctgatgagcacaaagcccgctctgttgagggctgggtgggtgcagccagcgtgcaggaaagggcaggcagcctcccgctgccagtcttcgctctaactccctcggtaggtgatgtaggaccaggggcacgtggaacttctgggccttgctggtgatggttaaaacaacctgagatggagaggccaggagagagtataaggggatagcagcaaaccacctatctggccccaacacacctgagagaattcagcagcccagactgagggtctgggatggggtgaaccttccgcaccagagggacactccacagaagccacagcccagtaagtcaggcgcttctgcggcggctccagtgtggggtgaggcagtgaggttaggcccagagagctggagttggctcagatgaaaacctctgtcaacaaagaggggatgaatcacccttggcccagcctccccacaaagcctgaccctgggcaggtgagtgacgggtgtgtcctcgtagagtctgttgctgcctggacacctttcttttgggagctcaaagcaagtgagctcacctacctgccaccgcccaggaccagtctgcccactgcctaaatgatgcccggccagcaggacctggcctgcagatcccagtgagtcatgagcctcagccccctccagcccactggggctctcacctccacatgtgggtagaagctttcctgccccctcttcctccagtagccctcagtgtcgaaggtgagcttgtaggtgcctgccttcatctggtccaggacagtgaccatctgggtctgtgtagctggggagaggatgaggctgcagagatggggaccagaagccccccaccccagctttcctgggtctgcatcccagtgggcctcagacactgccctgccacctgtcagacttgggtgagcagacacagtgaggctgttaggtcctgcagttccagagcagtctagggacaccactgccctgtctttaggaaatcacaacacagagaagcaaaaagggaaaaagtctcccacaatttatcccatgagcaagaaccactttatagctggcatatatttttccagattttctctatgcataagtatatttgtttaaaaacttataaagtggattatactatttgtattgttttaaaaaaaaaaaaaaaaaaa

SEQ ID NO: 28522 - DNA, 4885 bp, Homo Sapiens
ggcgttacgggatgaattaacggcgggttccgcacggaggttgtgacccctacggagccccagcttgcccacgcaccccactcggcgtcgcgcggcgtgccctgcttgtcacagaatcatggtgtcatggaaagggatttactttatactgactctgttttggggaagcttttttggaagcattttcatactgagtccctttttacctttgatgtttgtaaacccatcttggtatcgctggatcaacaaccgccttgtggcaacatggctcaccctacctgtggcattattggagaccatgtttggtgtaaaagtgattataactggggatgcatttgttcctggagaaagaagtgtcattatcatgaaccatcggacaagaatggactggatgttcctgtggaattgcctgatgcgatatagctacctcagattggagaaaatttgcctcaaagcgagtctcaaaggtgttcctggatttggttgggccatgcaggctgctgcctatatcttcattcataggaaatggaaggatgacaagagccatttcgaagacatgattgattacttttgtgatattcacgaaccacttcaactcctcatattcccagaagggactgatctcacagaaaacagcaagtctcgaagtaatgcatttgctgaaaaaaaatggacttcagaaatatgaatatgttttacatccaagaactacaggctttacttttgtggtagaccgtctaagagaaggtaagaaccttgatgctgtccatgatatcactgtggcgtatcctcacaacattcctcaatcagagaagcacctcctccaaggagactttcccagggaaatccactttcacgtccaccggtatccaatagacaccctccccacatccaaggaggaccttcaactctggtgccacaaacggtgggaagagaaagaagagaggctgcgttccttctatcaaggggagaagaatttttattttaccggacagagtgtcattccaccttgcaagtctgaactcagggtccttgtggtcaaattgctctctatactgtattggaccctgttcagccctgcaatgtgcctactcatatatttgtacagtcttgttaagtggtattttataatcaccattgtaatctttgtgctgcaagagagaatatttggtggactggagatcatagaacttgcatgttaccgacttttacacaaacagccacatttaaattcaaagaaaaatgagtaagattataaggtttgccatgtgaaaacctagagcatattttggaaatgttctaaacctttctaagctcagatgcatttttgcatgactatgtcgaatatttcttactgccatcattatttgttaaagatattttgcacttaattttgtgggaaaaatattgctacaattttttttaatctctgaatgtaatttcgatactgtgtacatagcagggagtgatcggggtgaaataacttgggccagaatattattaaacaatcatcaggcttttagcgacaaggaacacacacatttttcttaaaggcccaatcctaacagactccccgtaccagaggcagatctggaactcgtcaacaacagcccggatcacatgctgttactggactgcccaggtcacctcattgaggtgagcgctgtccctccaggtactcaggcaggtggtgcccaggctccctcccttggcgtccttcttcctgcgccaaacccatctcatccttaagatcagaaaatggaaccccctttgtcgtgaaaccgatcaagcattttgacaggaagcccttcattattcataacattgtatgctgaccaagacgtcagaagaccacctgtgcccttttctctcgtggaagataaaacctggactcagggagcaaccacaggctctccactttgaaactttagtttgaattttaaaagataggaagtaatacagtttaagttcctttctcacactcagtattgcatgcttagtgctggttttcttacaacattttggcaggtgtagctttttctgttaaaaatggtatacatgaagtcacatacttttttaaaggaacactcggaacattctgtcattccagtcagaaactgtcttttgaaatatttctttacaacctaccaaaaaaggaaggttgttttttctacatgtgcttgggtatctaacatctaccattaaaacaacaaatggcttgcagacagggcagtaatggtttatcctaaattactcaaccccttgtagccttgacaaattttaccttaaaaccaaaatgaaacacaaaaattaatccttaataatgatagcaagtgatctttctttttagttttagccttcctttttcaatagtaatatttaaacccacttttgaccaattgtttgcccaaatattcttgtcatttggagtcagtggaaaatccagcacaccaagcaccagtcttcttctgaggcaaaagaaaagtgttgtcattttcactctgttggagctgcacacttttttttctttttttttttcttttttttttgtcatgtaagaaggatgctggtcagagctgcagaaaatatgaggcaattaaaagtctttagctgttagcaaacctgttagttttacttctgcattgaaccagcctcagaagctacttactgctttatgtactctttgggcattaatgccttctctgtaattatatctcgtttttgcttgacagtgacctacccagtaattgcatcgtgcattgccatgaaaggtaaacacattgtgaactgaacttaccaagcagattctgtgagaaagcactggttgaggctgaacactgttgacacatcatttttattggaagagtattaactggtgcctcttctgaaacacaccaacccatattcctctgctcccccaaagctgtttctgatcctgctgggagcaactaactagttattatgcacatctgctccagacccagctctttaacttcatggttttacagcttgttttttctttttcttttcttttcttttttttttttttaaaaagcacctttttttgttgtttccccttaataaaagaggtttctaatttatgtttctctaagatttcctttggttgtatttagaaacacaaatagttttataatcaggattgcatttgtgctgggtaaaagaggagagctgtgctttctaccccaaagttgttggtaatggagccggtctgcccttcctacaaactcaagaggctcattgttcaaggtgtaacaacatttaattgcatgtcctctaacgctttgaaacctttagagggaagatcctcattttttacaattttgttccttttcatcatagaaaacatgtttaagataaaatacaaactttacctaccccaaattcataaagtacatttagtgctgtatagcactaaaacttagagatacagacactgtacttactttttaagaattagagacggtaactccaaaaataattgtccttttttctttcttttttttttttttacaataaggctcttgaaaattgtcattacttgtgttttcctatacattcatctgtgtgaaagcctttttcttctttgatttaaaaaaattaactatacagttaatggtttagaacttagaactacttagaattaatgctaaagtgtcagtaagaaattaatttagcttcaataattgtgactggcctcaggaattctcccttccacacctgcccacctcacctcacctcacctcaccgcaccgcaccgcaccagagccagagcagctgcttgtctgcagcaggacacagttcctacatacgtttcagttctttcatggtaagctcaatggactttgaattgtttacagtgctgtatgtccaattgttaaatgtaccattctgaacgatgttaaagcaagtgtggtttatttatggcatgaaccatgtaacttgaaatatgaacttacaaggaggggcactcattaggtaacaagttcttacaccaaacttccttgatgaaataagccaaaataatcctaaaattcattagaagaacttgataaaagactcaaataaatgttagaaagagcccataattttaggactcctataaaattcttccttgtttgttaatgctattaaaactcagattcaagggaaataccagcttccacttgagtcactttgaaatagttaattcaacagcaccatgttagaaatatattggcagccaagactctgaactctgcagaaacatttgtttcacccagacttcaaactctagccctgactatgatgcccctgtgtgcatttacaataaagactccaacggagggagcctgttggtgttaaattgtttacatttctttatacaaataatgtgctttcagtgccttagttacagctccctttctgtttcttgttccaaggattctgtagtatgtaatgtgtttcttaggtaaagtctctttttgctactgaaagggaaatggtctctaaacactggtcactgtagcaggtaaacactactctaacgtggagaaatgagcttcatgctgaggtagtggttgccttagagctgttatttatgctgtagaaaacgaaaatggttttgctacctgataagcttcagattagatatagccctaaagttatcctgtacctgcattaaattttcattttagaagagaatcttggttttggtaattcatttttttttaagatcattatgtgcaaaacaccaagttttaaaaataagtcacagaatggccttagttttcaatgtctgatggtatatttgtgagttgtgttatctgtaatatacatcccagaataaaggagtgaattaaatagtttaaaaaaaaaaaaaaaaaaa

SEQ ID NO: 28523 - DNA, 3441 bp, Homo Sapiens
ggccaggtccgggcgggtgcctggagccgccagagtttccgcacccgggagggagatgcggccggggctcaggctccttgcagattcctaaccagcataatgctggagccgggagccaccaacctgcagttttcagaatggccgtgttggacactgatttggatcacattcttccatcttctgttcttcctccattctgggctaagttagtagtgggatcggttgccattgtgtgttttgcacgcagctatgatggagactttgtctttgatgactcagaagctattgttaacaataaggacctccaagcagaaacgcccctgggggacctgtggcatcatgacttctggggcagtagactgagcagcaacaccagccacaagtcctaccggcctctcaccgtcctgactttcaggattaactactacctctcgggaggcttccaccccgtgggctttcacgtggtcaacatcctcctgcacagtggcatctctgtcctcatggtggacgtcttctcggttctgtttggcggcctgcagtacaccagtaaaggccggaggctgcacctcgcccccagggcgtccctgctggccgcgctgctgtttgctgtccatcctgtgcacaccgagtgtgttgctggtgttgtcggccgtgcagacctcctgtgtgccctgttcttcttgttatctttccttggctactgtaaagcatttagagaaagtaacaaggagggagcgcattcttccaccttctgggtgctgctgagtatctttctgggagcagtggccatgctgtgcaaagagcaagggatcactgtgctgggtttaaatgcggtatttgacatcttggtgataggcaaattcaatgttctggaaattgtccagaaggtactacataaggacaagtcattagagaatctcggcatgctcaggaacgggggcctcctcttcagaatgaccctgctcacctctggaggggctgggatgctctacgtgcgctggaggatcatgggcacgggcccgccggccttcaccgaggtggacaacccggcctcctttgctgacagcatgctggtgagggccgtaaactacaattactactattcattgaatgcctggctgctgctgtgtccctggtggctgtgttttgattggtcaatgggctgcatccccctcattaagtccatcagcgactggagggtaattgcacttgcagcactctggttctgcctaattggcctgatatgccaagccctgtgctctgaagacggccacaagagaaggatccttactctgggcctgggatttctcgttatcccatttctccccgcgagtaacctgttcttccgagtgggcttcgtggtcgcagagcgtgtcctctacctccccagcgttgggtactgtgtgctgctgacttttggattcggagccctgagcaaacataccaagaaaaagaaactcattgccgctgtcgtgctgggaatcttattcatcaacacgctgagatgtgtgctgcgcagcggcgagtggcggagtgaggaacagcttttcagaagtgctctgtctgtgtgtcccctcaatgctaaggttcactacaacattggcaaaaacctggctgataaaggcaaccagacagctgccatcagatactaccgggaagctgtaagattaaatcccaagtatgttcatgccatgaataatcttggaaatatcttaaaagaaaggaatgagctacaggaagctgaggagctgctgtctttggctgttcaaatacagccagactttgccgctgcgtggatgaatctaggcatagtgcagaatagcctgaaacggtttgaagcagcagagcaaagttaccggacagcaattaaacacagaaggaaatacccagactgttactacaacctcgggcgtctgtatgcagatctcaatcgccacgtggatgccttgaatgcgtggagaaatgccaccgtgctgaaaccagagcacagcctggcctggaacaacatgattatactcctcgacaatacaggtaatttagcccaagctgaagcagttggaagagaggcactggaattaatacctaatgatcactctctcatgttctcgttggcaaacgtgctggggaaatcccagaaatacaaggaatctgaagctttattcctcaaggcaattaaagcaaatccaaatgctgcaagttaccatggtaatttggctgtgctttatcatcgttggggacatctagacttggccaagaaacactatgaaatctccttgcagcttgaccccacggcatcaggaactaaggagaattacggtctgctgagaagaaagctagaactaatgcaaaagaaagctgtctgatcctgtttccttcatgttttgagtttgagtgtgtgtgtgcatgaggcatatcattaatagtatgtggttacatttaaccatttaaaagtcttagacatgttattttactgatttttttctatgaaaacaaagacatgcaaaaagattatagcaccagcaatatactcttgaatgcgtgatatgatttttcattgaaattgtattttttcagacaactcaaatgtaattctaaaattccaaaaatgtcttttttaattaaacagaaaaagagaaaaaattatcttgagcaacttttagtagaattgagcttacatttgggatctgagccttgtcgtgtatggactagcactattaaacttcaattatgaccaagaaaggatacactggcccctacaatttgtataaatattgaacatgtctatatattagcatttttatttaatgacaaagcaaattaagtttttttatctcttttttttaaaacaacatactgtgaactttgtaaggaaatatttatttgtatttttatgttttgaatagggcaaataatcgaatgaggaatggaagttttaacatagtatatctatatgcttttccccataggaagaaattgactcttgcagtttttggatgctctgacttgtgcaatttcaatacacaggagattatgtaatgtaatatttttcataagcggttactatcaattgaaagttcaagccatgctttaggcaagagcaggcagcctcacatctttatttttgttacatccaaggtgaagagggcaacacatctgtgtaagctgctttttagtgtgtttatctgaaggccgttttccattttgcttaatgtaactacagacattatccagaaaatgcaaaattttctatcaaatggagccacattcggggaattcgtggtatttttaagaattgagttgttcctgctgttttttatttgatccaaacaatgttttgttttgttcttctctgtatgctgttgacctaatgatttatgcaatctctgtaatttcttatgcagtaaaattactacacaaactagtaaaaaaaaaaaaaaaaaa

SEQ ID NO: 28524 - DNA, 4590 bp, Homo Sapiens
gggcagtcagagctgcctctcgccctcgctagctgggctcgcagcctcttcctccctccctggctcctggctttttgtttaaagcaacacccaccctccatccaggctttttttctttctttctttattggtagcggccaaaaagagttgattgctattgggatccgctgagtaaagacacgggcaggggtgcgcggaggtgagaaaactgaagacctggaagatttttttttccttcaaaaacccgtttccatccagtcttcagccagtccagtctactttaatcctcaccaggacaatggattaagtttctcttccctggaccagaagtcgggttcggacttggggcaaaatgaaggaaaaggccatgatcaagaccgctaagatgcaggggaacgtgatggagctggtggggagtaaccctccgcagaggaattggaaaggaatagcaattgcactgcttgtcattctggtcatctgctccttgatcgtcacctcggtcatacttctgacaccagcggaagataatagtctgtctcaaaggaagaaggtcactgtagaagatctcttcagtgaagacttcaaaattcatgaccccgaggctaagtggataagtgatacagaattcatctacagagaacagaaaggaacagtgagactgtggaatgttgaaacaaatacttctactgtcttaatagaaggcaaaaaaattgaatcattaagagccatcagatatgaaatatctccagatagagagtatgcacttttttcatacaatgtggaacccatatatcaacactcgtatactggatattatgtcctgagcaaaattcctcatggggatcctcaaagtctggacccaccagaagtcagcaatgcaaagcttcagtatgcaggatggggccctaaaggccaacagctgatatttatttttgaaaacaatatctactactgtgcacatgtcgggaaacaggccatccgtgtggtctccactggcaaggaaggtgtgatttacaatggcctcagtgactggctgtatgaagaggagattttgaagacacacatcgcacactggtggtctccggatggcacgagactcgcctacgccgccatcaatgattcccgtgtccccatcatggagctcccaacttacaccggctccatctaccccaccgtgaagccctaccactatcccaaggctggaagtgagaaccccagcatttccctacacgttattggcttaaatggacccacccatgatctggagatgatgccgcctgatgatccacggatgagggagtactacatcaccatggtgaagtgggccaccagcaccaaggtcgccgtgacctggctgaaccgggcgcagaacgtgtccatcctcaccctctgcgacgccaccacgggggtctgcacgaagaaacacgaggatgaaagtgaggcctggctccacagacagaatgaagaacctgtgttctccaaggatggccgaaagtttttcttcatcagagccatcccccagggaggacgagggaaattctatcacatcacggtgtcctcgtcccagcccaacagcagcaacgactacatccagtccatcacctccggggactgggacgtgaccaagatcctagcctacgatgagaaggggaataagatctacttcctgagcacggaggacctgcctcggagacgacaactctacagtgccaacacggtgggcaacttcaacaggcagtgcctctcctgtgacctggttgagaactgcacctacttcagcgcttccttcagccatagcatggacttcttcctgctcaagtgcgaaggtcctggtgttcctatggtgacggtgcacaacacaacagataagaaaaaaatgtttgacctagaaacaaatgaacatgtcaagaaggccataaatgaccgacagatgcctaaagtggaatacagggacattgagattgatgattacaacctgcccatgcagatactgaagccagcaaccttcaccgacaccacccactaccctctgctcctggtggtggatggcaccccgggcagccagagtgtagctgagaagttcgaggtgagctgggagacggtgatggtgagcagccacggcgcggtggtggtaaagtgtgacggccgtggcagcggcttccaagggaccaagctcctgcacgaagtgaggcggcggctgggcttgctggaggagaaggaccagatggaggccgtgcggacgatgctgaaggagcagtacattgacaggacgcgcgtggccgtgtttgggaaggattacggtggctacctgagcacctacatcctcccagcaaagggagaaaatcaaggccagacattcacctgcggctctgctctctctccaataacagacttcaaactctatgcctctgcgttttccgagaggtacttgggcctccatggacttgacaacagagcatacgagatgaccaaggtagcccatcgagtctccgcgctggaagaacagcagttcctgatcattcatcccactgccgatgaaaaaattcatttccagcacacagcagaactcattacacaactaattaggggaaaggctaattacagcttacagatttacccggacgaaagccattactttaccagctccagcctcaaacagcatctgtaccggtccatcatcaacttcttcgtggaatgcttcaggatccaggacaaactgctgacagtcacagcgaaaggggacgaggaggaggactaagctcaggtcgctctaagcacaaacgtggctctttctacaaccagatgcaaccgagggatttccctgccctccctcttccctcggaggggcggggcggggcggggccgggtgttccatagcatgtgtgtctcggatgcggaaggcagttttgcttgggaaacaagctccttccccggggtcatcactcacggcctccatggcaccagggacaacgctgtccccgcagcagcgcctcctcccggcgcccgagagaccggcacgccacggcccctcccccaaggaacagagcaaaggatggtggccgcaggccccacgcgagcccacaggacaccggcccctagattccagccaccaagcggaagcatgagacccgcccacactagcctctgtgttcccgttagggacatcacaccctgtctcacgtcgcagtgccatggacgcagcagttacagcaccattgttttagcagtgcgtgttcatatatgggcttgctacttcctgtaatgaggacgttcaacatggtgaggggctacaagaaaacgcttttctgtacagagtcgtactgtagctacgctaatggttaacctgatagaattaactcgtatttttctatggttttaacctgatgctccactgtctccgtcatggggttgttttgctgtttggggttgggccttgtttccctttcctttctccagtccacgtgtagactttgcgcttgtttggatgaagaagcagatcggaagtaactgctccctcctcaaggttgtcttcagacgtcttggagacgttcctaaacactgagggggaagacagccaatagcacccattaaaagaaatacctaaataaaacctctctcccactcagctatgctagggcttggctgtaggtgtgcactgtctatttacatccgtccttacaaccatccttgtcctccttggtaccgtatcaagctctttcccatgacatttggttaaaaaaaaaaaaaaaaaaaacaaaacaaaaaaacagaaaaaagacaaagcgtcaactccacccacaggcccgctgtgtgtgctcgggccacgggagtcctgagggttctgtgggcctgcgcgcatccctctcccatcgtgggggtggctccgtgaccttcctgccacgagcaggaggttgatgatgtgctacgttagccttgtaagatacacccccaccaaatgtgcagccggtgttcccagtgtatatttcattctcttgtatataaaggaagcaatgtgtgtcaggcctctgtgcagtcaacccagcctcctcccgccagtgctaaccccgtgttgagcctgcatgctgacactgtggccgatctggactctagaagtgctagtttgaaatatatccattactgtcatttccttttgagcttgtggacaagctgaatgtcaggactgacttctccagctcccagccctgcgggggtgtccttggcatcccatcagcagaggagatgcgtccctgttgcattttggcgtttggggctttgggtttatccacatgagctctgaacgtccgttatagttagggtgattggaaggtctccatcactgggtgttttaaaggtgattcaccaccatttgtgaaaggaccaacgtgctgataaacaggaccgatccgagtgctacatgactgtgcgtttgctatttcaatgggcctgaacaactacaaagccagctaggtctggaaggggaagccagctctggccacgacatctggtcggagggaagtggggatgtggcatggtagcgtctgttcatccatggaataaaacattattttaccaaaaaaaaaaaaaaaaaaa

SEQ ID NO: 28525 - DNA, 3545 bp, Homo Sapiens
gggcgctggtgagctttgcggagctgggcggtgccgaggaggaggaggtggcggcctgggtctgacgcggccctgttcgagggggcctctcttgtttatttatttattttccgtgagagaacgccgagccgtcgccgcagcctccgccgccgagaagcccttgttcccgctgctgggaaggagagtctgtgccgacaagatggcggacggggagctgaacgtggacagcctcatcacccggctgctggaggtacgaggatgtcgtccaggaaagattgtgcagatgactgaagcagaagttcgaggcttatgtatcaagtctcgggagatctttctcagccagcctattcttttggaattggaagcaccgctgaaaatttgtggagatattcatggacagtatacagatttactgagattatttgaatatggaggtttcccaccagaagccaactatcttttcttaggagattatgtggacagaggaaagcagtctttggaaaccatttgtttgctattggcttataaaatcaaatatccagagaacttctttctcttaagaggaaaccatgagtgtgctagcatcaatcgcatttatggattctatgatgaatgcaaacgaagatttaatattaaattgtggaagaccttcactgattgttttaactgtctgcctatagcagccattgtggatgagaagatcttctgttgtcatggaggattgtcaccagacctgcaatctatggagcagattcggagaattatgagacctactgatgtccctgatacaggtttgctctgtgatttgctatggtctgatccagataaggatgtgcaaggctggggagaaaatgatcgtggtgtttcctttacttttggagctgatgtagtcagtaaatttctgaatcgtcatgatttagatttgatttgtcgagctcatcaggtggtggaagatggatatgaattttttgctaaacgacagttggtaaccttattttcagccccaaattactgtggcgagtttgataatgctggtggaatgatgagtgtggatgaaactttgatgtgttcatttcagatattgaaaccatctgaaaagaaagctaaataccagtatggtggactgaattctggacgtcctgtcactccacctcgaacagctaatccgccgaagaaaaggtgaagaaaggaattctgtaaagaaaccatcagatttgttaaggacatacttcataatatataagtgtgcactgtaaaaccatccagccatttgacaccctttatgatgtcacacctttaacttaaggagacgggtaaaggatcttaaatttttttctaatagaaagatgtgctacactgtattgtaataagtatactctgttatagtcaacaaagttaaatccaaattcaaaattatccattaaagttacatcttcatgtatcacaatttttaaagttgaaaagcatcccagttaaactagatgtgatagttaaaccagatgaaagcatgatgatccatctgtgtaatgtggttttagtgttgcttggttgtttaattattttgagcttgttttgtttttgtttgttttcactagaataatggcaaatacttctaatttttttccctaaacatttttaaaagtgaaatatgggaagagctttacagacattcaccaactattattttcccttgtttatctacttagatatctgtttaatcttactaagaaaactttcgcctcattacattaaaaaggaattttagagattgattgttttaaaaaaaaatacgcacattgtccaatccagtgattttaatcatacagtttgactgggcaaactttacagctgatagtgaatattttgctttatacaggaattgacactgatttggatttgtgcactctaatttttaacttattgatgctctattgtgcagtagcatttcatttaagataaggctcatatagtattacccaactagttggtaatgtgattatgtggtaccttggctttaggttttcattcgcacggaacaccttttggcatgcttaacttcctggtaacaccttcacctgcattggttttctttttcttttttctttcttttttttttttttttttttttgagttgttgtttgtttttagatccacagtacatgagaatccttttttgacaagccttggaaagctgacactgtctctttttcctccctctatacgaaggatgtatttaaatgaatgctggtcagtgggacattttgtcaactatgggtattgggtgcttaactgtctaatattgccatgtgaatgttgtatacgattgtaaggcttatgtcactaaagatttttattctgattttttcataatcaaaggtcatatgatactgtatagacaagctttgtagtgaagtatagtagcaataatttctgtacctgatcaagtttattgcagcctttcttttcctatttcttttttttaagggttagtattaacaaatggcaatgagtagaaaagttaacatgaagattttagaaggagagaacttacaggacacagatttgtgattctttgactgtgacactattggatgtgattctaaaagcttttattgagcattgtcaaatttgtaagcttcatagggatggacatcatatctataatgcccttctatatgtgctaccatagatgtgacatttttgaccttaatatcgtctttgaaaatgttaaattgagaaacctgttaacttacattttatggattggcacattgtattacttactgcaagagatatttcattttcagcacagtgcaaaagttctttaaaatgcatatgtctttttttctaattccgttttgttttaaagcacattttaaatgtagttttctcatttagtaaaagttgtctaattgatatgaagcctgactgattttttttttccttacagtgagacatttaagcacacattttattcacatagatactatgtccttgacatattgaaatgattcttttctgaaagtattcatgatctgcatatgatgtattaggttaggtcacaaaggttttatctgaggtgatttaaataacttcctgattggagtgtgtaagctgagcgatttctaataaaattttagttgtacacttttagtagtcatagtgaagcaggtctagaaaataagcctttggcagggaaaaagggcaatgttgattaatctcagtattaaaccacattaatctgtatcccattgtctggcttttgtaaattcatccaggtcaagactaagtatgttggttaataggaatccttttttttttttttaaagactaaatgtgaaaaaataatcactacttaagctaattaatattggtcattaaatttaaaggatggaaatttatcatgtttaaaaattattcaagcactcttaaaaccacttaaacagcctccagtcataaaaatgtgttctttacaaatatttgcttggcaacacgacttgaaataaataaaactttgtttcttaggaaaaaaaaaaaaaaaaaaa

SEQ ID NO: 28526 - DNA, 2405 bp, Homo Sapiens
gactccagtcggtgttgagcacggcgagcagtctcaggcctttagtgatgatggtgcagtcagcctcagtttccaaagccggaaaaggatcctctagtagccacggtgtggcagctgctctgaaccaggacctggacccggacccaaagtgccatgtctttaatgttagctcccagcgatgccagatgggatcagcacagccctgcctctgctgctaattgttcctctaaagtaatcgccatgcgttctttgggcttcatctttaaaggaatgaagcaactgagattattctggaaaaccttttggcagttagtgaaattagagtacaactaagaacattttcagacctccactgtggatgacctgggtataatctcacaaatcgatgggactgcaaggattgtaaactgaaatgaacatgattatactctgttggaagagcctaagaggaaactgatgccatgagtttcagagagtaatgcttaaccccagttacacaggatgccgtcttgtgtttcctcttgtttagttacccactacagtgattttgtgatctgctaatgggttgccacccacaaccattgctttagcacttttacttcaaatcaatgaaggattgataaaagttctcctggtgtctccgcagagtgccttccaggaacagatctttgcatagaatatcagtggtttccttttttgtttcaaatagtggtcagaaaatacccagtgttgactcaccaaggcaatcagcttcctttttccctttttttgttttttttttaacattttatatttttgctttattttattttattttattttattttattttattttattttattttttgagacggagttccactctgtcgccaggctggagtgaagtggtacaatcttggctcactgcaacctccacctcccgggttcaagcaattctcctggctcagcctcctgagtgctgggactacaggcgcgtaccttctttagtagagactgggtttcaccatgttggccaggatggtctctatctcctgaccttgtgatctgcctgcctcagcttcccaaagtgctgagatgacaggtgtgagccatcagacccagcatttttttttttaatttaaatttaaattttttttcatttttttgagaggttttttttgttttgttttgttgttgttgttgttgttgtttttgagacagtcttgctctgtcacccaggctgggagtgcagtggcatgatctctgcaacctctacctcccaggttcaagcaattcttgtgcctcagcctcccaagtaactgggactacaggtgcacgctaccacacctggctgattttttttgttttagtagagacagggtttcaaccatgttgcccaggttggtctcaaactcctgagctcaggcaatccacccgccttggcctcccaaagtgctaggattacaggtgtgagccaccacacccagctattttttctttcgttttttaattttaaagttggggggggtctcaatttgttaccctggctggtctcgaactcccggacttaagcgatcctctggctccaagcccactaccagtctcaggtttctttactaaaagatcactacctttttttctcttatctgctgccatgtgagatgtggctttcaccttccgccatgattgtgaggccttcccagccacgtggaactgtaagtccaataaacctcttttgtaaattaaaaaaaaaaaatcactatttaagatactaggatggattgtgactgttgaggagtacttacatatcctacatttgactacattatttccaaaccaagtattccatccaaaggaacatactgctatcatagagaccaaggagggactgtttaaggttgccaaggtgaagcgagctgagaggctttgtcctcgtgccagtaactctgaaatctctcttaattcctgctgtccaggcagcagaatgccatggtttccccaagtaggtagctgctttagcagttaaagcccaaatgtctgttctgttgatcagaggtctctgaatttctgaagtggtgtttcgtttctggtgactgagttaatcctttacaatccctcttgtaaagtgtgctaatagaaagaatccacctttcaaagctgcagaacccgaccgtgccctaaattgaccaacgtaactgatgtgcctcaggaagtctcttgccagctgtccctgtgaagacccccctcctcccccccagctgctgccttgcacactgaagcatctcagactgtgcaaagccgtgtagtcatcaagacagtaaatcccagggcttggttaagtgctgtgtgataacttgtttggatgagacttaacttaaaaccacttacaataaacttgggaaactaaaaaaaaaaaaaaaaaaa

SEQ ID NO: 28527 - DNA, 3505 bp, Homo Sapiens
ggaccaagatggcggaccttgattcgcctccgaagctgtcaggggtgcagcagccgtctgagggggtgggaggtggccgctgctccgaaatctccgctgagctcattcgctccctgacagagctgcaggagctggaggctgtatacgaacggctctgcggcgaggagtcctaatctgcagctgattgagggagatgcaaagcagctggctggaatgatcacctttacctgcaacctggctgagaatgtgtccagcaaagttcgtcagcttgacctggccaagaaccgcctctatcaggccattcagagagctgatgacatcttggacctgaagttctgcatggatggagttcagactgctttgaggagtgaagattatgagcaggctgcagcacatattcatcgctacttgtgcctggacaagtcggtcattgagctcagccgacagggcaaagaggggagcatgattgatgccaacctgaaattgctgcaggaagctgagcaacgtctcaaagccattgtggcagagaagtttgccattgccaccaaggaaggtgatttgccccaggtggagcgcttcttcaagatcttcccactgctgggtttgcatgaggagggattaagaaagttctcggagtacctttgcaagcaggtggccagtaaagctgaggagaatctgctcatggtgctggggacagacatgagtgatcggagagctgcagtcatctttgcagatacacttactcttctgtttgaagggattgcccgcattgtggagacccaccagccaatagtggagacctattatgggccagggagactctataccctgatcaaatatctgcaggtggaatgtgacagacaggtggagaaggtggtagacaagttcatcaagcaaagggactaccaccagcaggtgagcaggggaagctacaggtagggtttggtagcagctttagcgaggaacactgagtagaataaattgtggggtttgaaaaagtgaaaaaaaaggtgcagacaggagaaaaataaatgctaagcgcacactggcctgcatcttgcccattgacagcttactttggacttgaggtgttgtcgagatgatgatggcctcagttcaagaccaaaacggaaataaaaagagcttcctgaaaagaacacagcagaagtagtaaaccagttctctatcacaaaatgtgcaacagtgccctctaatgatataatgacaattctatttcttgaggtcctattaagtgtccaagtaattgtctccaatttccccttcattcctaagatgttaaagataacgtttgctttttcagaactttgttttttccttcttttgagcagagaaagtaaaagtacgacatagaaataggagtggcctcatacaattgtatttctagaactccagactaggagactataaacagtagtctattggaacaccattagcatgacttttaagcacagtaatagaggtgagtattattagcatccaacccaaaaacaaatctttggcctgtcatcctgaaagcccactgctggcttgaagggaaggtaaacctggtaaacaaactaaatctaaatgttcttgtatgccaaaagtttggagtgaccagcaagaggccaatagatgtgggggtggggaagaatattctcattcctgtggtatgttgcagttccggcatgttcagaacaacctgatgagaaattctacaacagaaaaaatcgaaccaagagaactggaccccatcctgactgaggtcaccctgatgaatgcccgcagtgagctatacttacgcttcctcaagaagaggattagctctgattttgaggtgggagactccatggcctcagaggaagtaaagcaagagcaccagaagtgtctggacaaactcctcaataactgccttttgagctgtaccatgcaggagctaattggcttatatgttaccatggaggagtacttcatgagggagactgtcaataaggctgtggctctggacacctatgagaagggccagctgacatccagcatggtggatgatgtcttctacattgttaagaagtgcattgggcgggctctgtccagctccagcattgactgtctctgtgccatgatcaacctcgccaccacagagctggagtctgacttcagggatgttctgtgtaataagctgcggatgggctttcctgccaccaccttccaggacatccagcgcggggtgacaagtgccgtgaacatcatgcacagcagcctccagcaaggcaaatttgacacaaaaggcatcgagagtactgacgaggcgaagatgtccttcctggtgactctgaacaacgtggaagtctgcagtgaaaacatctccactctgaagaagacactggagagtgactgcaccaagctcttcagccagggcattggaggggagcaggcccaggccaagtttgacagctgcctttctgacttggccgccgtgtccaacaaattccgagacctcttgcaggaagggctgacggagctcaacagcacagccatcaagccacaggtgcagccttggatcaacagctttttctccgtctcccacaacatcgaggaggaagaattcaatgactatgaggccaacgacccttgggtacaacagttcatccttaacctggagcagcaaatggcagagttcaaggccagcctgtccccggtcatctacgacagcctaaccggcctcatgactagccttgttgccgtcgagttggagaaagtggtgctgaaatccacctttaaccggctgggtggtctgcagtttgacaaggagctgaggtcgctcattgcctaccttaccacggtgaccacctggaccatccgagacaagtttgcccggctctcccagatggccaccatcctcaatctggagcgggtgaccgagatcctcgattactggggacccaattccggcccattgacgtggcgcctcacccctgctgaagtgcgccaggtgctggccctgcggatagacttccgcagtgaagatatcaagaggctgcgcctgtagctgcctggatgagcacacctggctcatcacacttgcaggcctgttccctaaggggccccagccaaggagctgagcgaggctgtctggcttgggggagatctgacagcccagacctttctacggctggcagcagagaaacaaagtctggacccactccatgctctgccctcagacctggccaggtgatgctctgggggcagcatctccccaccgagagaagcgggctcctaatgaggtgggaaagccacggcaggcagcgagcagcccaggccagctttctgcatgggtggtcagtctcttgccctcaaacactacagcaaacaagctacccctgccagtcctagacaacttgggtacatctggggacctagcagttaggcttgactttgaggagaggctgtgatgtttatgatccctgaataaagctactccttggagaaaaaaaaaaaaaaaaaa

SEQ ID NO: 28528 - DNA, 3662 bp, Homo Sapiens
gggagcgaaccccagcgtccgccgacatggcctggaccaagtaccagctgttcctggccgggctcatgcttgttaccggctccatcaacacgctctcggcaaaatgggcggacaatttcatggccgagggctgtggagggagcaaggagcacagcttccagcatcccttcctccagctctgaacatgaccagtgcctccagcttccagatgctgcggggtgcagtgatcatattcactggcctgttctcggtggccttcctgggccggaggctggtgctgagccagtggctgggcatcctagccaccatcgcggggctggtggtcgtgggcctggctgacctcctgagcaagcacgacagtcagcacaagctcagcgaagtgatcacaggggacctgttgatcatcatggcccagatcatcgttgccatccagatggtgctagaggagaagttcgtctacaaacacaatgtgcacccactgcgggcagttggcactgagggcctctttggctttgtgatcctctccctgctgctggtgcccatgtactacatccccgccggctccttcagcggaaaccctcgtgggacactggaggatgcattggacgccttctgccaggtgggccagcagccgctcattgccgtggcactgctgggcaacatcagcagcattgccttcttcaacttcgcaggcatcagcgtcaccaaggaactgagcgccaccacccgcatggtgttggacagcttgcgcaccgttgtcatctgggcactgagcctggcactgggctgggaggccttccatgcactgcagatccttggcttcctcatactccttataggcactgccctctacaatgggctacaccgtccgctgctgggccgcctgtccaggggccggcccctggcagaggagagcgagcaggagagactgctgggtggcacccgcactcccatcaatgatgccagctgaggttccctggaggcttctactgccacccgggtgctccttctccctgagactgaggccacacaggctggtgggccccgaatgccctatccccaaggcctcaccctgtcccctccctgcagaacccccagggcagctgctgccacagaagataacaacacccaagtcctctttttctcactaccacctgcagggtggtgttacccagcccccacaagcctgagtgcagtggcagacctcagctctctggacccctcctacagcactagagctaaatcatgaagttgaattgtaggaatttaccaccgtagtgtatctgaatcataaactagattatcatagttatctagtttatgagtcataagctagatttgattcttcaaagaagaaaagtcagtgagcaaatttaaaccagaactaagcattatattttctttttttttttttgagacagagtctcgctctgtcgcccaggctggagtgcagtggcacgatctcggcggctcactacaacctctgcctcccaggttcaaatgattctcctgcctcagcctcccgagtagctgggattacaggtgcataacacacctgggtaatttttatagagatggggtttcaccatgttggccaggctggtctcaaactcctgacctcaggtgatctgcctgcctcggcctcccaaagtgctgggattacaggcgtgagacaccacacccagccataactaagcattatgttttctaaaacttctaagatcctccctaaacccgtctggagacatgggttttagcccagactctgcctcaaactcattgtagctcccagcacattacccagttgctctgggccttggtgttatgctctgggaagtagatgttgatgctgtggccttagtgccttctggccccagcattccatgggcctgtgatcttgaccaacctgagaaaacagtaacagcccatccactggaaatacccctctgcccacagcaccacccttctgtgctgttttttttgttgtttgtttgtttcttctttttgagacagagtcttgctctgttgccacgctggagtgcagtggtgtgatctcggctcactgcaacctcccgctcccaggttcaagcaagtcccctgagtagctgggactacaggcgtgtgccaccacatccggctaattttttgcattctttaatagagacggggttttgccatgttggccaggatggtctcaatctcctgacctcatgatccacctgcctcagcctcccaaagtgctgggattacaggcatgagccaccacgcccagccttttttttttttttttttttttcttgagagacagggtcttgctctgtcacccaggcacagcttactgcagccttgaactcctgggatcaatcagtcctcctgcctcagcctcccgagtagctaagactaacaggtatgtaccaccatgcctggtttattgttttatttttttggcagagatgggtctcactgtgttgcccaggctgatctcaaactcctggcctcaagcgatcctcccatctcagcctcccaaagtgctgggattacagacctgagccaccacacctgggcaacagagtgaaacctgtccctgttttcctgctcttactctcacctctgaggcctcctctgcctggaagagattacagggaaattccaggcagcccttgtcaattgtttttatgaattctttacctgttccttttaaagacaaggaaactgaggcccaaagttctaagttgtttggcaaatggagtctcctaccctcagctcctgcaaggacctgggggacccccaggtccagcagccacatgattctgcagcagacagggacctagagcacatctggatctcagccccacccctggcaacctgcctgcctagagaactcccaagatgacagactaagtaggattctgccatttagaataattctggtatcctgggcgttgcgttaagttgcttaactttcattctgtcttacgatagtcttcagaggtgggaacagatgaagaaaccatgccccagagaaggttaagtgacttcctctttatggagccagtgttccaacctaggtttgcctgataccagacctgtggccccacctcccatgcaggtctctgtggggtctttgggatggatctcctagggctgggctggaagcctcatgtactgttgtcttctaggtaaccaccctgaagagaaggggtggcatcaggaaccgcagggaaccaagcagcctttggtccagtgctgctccttggaacagttgagtgtggcctcaaaccattctcctgggtagctcagtcataaaacaccgaatgcctgcctcaaaatagcctctgagggaagggagctgttgacaagtgaagccctcaggttgtgtgggattccagcaggttattacagcttgtggggggagggagggtccattccaccagctttgaatcccagggtcccctcagcttcactgggccacagtgtctgtcccaggaagaagcaaatggacagtgaggatgatggagagactacagctgccttgtctaaaacctgggatcttaaaagtgttattttggcttttattttttaaaaaaagaaaaggaaaattggcaaaaaaaaaaaaaaaaaaaaaaaaaaaaaaaaaaaaaaaaaaaaaaaaaaaaaaaaaa

SEQ ID NO: 28529 - DNA, 4075 bp, Homo Sapiens
gcttcctcctgcccgtagtagccatggcggccatgagtttgttgcggcgggtttcggttactgcggtggcagctctgtctggccggccccttggcactcgcctcggatttgggggcttcctcactcgtggctttccgaaggctgctggtcaagctgaactagcagaaattccagaaggctatgtcccagaacactgggaatattataagcatcccatatcaagatggattgcccgtaatttctatgatagtcctgaaaagatatatgaaagaacaatggccgtccttcagattgaagctgaaaaggctgaattacgggtaaaggagctggaagtgcgaaaattgatgcatgtgagaggagatggaccctggtattactatgagacaattgacaaggaacttattgatcattctccgaaagcaactcctgacaattaagcacttttttctccaaatacaaagtatattctctttattggaaaataaattaataaatatattctgtatttttgctctccgtgaaaaacaaaagagcctctgacattactgtctctcagtgttggttcagattgaggcttttgtttgaggagtttggcttccagtccccaaagaaggtttaaaatgtactaataaaaactggagaaataggaatttgtgaactcctaaaattgtagcaactttgaaaggttagtgttttatttacctgacaaatggaagttatagaagtctaataatgttaagcaccagtaattatagtattttgtacaaatgcctgtactgtagatgtctgtattattgaggggcaactcaggattttaagttccataaagtattgaaccaactctaaaatgttaactccttaataaacagattctcagtaaacaaattttaaagtttataatgctttcatggttttttttttttgccatgtattgttcttttttaaactacacacagacacacagacacgtacacacacacacacacacacacacacacacacacacacacacacgctcttttcctagatgcaatctctgggatcccttagagtccttttttggggaagtagttgcactaggtaatgtgattcctgcagagattataaaatgtgagtaaaagctaaaaatgactcatttattaagcatttattgtctgctagacactatattaaataactgcattttttaacattattttcttttcttttttttttttttcttttttttgacgaaatcttgcactgtcacccaggctagagtgcagtgccgcgatctcggctgcaacctccgcctcccgggttcaagcaattcttgtctcagcctcccaagtagctgggattacaggcacccaccaccacacccggctaatttttgtatttttcagtaaagactgtttcgctgtgttggccaggctggtcttgaacttctgacctcaggtgattggcctgtctccacttcccaaagtgctgattacaggcctgagccactgcacccaacattattttcaaaatgacaagaggtagtatttagtacctgaggctcagatgttaaacacaaactcagtatttacaaaaataaacatttaaaacatttacacttcaacttccaaaatggctttttaccataaacattcaggattttcaaacctgtaacagcttatcaatgcatctcatcttagaagtatgttttacattcttcataaaaataaaaatgaacccaggcttcctaagattcaggccagtgggtctccacttaaggccaaatggagaaataattttttgctgcctaaacacacaagtgaattgaaaagccacaggccattcattcaacaaataactttattatttttattgataatgtacttgtaatgtgctattttgatacatgtatgcaaagtataatggtcaaatcagggtatttgaatatacatatatttcaaaatatagttatatatttcaaaataagatatagcaagttagaagtatatataagtatattattatatgttattgttaactataatttacctactgtactatcaaatactagaacttattccttgtatctaaatgtattcttgtaaccattaactaacttttctgaatttcctactctccccttcccttcccagccttgtaaccacctttctactctgcctccatgagacccattttttaatctcccacatatgagtgagaacattcaatatttgtctttctaggcttggcttatttcacttacattaatgacctccagtcccatccatgttgctacaaatgacagaatcccattctttttcataatattgtccatacataccacattttctatatccatttatctgttgatggacacaggttgcaaagggattgctggattgtatgataattctatgtgtagtttcttgaggaaccttcatggtgttcttcatagtggttgtactactgtacattcctaccaatggtggatgagcgttcccctttctccacatcctcacaagcatttgttattttttcttttttttcaaatgaacattttaactggggtgagatatcttaatgtggtattggtttacatttccctaattatggttgagcattttttcacatatctaatggccattcacatgtcttcctttgagaaatgtctatacagatctctggccctttttttaaattttttttttttttgaattggggtcacccagtctggaggtgatctgggcttccacatcctgggctcaagtgatcattccacctcaggatgacccaaatagctaggaccaaaggcgagtgccaccatgctcagctaatttttttgtattttttgtagcgactgggtttcaccatgttgcccaggctggtcttgaactcctgtgctcaagtgatccgctcaccttggcctctcaaagtgcaggtactttaggcgtgcctggcctttttgtccattttatttttttgagatggagtcttgctgtgtcacccaggctggagtgcagtggtgcgatctcgactcagtgcaacctccgcctcccaggttcaagcaattctcctgcctcagcctcctgagtagctgggattacagatgtgcaccaccacacccagctaatttttttgtatttttagtagagagggggtgtcaccatgttggccagggtgatcttgaacttctgaccttgtgatccacccaccttggtctcccaaagtgctgggattacaggtgtgagccactgcgcccagcctgtccattttttaatcaggttatgggttttttgctattgaattgtttgagttccttatatattctggttatgaatcccttgttagatggtgtgttaggccattcttgtgttgctataaagaaaatcttgagtctgggtaatttataaagaaaaaaggtgtaaatggctcatagttctgcagactgtacaggaagcatggcaccagcattgcttggcttctggggaggcctcaaggaactttcactcatagcagaaagcaaagcaggagcaggcacatcacatggcaagagagcaagagagagaggtggaggagatgccacacactgttttaaacaaccagatctctcaggaactcattgttgttagaaaaggaattaaaagaaatcaaagagtgtgtaagcagaaactcagttgtacgtaagaaaacccaattccccctgagaaagagaaagagctggagtcctttaaaaattcactgcctgtttttctggtggctagtgagtgttagctctcctcccttcccaggcattgtgaagaccctgtttccctagctgtgcagctgcaaggtcactagacagataaactcaagtcgcaaaacatgtttttccttgaaaagtaagaaatgatgtaatgcatgtcttgactgaataactgtctttgtttcttgcttctgcaatatgcttccccctgcacagatctccccctgccccacgaaatgcttaaaagctaacttaactctttgttcagggctcagtcctttggatgttaatctgactgggccggagcacctaaataataaatattctcctgaaccccaaaaaaaaaaaaaaaaa

SEQ ID NO: 28530 - DNA, 4770 bp, Homo Sapiens
gggacttccggtggtgccaaagccgtttccgtggaatcaggccggctgaatggaacaaaagtgggacttttaaaatgttgccctgtaagaagagaagaactacagtgacagagtccctacagcataaaggcaatcaagaggaaaacaacgtagacctagaatcagccgttaaaccagaatctgaccaggttaaggacttgagttcggtgtcactatcctgggatccaagtcatggcagagtagctggcttcgaagtacagtctttgcaggatgcaggaaatcagcttggtatggaggatacatctctgagctctggaatgctcacccagaacacaaatgtaccaattctagaaggtgttgatgtggccatctctcagggaatcaccctaccttccttggagtcttttcacccccttaatatacacattggtaaaggaaaactccacgctactggctcaaagagagggaaaaaaatgacactcaggcctgggccagttacccaagaagacagatgtgatcatcttaccctaaaggagcctttttcaggagagcctagtgaagaagtcaaggaagaaggagggaaacctcaaatgaattctgaaggggagataccttccctgccatcaggcagccaatctgcaaaaccagtaagccagcccaggaaatcaacccagccagatgtttgtgcctctcctcaagaaaagccactcaggactctgtttcaccaacctgaggaagagatagaagatggtggactcttcattccaatggaagaacaagacaatgaagaaagtgagaaaaggagaaaaaagaaaaagggtaccaagaggaaacgagatggaaggggtcaagaagggaccttggcatatgacctgaaactggatgacatgcttgaccgtaccttggaggatggtgccaagcagcataatctaacagcagtcaatgtccgaaacatccttcatgaagtaatcacaaatgaacacgtggtagctatgatgaaagcagccatcagtgagacggaagatatgccaatgtttgagcctaaaatgacacgctctaaactgaaggaagtagtggaaaaaggagtggtaattccaacatggaatatttcaccaattaagaaggccaatgaaattaagcctcctcagtttgtggatatccaccttgaagaagatgattcctcagatgaagaataccagccggatgatgaagaagaagatgaaactgctgaagagagcttattggaaagtgatgttgaaagcactgcttcatctccacgtggggcaaagaaatccagattgaggcagtcttctgagatgactgaaacagatgaggagagtggcatattatcagaggctgagaaagtcaccacaccagccatcaggcacatcagtgctgaggtagtgcccatggggcccccgccccctccaaagccgaaacagaccagagatagtactttcatggagaagttacatgcggtagatgaggagctggcttccagtccagtctgcatggattctttccagcccatggatgacagtctcattgcatttcgaacgcgttctaagatgcccctgaaagatgttcccctgggccaattagaggcagagctccaagctccagacatcactccagatatgtatgaccccaatacggcagatgatgaggactggaagatgtggctggggggacttatgaatgatgatgtggggaatgaagatgaagcagatgatgatgatgatccagaatataatttcctggaagacctcgatgaaccagacacagaggatttccggactgaccgggcagtgagaatcaccaaaaaggaagtaaatgagctgatggaagagctgtttgaaactttccaagatgagatgggattctccaacatggaagatgatggcccagaagaggaggagtgtgtagctgagcctcgtcctaactttaacgcccctcaagctctacggtttgaggaaccactggccaacctgttaaatgaacaacatcggacagtgaaggagctatttgaacagctgaagatgaagaaatcttcagccaaacagctgcaggaagtagagaaggttaaaccccagagtgagaaagttcatcagactctgattctggacccagcacagaggaagagactccagcagcagatgcagcagcacgttcagctcttgacccaaatccaccttcttgccacctgcaaccccaacctcaatccggaggccactaccaccaggatatttcttaaagagctgggaacctttgctcaaagctccatcgcccttcaccatcagtacaaccccaagtttcagaccctgttccaaccctgtaacttgatgggagctatgcagctgattgaagacttcagcacacatgtcagcattgactgcagccctcataaaactgtcaagaagactgcgaatgaatttccctgtttgccaaagcaagtggcttggattctggccacaagcaaggttttcatgtatccagagttacttccagtgtgttccctgaaggcaaagaatccccaggataagatcgtcttcaccaaggctgaggacaatttgttagctttaggactgaagcattttgaaggaactgagtttcctaatcctctaatcagcaagtaccttctaacctgcaaaactgcccaccaactgacagtgagaatcaagaacctcaacatgaacagagctcctgacaacatcattaaattttataagaagaccaaacagctgccagtcctaggaaaatgctgtgaagagatccagccacatcagtggaagccacctatagagagagaagaacaccggctcccattctggttaaaggccagtctgccatccatccaggaagaactgcggcacatggctgatggtgctagagaggtaggaaatatgactggaaccactgagatcaactcagatcgaagcctagaaaaagacaatttggagttggggagtgaatctcggtacccactgctattgcctaagggtgtagtcctgaaactgaagccagttgccacccgtttccccaggaaggcttggagacagaagcgttcatcagtcctgaagcccctccttatccaacccagcccctctctccagcccagcttcaaccctgggaaaacaccagcccgatcaactcattcagaagcccctccgagcaaaatggtgctccggattcctcacccaatacagccagccactgttttacagacagttccaggtgtccctccactgggggtcagtggaggtgagagttttgagtctcctgcagcactgcctgctgtgccccctgaggccaggacaagcttccctctgtctgagtcccagactttgctctcttctgcccctgtgcccaaggtaatgctgccctcccttgccccttctaagtttcgaaagccataggtgagacggagaccctcaaagagaagaggagtcaaggcctctccctgtatgaaacctgcccctgttatccaccaccctgcatctgttatcttcactgttcctgcttccactgtgaagattgtgagccttggcggtggctgtaacatgatccagcctgtcaatgcggctgtggcccagagtccccagactattcccatcactaccctcttggttaaccctacttccttcccctgtccattgaaccagtcccttgtggcctcctctgtctcacccttaattgtttctggcaattctgtgaatcttcctataccatccacccctgaagataaggcccacgtgaatgtggacattgcttgtgctgtggctgatggggaaaatgcctttcagggcctagaacccaaattagagccccaggaactatctcctctctctgctactgttttcccgaaagtggaacatagcccagggcctccactagcagatgcagagtgccaagaaggattgtcagagaatagtgcctgtcgctggaccgttgtgaaaacagaggagggggggcaagctctggagccgctccctcagggcatccaggagtctctaaacaaccctacccctggggatttagaggaaattgtcaagatggaacctgaagaagctagagaggaaatcagtggatcccctgagcgtgatatttgtgatgacatcaaagtggaacatgctgtggaattggacactggtgccccaagcgaggagttgagcagtgctggagaagtaacgaaacagacagtcttacagaaggaagaggagaggagtcagccaactaaaaccccttcatcctctcaagagccccctgatgaaggaacctcagggacagatgtgaacaaaggatcatcaaagaatgctttgtcctcagtggatcctgaagtgaggcttagtagccccccagggaagccagaagattcatccagtgttgatggtcagtcagtggggactccagttgggccagaaactggaggagagaagaatgggccagaagaagaggaagaagaggactttgatgacctcacccaagatgaggaagatgaaatgtcatcagcttctgaggaatctgtgctttctgtcccagaactccaggtgagagctggagaatattctcaagtatttcgtggactcagtaatatgtatcacttattgatatgccacctgcttgcttgctgcactatggatagtcctaaaatcatttgtatttgatttgtgaatgcattatgggacatgattgtggagttgaggtgaaatgagatggaaaggatgaaattttacttattatattaaactcgtttacacattaaaaaaaaaa

SEQ ID NO: 28531 - DNA, 3880 bp, Homo Sapiens
cacactattcccacatcttatctgggaagattagaaatacagatgtaatatggaagcttcaacagcatgggggtggtgatagtgtcctatttgcccttggtaaaatattaaagcgtatttcttaacccaaagagtgattggttatatgaatatatttgaaaaagttaaagcaaatttgcaaacctttacaaaatcatgtatcaattttatgctatccagtttttacgtacccatgtgtcaacatttcatatatccagttctttgggtgctggttcactttttttcatttattcaaattcagaaaaatacggacggatctaatgttaaattaaccagaaaccctggaacattcatatcttgagagggaatttgctactcttttacttttgggatttcattataaaataggctcattttatacatatgtcctgtggtctgtcttccagagtgtgctgtaatcataagtctctagcaaagagtggagggtggagggtgtgtagaactccactcagcctcatggatacatctacaagtctctcaacccatcctgttacagttctccatgagagtcacctcacacttggaaaagagggaggttaaagcagagtattgttggcagccagctatgcccatcctcttgtaaataactttccaacacacccatttccttgccttaaggtgcaggttcctacttctacaaaatttcaaatgattgcaggtcaaaaacctttggagttactcacaaataataataaaatttcaaataactagggtctacttgtccatcaagatgacattaccagtggaacccacctgttaattttaaagtagcttcagaacccaacaaaaattatgtaagcctggttaaatgtccttttttcttcttgcctctaataaaatcaggatcttcggccttgatactaaatatgtgtatatttagttatgatggtacttgtagatgctcacatttccagttccaaactcgcccgtactttttatgtgcttcaaaatattggacacatttctgttaatatatgatttctgtatccacaaaccgctgtttgcttatgctgagtcaatttagaagttaatttccaatctagtctcaactgcaatgcatttaaaataggtaaaacaagtaaatgagtttgggacattttgagattaatgttactgcccacttgactgtcaatttcaaatggctcctaatgcaaccaaaattataaccaatgtagcatgtgtaggaaaggtatttttaattatttaaaatcattgtgtatattacagcagtatgaggaatgcctggctaaagaggattttttaaaagatgaagaatggttttgcttgtattatataggcttactgagtttgtgagcagcataaaaacaatcattccttaattcttcattgtggaactgaaatatttctgtaatgcattttttaaaaggagactcctagacacagctgtaatagtgggaatagaaatgtagagcttttctcataacacaaaaccagaaaataattttcagcactttgacttactctatgtaataaggaaaaaaattgtttccacaaagttgaactatgtagtaatatttggtaacatatggcatggccactttatatcacagaatgtgtgtcaagttgcaaagcatacttgggccatagcagacactaagaattaaaactcttaaatcagtgaaacaaaaactaatgggcagcattctctctgtttggaatgggatcagtatacaattaatacaatttaattttacacattccctaagacaccatttttaagttacagtcacatgagtgtttgtataaatttaagtcaatgcttttagcctaggcaaagctaaatacaaggtttttggggttttcttttttcagctttattattgaagtattacaaacttaacatcagataccaatgtgtaaaaagtactattgggtccttaagggctctatcagggagttgaaatttcatacgctttaccaggttacttgtaaaaaatgaacagctgtaagacatttcaaaaccattgcagacacattgttaaaatgcagccatttgataatgaaagcagaaaccttaagttttacctaattattgcactaaatgtaaatgataacataaaattaagtgtgcattttaaacagattctatttcccacttactgcttagcatagaaaaagagctatggttagaggagtgaccagcaagatttatttcagatggaaaaggggtgagaaagtggaagcaccttactgttagagcatgttgcatctatttagtgctactgaacaattcagtagttatttctgaactttgctgcaaagtgctctttagttaaagcacattaagaagggtcactgcttaattgctttgtaaaatgaagcaatggtattttttatccgatatagtgtaatttaaaagttttcctacaaagtgagtttatattgttgcctaaactatgttatgtaagcaaaggttttggaaaggcgggagggagtctagattcggcgagagtgtgcgtttgtgtgtgtgaatgtatgaaaagtttccccattgggttattcttaagatgtgtttattgtaaagttttctacgttttgcccacagtaaatgtacaacttcgcaattgtaggatttaattgattgaattccaaatttatactgtctcttcccttctgcagagacattatgccactgtaaggtgcatgtacagaaaatacctctgaggttgacttgttaaataactgatgaatgttatttcacactgaatctcaaagcagtcatttgttttgcgggttaggggaaagttttgttttttgctggtgttttttgttgtttttaattaggcacactaagagtggctaaatttgggggaattggtggataggaaagaccttgaaaagtgatgtgtagatgaaaacacaaggtatggatgttggttacagagttcagttttaacaagggaaatttggggatttttttttttttacttgcatgttctatgggtagctatcaaagggtgtaacaaattattccagcttttcccaatactaattatattggttttaaaaagtctgcataatcactaggtggcattttcccttcatttgtgaaccaagaggggtaaatgatgctacccatacagtgacttctgagttctttaactttgacagaatctccattgtttcattgaatttctcattgtattatatgtctttccaagtgtgcaaactataatatgtagttaatgaaaaatggaaggctgcagattattttgcatgaataattaattgcccattagggctaaggagactgacatgatttttatcggttctgggtaaatgaaaattttaatggaaaactcattcaccatttactagctttgtgcattattataaaaggtagaagcaaaacactagcacattgtgctttgcttggcttgtaaggatggctttagtaccattacattaaatggacagtgtgcacagtgtattgtaaatgccaactcttgcaaatttacaatacttaaatatgttcaattaacatcctaaagtattaaaagtacagaggaaaaactaagcaagcatttatagcaataccatgaaatctccagtaatcgttttgactgttgccttttgctctttagtgcagcttttctgcattgtaattgtattgctttgtatttcatgttttttacactcatgacttcagagttaagtacttgtacaccaagtattgcaatcacctttctcttgttgtacatgcaatgtaacaacctacagttttggtgcttttaacaatattcctctttttctttaataaaggatatttatttgaattaaaaaaaaaaaaaaaaaaaaa

SEQ ID NO: 28532 - DNA, 4150 bp, Homo Sapiens
gcctctggtggaaaagttcatggaaaacaagtgcttgaaccaagtgtttctgaaaataggacatggcctcaaaaaacagattttggtgatactgaggaagaagtcaaaggacctgagaagatcattaatgagcatgttgacaaaacagtagttcatccaaaggttaaacggaactctttgactgctagtctagacaaactcctgaaggaagcaactggaacttcaccctctcccttgcaagccaagttggcgcccgttatcactggaaccaactctaagctggaagaggggagattttttggaaaagggatagaacagagtcacaatacttcagctgataagagagaaatactagctccttttccagtgagagatgaaacttttggaaatacagctctcctcaagaaagctgaaagtggtgagtgccagctaagcacacagaatttgattcaggtggctgcagaagattctcatccattggatccaacttcccagctttccagaaagggttcttttggggatgtggccagccctccccaagatatgctttttccccagggtgctcatcttgttccccaggctagggtacacccttctcaaatggaaatttcggagactgtagagaaagtcattcttccacccagacctgtattgaatgatgtaagtgctgcattacagaagctgtgtggagaagtatggttaagttatccagctggaagggaagtaggtcctggagaagtgaacccagaatttcctgaagcagtacagccagtatgtagccccctaaatcctccaggagtgatatcaccatgggctacgatggacaccatagttccagacaggaaggatttttattcctccaatgtagttcctgataaaactcatgaagttggatcttatttagctgcccaaatgtctccatcagaccagacgcttagctcatttgcttccattgttgctcaatatggcaaaggcctccctcaggaagtggaagaaattgtgagggaaacaattgttcaacccaaatcagagttcctcgaattcagtgctggcttagaaaaactactgaaggaagaaactgaaaccttcccctcaaaatatgaaagtgatacagggaatctttctccatcaaagttaataggtagtacagaggagcccaggcgagccacttctgaatgccatcctgaggaattaaaagaaacagtagaaaaggccgaggctccattaataactgagagtgcttttgatgctggttttgagaaacttcttaaagaaataactgaagctcctccttatcagccccaggtgtcagtgagagaagaaactcacgagaaggagtcctcacagtcagagcagaccaggttcttggggacagtgccccatttttacagggcagcctcacagacctctgaaatgaaggataaaagtaatggtttggaatctcaagtcaaccaatgtgataaaatgttgggaggagacgcacttgtgactgatttattggtagatttttgtggttccagaagtggagttgagatccctagaaccccacaactttatgtggctcatgaaatagggaccattaaaactgtaacccccccagaggacagggacagtgaaagtggggttgcagggggacaagggactcttcaggaacctggctttggagaggcttctgaagcaattagtgtgtccagaaataggcaacccattcctctcctgatgaacaaagaaaactctacaaaaacaagtaaagttgaattgactctagcatcgccatatatgaaacaagagaaagaggaagaaaaagaaggtttctctgagtctgatttttcagatggaaacaccagttctaatgcagagagctggagaaatccttccagttcagaagaagaacccagtcctgttttgaaaactttggaaaggagtgccgctaggaaaatgccttccaaaagtctagaagacatttcatcagattcatcaaatcaagcaaaagtagataatcagccagaagaattagtgcgtagtgctgaagatgtttccacagtgcctacacaacctgataatccattttctcaccctgacaaactcaaaaggatgagcaagtctgttccagcatttctccaagatgagagtgatgacagagaaacagatacagcatcagaaagcagttaccagctcagcagacacaagaagagcccgagctctttaaccaatcttagcagctcctctggcatgacgtccttgtcttctgtgagtggcagtgtgatgagtgtttatagtggagactttggcaatctggaagttaaaggaaatattccgtttgcaattgaatatgtggagtcactgaaggagttgcatgtttttgtggcccagtgtaaggacttagcagcagcggatgtaaaaaaacagcgttcagacccatatgtaaaggcctatttgctaccggacaaaggcaaaatgggcaagaagaaaacactcgtagtgaagaaaaccttgaatcctgtgtataacgaaatactgcggtataaaattgaaaaacaaatcttaaagacacagaaattgaacctgtccatttggcatcgggatacatttaagcgcaatagtttcctaggggaggtggaacttgatttggaaacatgggactgggataacaaacagaataaacaattgagatggtaccctctgaagcggaagacagcaccagttgcccttgaagcagaaaacagaggtgaaatgaaactagctctccagtatgtcccagagccagtccctggtaaaaagcttcctacaactggagaagtgcacatctgggtgaaggaatgccttgatctaccactgctaaggggaagtcatctaaattcttttgttaaatgtaccatccttccagatacaagtaggaaaagtcgccagaagacaagagctgtagggaaaaccaccaaccctatcttcaaccacactatggtgtatgatgggttcaggcctgaagatctgatggaagcctgtgtagagcttactgtctgggaccattacaaattaaccaaccaatttttgggaggtcttcgtattggctttggaacaggtaaaagttatgggactgaagtggactggatggactctacttcagaggaagttgctctctgggagaagatggtaaactcccccaatacttggattgaagcaacactgcctctcagaatgcttttgattgccaagatttccaaatgagcccaaattccactggctcctccactgaaaactactaaaccggtggaatctgatcttgaaaatctgagtaggtggacaaatatcctcactttctatctattgcacctaaggaatactacacagcatgtaaaagtcaatctgcatgtgcttctttgattacaaggcccaagggatttaaatataacaaaatgtgtaatttgtgactctaatattaaataagatatttgaacaagctaggaaaattgaatttctgctgctgcttcaaagaaaaagctgccccagagcattaaacatagggtattgttaagaagcaaaatgttcttgtttgccatcatgtgtttcacaccacaattctgtgccacagttaagagggtctggtacccttgcaggacctttgtaggttgtgggaaaaagtcgcagaaagatactcaaagtggagcagggaatggagacagacatcagtgatgataaaaaaaaaaaatggaccttaagaaactatttactctgtaatctctaataaaatatggaattccatattagggcaatgagactgaaactactggtgtttttctgccttgagaaaacaaacagttaaaacaagcctcaaatgtattttagtgccacccactggccataggtacaattcagttgttggcttgttttgacttaattctaaaataggtctcaagcctgtatttttatgagtttatttttttaaaaccctgcatatatatgattgtttttcttataactttactatatgaaagcagcataagagtagccacaaacatgttttgcaacaaagttttaattagaatgtaagttgctcagttatactgttcttcttatgtatgtaaaattttcgtattttgtaaaaacccttagaataaattatcatttgatttaaattgtgaaaaaaaaaaaa

SEQ ID NO: 28533 - DNA, 5100 bp, Homo Sapiens
ggggattcgtgacgacggcggcggcagggacagcaggagcagtggtgttgtcagcgcggccgtcggagacatgggagacccggggtcggagataatagaatctgtccctccagctggccctgaggcatctgagtcaacaacggatgaaaatgaagacgacattcagtttgtcagtgaaggaccattacgacctgttcttgaatacattgatctggtcagcagtgatgatgaagagcctagcacctcttatactgatgagaatattaaacgtaaagaccatattgattatcagaaggataaagttgctttaactctggctcgtctagcccgccatgttgaagtggagaaacagcagaaagaagagaagaatagagcattcagagaaaaaattgattttcagcatgctcatgggttacaagaattggaatttattcgaggacattctgatacagaagcagcaagactgtgtgtggaccagtggctaaaaatgccaggactcaaaacaggcacaattaattgtggaacaaaaagttcattccgaagaggaggccacacgtgggtgtctgggaaaccaattttatgtcctataatgcactgtaacaaggagtttgacaatgggcaccttctcttaggacatttgaaaaggttcgatcactctccatgtgatccaacaattacactacatggacctttcttcagctcctttgcttgtgtagtatgttataaaaaatttgttactcaacaacaatatagagatcacctttttgataaggaagccacagatgatggacataacaacaaccttcttcctcagattattcagtgttttgcatgtccaaattgcttccttctttttagcagaaaggaggagtgttcaaagcatatgtctggaaagaatcatttccatcagagtttcgaactgggtgataacaaaggaattgcacatccaatatctttcccatcttttgcaaagaaacttttgatctctctgtgcaaagatgttccctttcaagttaagtgtgtggcctgccacaagacactgcgttcccacatggagctcactgcccatttcagagttcattgtcgaaatgctggacctgtagctgtagctgagaagagcattacccaggttgcagagaaattcatattaagaggttattgtccagattgcaatcaagtctttgtggatgaaaccagcacccaaaatcataagcagaattcaggacacaaagtccgagtcattaactcagtggaagaatcagtcttactctattgccacagcagcgaagggaacaaggatccttcttctgacttgcatttattgttggatcaatcaaaattttcatcacttaaaagaaccatgtctattaaagaatctagctcactggagtgcattgccattccaaaaaagaagatgaatttaaaagataaaagccatgaaggtgttgcttgtgtccagaaagaaaaatcagtagttaaaacctggttctgtgaatgcaatcagcgattcccaagtgaagatgcagtagaaaagcatgttttctcagcaaacacaatgggttataaatgtgtggtctgtggaaaggtatgtgatgattcaggggtcattcgtttacacatgagccggattcacggaggggcacatttaaataactttcttttctggtgtcggacatgcaaaaaggagtcaacaaggaaagatactatcatggcacatgtgactgaatttcataatggacacagatatttttatgagatggatgaggtagaaggtgaaactttgccatcatcctctacaacattggataatttgactgctaacaagccttcatcagctattactgttattgatcattccccggcaaatagttctccgaggggtaaatggcaatgccggatttgtgaagatatgtttgattcccaggaatatgtaaaacagcactgcatgtctttggcaagccacaagtttcatagatacagctgtgctcaccgcagaaagccttttcataagatagaaacattgtaccgacattgccaagatgagcatgacaatgagataaagattaaatacttctgtgggctttgtgatcttatctttaatgtggaagaagcatttctgagtcattatgaggagcaccacagcatagattatgtatttgtgtcagaaaaaactgaaacttcaattaaaaccgaagatgattttccagtaatagagaccagtaaccagttaacttgtggttgccgtgagagttacatctgtaaagtcaacagaaaagaagattatagcagatgtctccaaatcatgctggataaaggaaaactgtggtttcgctgcagtttatgttcggcaacagcacagaatttaaccgacatgaacactcatatccatcaagtgcacaaagaaaagagtgatgaggaggagcagcagtatgtaatcaagtgtggcacctgcaccaaagcatttcatgatcctgagagtgcacagcagcatttccatagaaaacattgcttcttacagaaacccagtgtggctcattttggatctgaaaaatcaaacctgtacaagtttactgctagtgcctcacatacagagagaaaactgaaacaggcaataaactattcaaaaagtttagacatggagaaaggagttgagaatgacctaagctatcagaatatagaggaagaaattgttgagcttccagatttggattacctgcgaaccatgactcatatagtctttgtagattttgataactggtcaaacttttttggtcatctaccagggcatctaaaccaaggaacatttatttggggctttcaaggaggaaacaccaattggaagcctccgctcaactgtaagatttataactacctgaacaggattggatgcttcttccttcatcctcgctgtagtaaaagaaaagatgctgctgattttgccatatgtatgcatgctggccgtctagatgaacaactacccaagcaaattcctttcaccatcctctcaggagatcaaggttttctggagctagagaatcaatttaagaagactcagaggccagctcatatactaaaccctcaccacttagagggagatatgatgtgtgccttgttaaatagcatatctgataccaccaaagaatgtgacagtgatgataacatgggtgccaaaaatacttcaataggagaagaatttatatccacagaagatgtggaattagaagaagctattagaagaagtcttgaggaaatgtaattaaagatattaccacacaacatcaagtggccttgaagagactgagataacgaattcttgagtttgttttctaaaggagaccagaaatccactattacaaatgtatttgaaaacatgtttttgctttcatatgttcaaaatctgatctttgttttgtatttttgtgctaatgtgcaaacatgtacagaagaaatagaatacatgttcatgcaaatataaattatgtattctaatataggtgtaacagtttcccagttaactttgaatttatatatttagatttaaaggattaaaaaaaaggaaagctcttgacagttgtttcccaaatagcattagttctttaattttatttgtactgtacaaatgatgctagtttatttttttagcagtgaaaatgaatataaaaaaggtgacataggtcaagttttccataaattctacttctcatgtggcactattatataatacctttgagatctttgtttatgtttattagaagagggtaatggaaactgatcatggaaacatttaaaattttatcagcaatgttctttgtgggtgccatgcatatgtaaattattgctttaattagagcagcacattgctaaaataaaaaatacaccttaatttttaagaaataatttaaatgaaacaatttccattccttttacctgcttagacttttatgtgacttgtatggtctcctggttaaagggaatggtgtcagaatatttgcataaaattatttttcataacagtccttttttatatattgatgtaaacataatattcttcaagaaataatgttgaaagcctactcaggaataatcttccttaactctttaaatttttatttcatgtgaagtgttttcagtttagttattcactgaattgtcagtttccttcatttggtattacatatttaattcttaaatattgaggccccattgtgagtaataaaaaatacgacataagtagaagactaagaagggcttgtcatattatctttgtgtatatgcttcatgttatttaaccagaaatgtcttatctctaaaaatttttagtagtaattatttaccaaacttaaaaacatttctataaatataaagcttttctttatatttaagacaaaatataaaggctagaatttggttccttctctgtaacactaaatattttagtgtgaaattgaatttttttattactatagtcttttcaatctataatttgtgtttttaatttcttgatatgtcacttctgttcctccctgcttgcattttttaaaaactagacattgtggcttgagaatttatcaatcatctttccgaaatgaccacattgtgcttttagtttgtatgtttaagtggtcaagcaaggctctaggagatagtcactgagctggaccttaaacacatctgcaggagctcacaaaatgggagcaaaagaggcattccagaaagaagagtagttaagcagatgtgggggcagggcaagaggagacagcaccttgttgccagagattctacacaaaggtgtgatggacactgatgctctattaagaagcttttgtggtgtgtgtggtagagaataattaaggcttctgataagacaggaaagggatatttcatcatgactgttaagaaaaggtaactgggttgtttaatgttttaattgataattgtcactgatcgtatttctacttgttaaataattaaaaatcatcttaaaattcatactttgactttaatttagacacaaggagatgtaatcgctgtgtaacatcagagaaagctatatggattatcgtcagaagtaaatgtttctaacattgaaaaaaaaaaaaa

SEQ ID NO: 28534 - DNA, 6984 bp, Homo Sapiens
ggatgagaagttcaagctctacctgaccatcatcctgctcctgggtgccgtggcatgtcgatttgtccttcactacagggtgactgacgaagtcttcaacttcctgctggtgtggtattactgcaccctgaccattcgggagagcattctcatcagcaacggctcaagaattaaaggctggtgggtgtctcaccactacgtctccacattcctgtccggagtgatgctgacctggcctaatggacccatttatcagaagtttcgcaaccagttcttagcattttccatttttcagagctgcgtccagttcctgcaatattattaccagaggggctgcctctaccggctgcgggccctgggggagaggaaccacctggatctcacagtggaagggttccagtcctggatgtggcggggcctcacctttctcctgcccttcctcttctgtggccatttctggcagccctacaatgccgtcacgctgtttgagctctccagccacgaggaatgcagagaatggcaggtgttcgtactggcgttcaccttcctcatcctcttcctcggcaacttcctgaccacgctcaaagtcgtgcatgccaagctccagaagaacagaggcaagacaaagcagccgtgagcctcgggctcctgtgccctcggcccggacttcagactgcagggggctcccgggctccttcccagcagccctctcaggcccgtggcatcgctgggagagggcccaggccctggtcccccagtggaccccagtggtctagaggaatgtgagccccgcctgtccgcacagtgtccgcccacctatttatgacatatttaatgctgggtcccccatcgtccctggaacccgaggcctcactcctgtgcttgaaggtggctgaggccgggccagtcttcctggggatggggcctgaagcctcagggagcccctctgttcccactcctgtcatttgaacccctctgggtggggtttggatgtgcctcgcggggttggatttatgctgacctgctacttaccaggcccaggctggggtggtgtgaaccctcagtgtcctgtggcgcccccaccccggggccactctgcttctgctgtgagccccctcctcgcccaccctgccacgtggtgagggttattttaagttctcagagacccaccgcgtctgcctcgtgctcttcttgcccctggagcgctgggggcatcctgagtcaggctgtgagaagattcgccaccagagggcgccccgggccctgggtcgtccaaggggacaaggacgttcccgtctgtgcttcggggttcctgacccccccatcctgcagcccaccttcctgcagtgtcgtggcaggtacttggagagtgggaccaagacccttggcccctgtggaggggaaccacctcccccctccttcccagagcttctggatgttgtgggagggaggtgggggtgcctggcaggttcacccccaggggccgcaccctgaggcggggtcagagccactgggcatcgcttgggtgagattctgcattcgacgggaggcagagaggccaccaggtttggctgagtgctctgccccaccattcatatatgggcctcagctccccctaactgtggccctacaaatccctaggccagacctcacagcagtgcccacaggcatgccttgtttagccctcctcaaggaattttaaaatttttaattactttttttttttttgagacagggtctgttgcctaggcgggagtgcagtggcatcataggtcactgtagcctccgcctccagggctcgagggatcctcccgcctcggcctctggagtagctgggaccacaatcacacaccaccatgccctgctccttttttttttttttttttttgagatgggagtctcgatctgttacccaggctggagtgcagtgacacaatctcagctcactgcaacctctgcctcccgggttcaggtgattctcctgcctcagcctcccgagtagctgggactgcaggcgcgtgccaccatgcctggcttttgttttgttttgttttgttttgtatttttagtggagacagggtttcaccatgtttgccaggatggtctcgatctccttgaccttgtgatctgcctgcctcagcctcccaaagtgctgggattgcaggtgtgagccaccatgcctggtcaccctgctactttttaatactttttagtagagatggggtctcactatgttgcccaggctggtctccaactcatgggctcaactcatcctcctatcttggcctcccaaagcgctgggattacaggtgtgagccactgtgcctggcctgattacatttttaaaatgagatttccccacccctacagtgagattccacataaaaatccagatttctgctttccctagaaaaacggacctggcaacattcccgtggcacaggacgcctactctccagttgccacaggccctgccacccccctgcccttcattctggtctcctttctggtcctttttaggcacctgcgtttgccctagattaggagtcagctagctgtctgtaaagggccagatggcaactattttgagctttatgggccaggtggtttgtggcagctactcttcacctgcagccccagagcacaaggcaatgcagaaaggaatgggtgttgctgtgttccaataaaactttatttacaaatcaggctgtggccagatgaggcccacaggctgtagttgttggacctctaccgtagaccatcatgaggcctgtggttctcgagaacaagaactccttggttgattccccagggtacggcagggccttgggaacctgggtgggttggggagggtctcagaaggctccttcctttggcaacctgacttcttggaagctcaggtttagctgacgccccagcactgggccaggggggctgaggcaggagatatggggaaggctaggagttgcctgaagccattatcccatcttaggcgacaccgactcctaggcgccctccagagccaagcagcttgcgacttctggtaggcaccggaatcccctgggatgcttgttttaaaagtcctgggccgggcacggtggctcacgcctgtggtcccagcactttgggaggctggggcgggtggatcacgaggtcaggagttcgagaccggcctggccggcgtggtgaggccctgtctctactaaaaatacaaaaattagccggacgtggtggtgtgcgcatgtggtcccagctgctcgggaggctgaggcgggagaatcgcttgagcccgggaggtggagcttgcagtgagccaagatcatgccactgcactctagcctgagtgacggagtgagactctgtcccaaaaaaaaaaaaaaaaaaaattcccagaccctcggccccagaccttcccaaaggaggctcagggattaggtatctggctgttggtgacacaggtggtctatgaaccagttctgagaaactgtcccgcgtggacagggggtagatcccatcagttctcaaaggaggccaggatgtctcgcctcctgaactccacaggctggtagaagcggggcttgagggacagcaggttgggagcttgaggactaagtgggccagtcctgtcctaccacagtggggggaacagtccacagaaaacttgctcatgaccacactgggagccgactgttcttcccatcccaagtctctgacactgggggctttgggtgaaaccttaaggagatggtcagatgggtggtccagggtatacttttaacaactgagaagccattttttctgccccctgggcacatgtgcccagctctgcaaagacagtggccaagttgaagacaagtcttccatgtggggtggagatgggaggggtgggtgccaggctgcagcctgtgtcctcctgataggcccagccccctcggtggcctccgtgtcctgggggaaggaaggaaggagctggaggatacagtggtgctctatctcgggagcccagggaggcagggacacaggagtggccggcttggggcgcccgcgtggaacagtgccaggtctacgtttacccactaccagatagactttttcatttcaagcataacttgagtctgcactggggagacactcgtggtgggggtggctgtgatgagggcacttgcgagtcccgacaacagacactggctcctgcacccacatcaccaccatgtcccaggggcagcctggaggggagtttgtggtcagagccccagccaggaaaggagagagttccagaatgttccaagagtctagccgcagccccagacaccatgagctggagggtcgggatggggcagcctccctggtgcaatcggcacctgggcccccgggccctgtcagtgctgtcgtgaggtctgtctgccctgggtcagagcagcaggcagagccggcgcttcttctgccgttgcgccttcttcagagcgctgagagccaccttggcggcctcccggaagacgtcctccacattctcccgaaacttggcggaacattccaggtagagagcagctcggatctgttcgcaggcgctcaggccctgggtggggggaggagccagcattaggtgaggggccctggaggtctcctagcaccacctggtgggtttgggactggctctgaggactctgcagggatggaggccttggtttgggcctgtctgtctcctccatcctggctgcccctcacagtgtgtgggtggaatggagggccagggcagtgcagcccgcaggttggaagaagccctgtccaggcccccaccctggcctctctccagctccgggcagggaggggctgaatcctgagacccagggttggttcccccaggtgtgtctcccaggcctgtgagaagagttggaggcctcaagacagaaaggacttccagccacctctctcccttctctgaaagtaccatttaggcaaattaatttgcccttttatttatttatttttgagatggagttttgctcttgttacccaggctggagtgcaatggcgcgatcttggttcatcacagcctctgccacccgggttcaggcgattctcctgcctcagcctcccgagtagctgggattacaggcatgcgccaccatgcccggctaatgttgtatttttagtagagatggggtttctctcatgttggtcaggctggtctcaaactcccaacctcaggtgattcgcccgcctcggcctcccgaagtgctgggattacaggcgtgagccactatgcccggccggatttgcccttattaatggttatttcttgtgaaagtttctttttgcctttgcattccttttattctgtttattcccccatgcctcacccaaagagttgcacggtcaattggcccgtgaaggggacgcctactttcaaacaaggcagacaggacacgacaggacggcggctcatagcacagactttggattgcagtggatgggaccagatcctggctccacttctcgctagctgtgtggccctgggcaagctgcttaacctctctgggcctcagtttctccccctgtaaactgggggatgtgaacagcgcctgcctccgagtcctaaggattgggagtagtcgtgtaaagtgctcaggtccacaggccatcaatacgtatagttaaaaattattcttagaatcttgcttccctcagctccctgaaaggccactaaggcaccccagttgcagaggccaaaggtccgggaggcttcacagccacggctgtgccccagggtcttggccccggcccacctgcatgtaggtgatgggctccagctgggcggcccggagcttccgcagctgctccttgtccttcctcaggtctgtcttgcagccgatgagcaccatggggatcccgcggcagaaatgcgtgacctcagggaaccactgtggagggaggaggcgggatcaggggtgcggccgggcccagatgtggggccaccacccaggaggccggcctcaccttgatgaggacgttgtcgtagctggtgggattcatgacgtcatagcagatgagcacgaggtgggtgttctggtaggacaggggccgcagccggtcatagtcttcttgccctgaaagcacagagcagcgggggtcaggggacgtcccctccctgtctggactctgacgggtgaaggggaaggggccaggcaagtgaccctgccttagggcctcaatttcctcatctatacaatgggcagcaagccaggagtgctggcacaggcctgtggtcgcagctactcgggaggctgaggccggaggatcgcttgagcccgggaggtcaaggctgcagtgagccgtgatcgtgccactgcactccagcctgggtgacagagcgagaccctgtctcttaacaacaaaacccatgagcggcagccccccagtcctggatggtggtaaagaatcctcaagatcaaacccacgcagtgctgagagcttggcctgattctagggctggggctggagaaactgctagagatgatgccgatagccagtgtgatccccctgccctggtggtcaagggcagagtgcagactggaaccctcccctccccaaagattcagacctgttgggctgagtgggctcatagtgttcccaagtcctgagaggctggtgtctggcttcagcctccagcttctcaggttctgatgcagtcagctgagttccctgcctattcttgcaagcactaggaggagggtggtgggttgctgggaacagcaccgagcgccctccccacccagattcacagagcacactccccgggggatactttaatccgaggccgtgacgccttgctccgccccgagacgagctgaatccaaatacggatctaggcttgagcttggttgggtttgcttttttcttcttcttctttataaacaattctttgtaactttttgtattgacagtttcaaacttacagtaaaattgcaacacgagcaaaaaaaa

SEQ ID NO: 28535 - DNA, 4728 bp, Homo Sapiens
tctctttgctaaaacgtaacaagagtcacctttgctccagttcttaacaagttcctcatctctatctgagaccacctctgcctggatttcattgtcaatatcattataagcattttagttaaagccattcaacaaatctttaggaaaggtcacagccattcagcaagtctctaggaagttccaaactttcccacattttcttgtcttcttctgagcgctccaaactgttccaacctctgtctgttacccagttctaaagtcacttccacattttcattatctttcagcagtgccccactcttctggtaccaatttactgtattagtccattttcacgctgccgataaagacatacccaagactggacaatttacaaaagaaaaaggtttaattggacttacagttccatgtggctggggaaggctcacaatcatggagaaagacaaaaggagcaaattatgtcttacgtggatggtggcaggcaaagagagagagcgcttgtgcggggaaactcctgttattaaaaccatcagatctcatgagactcattcactaatcatgagaacagtgcaggaaagacccacccccataattcaatcacctcccactgggttcctcacatgacacatgggagttgtaggagttacaattcaagatgagatttgagtggggacacagctaaaccatattaggaagaggtgtcagtcactaggaggacttaagagctggggttgctgttgtgaatctccaggcagttaagggaacagaccttgtaagtcaaatgaaaaccaaagtttaaaacaaagcttttcctgagcaccagaaaccagcaatataagcaccttccactgagatcattccctgtgctaccgaaacagagcctcctcagaggccagcaggattacagactacaaaacctcatttcctggtcctatcaaaacatttgaatgctgggtcagagggaaaggtctgtcctacagaaaataatataaaaggaaattgtttactgtaaatggagaaaacatgtatattaatacagtatatcaaagcttaggatgacaaaatgttttaaattctgaaaatgtaagagccatgaaagctgctgtatttggcctgcagatttagggtgataagaagattaataaaaacatttcttaacttttcaagctcgattttctttttttatttgaaaggtcatttctaacagccaatcttctgaaatcaaactgtctacaatttcactttatgcccttgatgaaaaggggcagattcagtgtgaacgtgaattacctagaggcactagggaggaacatgtatttttctccatagggggagaccctggccagtgttttctattttaaaaccattcttctagtgccaggagagatgtacacttttttctagttctatgagagaaatatttaccctaaaatatccacagaaaactcctggtgtaaaatggttatctttccccagttatccgcatgtgccacctggtctcaggcccctgggaagctggccagggctgaagcattgtgtggcagagggtccatggtcacacggtgtgcaggtgctgctcatgggaactggaggaggaccacatgaggcaagagaaaaatagtttcctaggggactgtttggctaataatatctgtgaaaaatttaaactttgggagctaacagtagacattttatcattataatgatgttctcaataaacacctttagacacaaatgagcccagcatatctggttagacaagagattctcaccttgagctggcattggggagaataaaagtaggaagaagcttggcaacagaactcgaaatctacattagaagtggaaggatttggaagtgattttgaaatacttcacaggcagcagtcttcattaccagttgggctttgctagtgattgtgctgtgatttctagactgttaggaaggccagtgcaactgaattcattgagtcctttggccatgggcctgagtcattcctcttgctgctgtgctgtgataaaaggaagagcagacacattggagatagaagcttagacctgttcccggagagctattctggaccagggaataaggagtcggcttttcaatctcacctgcagttcccttgtgaacccagggtgaaaatagttatgaaatgcagagatctttatgctgttacctggtgctgaaaataggatgaaatactttttaatgaccaaagccatgtcaaaatggatagttgtctttgttagtccttttgtgtttcttttggtgctgatagttttttttttttcagtatttgtgtaatttaaattatctttgcagaaacctgctccaccaaaacctgaacccaaaccaagaaaaacatctgctaaggtaagaagtgctgtttcccacttttggctttttaaacaatgaataaattataattccctacctcagaatcattcaaagaaaggccgtatttaatgatccaaactgaaaccattaccactgttacgggcttgcttaaaggcataaagcacagttttctgcgttaataggagtgtgttttccatttggtcagtgaggcacgggaagtcagagatgttgctctgagaagcctcatgtccgaagggggtttggcagcagcctcgtgaacatgcggttcatgcggcacacagcggggatgagtttgggccctggcagcactgccccactatgggaggaatttgggaaggggcttctgacttcatctaactggatttcgcaggccagtctgaggtctaataataataatataataatgccagcaggtaatattagcatttataaggcccttatagtatggcagataaggttgattgctttactcatatgaccttcacatcaactctgttgaagtagatacaaatatcctgttttgcagatgaggaaactgaggtacagaattcttagggaacttacccaaaatggcttttctgcactctgccctttggtattgtcccatgtgaattgtttaaaacttatgtgtatagtggcatgagtaggtgatttcagaaacagaactcacttttgttgtttggtcttaaaattaggaacttttcttcatctgggcttcatttccctgcaccttcccagctttctagtcatgcaagccacatgtctccacgtgaggggttcattggaaagcagccacagagccaccccctggctgggttcttccccagctctgcttcctccttccccaagtcctgcagctgctctctccatggcagaaccacttctccccttactggaggggaggtccactgaacaaatccaggagaggaatcattgtgttttccacagaagagaaagtacactggactttctgtgcaacctgttactacattttcacagagactcatatttgtgcagtgtaactcagttgaaacccagcaaaattaggctcccgtgtctccataaaggccaccatgatggtaacggttgtacttcaccttgcgtttggacagaggctgattgattttagccatcatcacaccgtgtctaacattctctttcactgtgctttgatcctctgttagaaagaacctggagcaaagattagcagaggtgctaaagggaagaaggaggaaaagcaggaagctggaaaggaaggtactgcaccatctgaaaatggtgaaactaaagctgaagaggtactttccataaatacctcccactgattgaatcagtgtctttaaagaaatttctcaatccttcagccggtgatagcacgttcttaatgtctctttttattgcctgtaatgttattgcagatccacatctctcgctcaactgttaatgtctcaacctccagaggcaccccacccagcacactgtcagtaaaggggcagattgaaacagtgagagttaagggtacagtagaaaattctgcatgtttgcagtgactagaatcagatagtagtgtggtggtttttttttttaatcattatgaagagtgggagcttgcaggtaaggcttctgtggtggtttgaaaagcagaaagcaataaatgaaacaaagtgtttgtgtaatatattcctgccttgtcttcttcactcagagttgaaataggttttgcagtaaagctggaaaaaaaaagaaaacaaatgttcaaaactgtgtgtgttggtgggtggaatttcctttgcttatagtagtttcagtagtaactatatgtttttttttcctttctttttcacaggcacagaaaactgaatctgtagataacgagggagaatgaattgtcatgaaaaattggggttgattttatgtatctcttgggacaacttttaaaagctatttttaccaagtattttgtaaatgctaattttttaggactctactagttggcatacgaaaatatataaggatggacattttatcgtctcatagtcatgctttttggaaatttacatcatcctcaagtaaaataaatatcagttaaatattggaagctgtgtgtaagattgattcagcattccatgcacttgctttaaaatttagtcctgtgcatactgtggtgtttttactgtgcatatttgaatttttcatgcagtttttctagagcaataatcagtggtgcttttgtacctaggttttatgtgattttaatgaaacatggatagttgtggccacctgctgactatttgtggtttaaaataaaaggtttacttgtctgcagaaaaaaaaaaaaaaaaaaa

SEQ ID NO: 28536 - DNA, 6266 bp, Homo Sapiens
acatgtttttttttttttttttttcttttttttttatttcgacattttattgaacttttcatattacacaatttacccaaaacatttaaagtaacagtaagacaaacttaaaaaaaaaaaagtcatacagacaaaacatctctaggtgaggcaatatgtaaatttcattgtcaaatcatgattttgttactctgctatacaacttggtaccatatcaatgctactaaatgactcaagagtaagacattatgcattccgtttatatgagaaaaagagattatttacaactacttgaaagagaaacagaaatgccaacaacagtatcattcaaattctagtgcaatgtcaattgttaccaagagatcttatttgcttatataaattttgcaaataattcaaacctggctatcttattagaagctgacaaagtatgcttttctgttgcaaaagatcagtggacaaaaatcctccacaacctcagctgataaaacaaatttaagcagcattttttttttccatttcctgaacagatgtactaatacttaggtagaaacactaaagcatttgtactcaatcaataaagtgaatgctttgtgcagttttaacaaagctgctgctaaaaagacagttgtgagtggtcaggtatatctgcaatagtaagcaagttcttacctttccagttctgtatgcttctgaaaacaccagctaaggtattaaatacccattttcaagtgaccttgtttttactatttcatatttatgacatctagtgctgagattctgggggctttaatagataaccttattaacccagataattttttttggagcccataaaataaaattgagaatggcatttcgggaaggtctacatatatgtatttagtaagttaattcgtaagttcactttacatagtaaattaatatttaccagtttttaattgctttcagtgtacttgactcaaattaagagaccctacaatgtaaggcaagtgtatcacaagctccatggccaaaatttggcttatataagaggaccagtgggcctgtggaacatttaatagaatcttttccataatgctattagttctactgaattaaaaaatattattttgagctgttattatcttaagaagtatagcccatggatatttgatttggcacccatgttaaagaaaaataacaatttttaaaagggaacgagcgtatcttacagttatctcactcattcttttcaaaattcagtgcaacatatttggctagcttaaatttaagtgcgtgaccgttcaagattttgtttcaactaatttggagtggttgtaaaaaattattcatattttactttctacatttcaattttaatgttaatttgtattctctttctccaaaaaggaaaacaagatcaaccttatttgtgtatggttcagcctatcggtcttataattattctacaataaaatgaatttatgtaactaactattttcatgctaacttccaaaaaatatcctgaaatatttaatttttagctaaacaaaggatcctacagattttcactagtaaatacttgattctattcagattcttttctagaaatttttcaaacttgaaattttctggtttactcttatctgaaactatcctaattgaaaacaatttaaatgctattggttggacaaagtaaaccttaatctaaaatagtcaccataaaatataaaatgtgatcagtggtgtttaattttattttcccccttttggtggaatttaaaaatggaaaatgtaggtgtttcagtaactacacacacacacacacgagagatttgctacttattactgtttttacactttttggatatcacttttttgttccaacactactatttgcaaaaagtaaccatttctgtgacatttagcaagtaaaatgaatttctattcgtatgcattcttggttggacaatatcagtgcaaagtcactgtgcttcagagcgctaaatggttcatgatacaactgtgattattcacgtgaagacatgaaactttaaaatgtctaatgatagagcagacacatatcattttactacacaaagtgcttaacccaccaaattacatttaggaatagacaaaatgtttttattaaactgattagtaatttttttgcttattatatgttgaaatgtacaaatgtactttttcccctcacccataaaatacaagggcacatttcctttaaggtttggatttttcttcagtattcatctaaagaagtttaaataaaaggtgataagaataattgcttttccctccacgtacatctattttggaaaacaaaatttaaagcaaaacctgaaagaaaataaaaacggaagccattatttagtggtgactatatactagacaagaggcacaaattcccagatgaattttaattttgtttcctctcagacaagccattcagaaataaaagggaaatgaggttcatttaagtacacaatttgtaaatgtggaaacagtagtaattgtcatgattattttatattctctcttaacagtggctctaaaaacagcccaatgattcacacaactagcaaagcaaaccaaactctataaatgtatgagaaattaagttgctagcactgaaacactgggtttggatatggacaaggatgttgtctctgacttgtatcttttgggtaccttggtttttgatattttgatgttcaagcagaaagcgcgtgactttgttttatgcaataaggtgatgtaagtgtagaaaatgtgtagggatgaaggaaattccaagttacatgtgtatacataaatggctttataaaatacatatatatagccattaagatagttacatagggacaatgcaatttaaaacatttatactcctgcttacagattgccaagtctaatcatcccttaagtctttttcaataatgacataatttatttgcttaaaggtaaaaacctcctgattgtattaaggacattaatatactacactgtattaaggatactataccaacatcaatctaggaggtaaaataaacgtttggcaaatattgaagtcagatggaatagattcaactctataaagttttgttttagattttataataaaattttgcttctgcctacgatcatgtttacttcagcatgagtgctacactaactagaatttaataagtgttatttttattgagttttcaaatttggaaggattttgatccaaaatatatacctatgccttaaaaaacaaagtcaagataatcagtatgggctttagtaccaattttactttccaatccattttcttccccagtatttcacttgtatccctcataacttcatagcaaattatccagattatatcttccagactactcagtgaaggaacctaaatctcaaatgttattttgaagaagtgtagagtaaataattttggtaatctgtaaaacagctgcatgcagtgtgtactgtattataacagcaccaaaccctttataaaaaccaaacactccttcctcctgccttatggtattgatacagtctctcattccctcatattgtgtattaattggaagcacttcatagccaaggtctgtattgtcaattattgtgcgtgttccttgaatgtgaaggcggtgcaaaactgtttccaatgggtaaagtataacgtcagaacaaagactggcagcaaagttagcaataagttctggaaaataagcatccaacatactctgcacagggctagtgctctcagctaggtggctattgtaagtctttctctttagaattagtaggacaaacttctgaataactgagctgatgatgtaatgaagaactccatgaagcaccgtagggaagatcaaggaaagaagcggaagaagtcgtttgctatgaggcactcccatgcctatcactcttccaattccttctttaacacactccaaaatgccagtattatctcgaattatctcactctgcactgtttcaatcagacttgctgaataaaaaggcattgccaccacgtaagttagggatttcagtagaaggtgttctcctatttgtttaggactccatttatgtaaaacctccctaaaacataaaaataaacttaaataaaacaaaagccatgttatttaaaacatctggaattagcccaattttcaaaacagtaatcaacttctaatttttttcaatctgtaggagaaatatattctaatggtgaacattttcttttctagaacacagtgtaaacaactgtgatggtttgagagaaaaaaatacaaggtgttttcatacgtgctgatagaaggggctggcagagaagcaagaggcacaactgattatgaaagtaaacatgagaaattaaaggaagaaaattaagatgattggttaaaagaaagagaatagatatggaaacaaagaacaggattaaaaaaggctttacaaagtatataagaatgacaattttttaaaaaagttaagtaactctaatgcaggctgacacattacatttatgtagtacccaatttctgaattatctttacttagtacaattacataattttgtgaccattatattctattatctttgtgagcacctactaaatgccatgactatgcaaagtgctttgcatgaactatttctaatcttcataataaccctattttctccatttcatagatgaggagataggatcagaggggattaataactcatccaaagccaagtaaccagttagtgtggaactctgttctaaaccccggtactctctgcctgtactgcctctcatcttatttgatacaaagaagaaccttgtgagataagcagagcagatattgtcacacttgtcttactgatgagaaaaatcagggtcaaaaagatcacaggaaaatgttcaaaggaaacaggcaaaaatgccaggtctggaaccaaggtgtaggattgtgtgcattctgtctgctagtttggttacctttggaaaacaagaaaagaaagaaaaaaaaggaaggaagaaaaaaaaagaaagaaagaaggaagggagggagggaggcaagctgaaatgaaatagaaccaaaggtgaaaaaagggagtaagttctatcaagagaaaagtccaaaaagagtcaagattatagagggtaaaaaaaaaagaaaagaaaaaaaaaagaaagtaaataagaagaaaaaaatgaaaaggcaggggagatagaagaaaaatgaaaagaaaaagagaaaaaaaaaacagaaagggaagtgcaaaataaagataagacttgctaccaacagtttctctgatggaatgggtactcattccatcatggctatggctacagcaggaatctagataaacattttctatttcacatgactgaatttgaaaaacaacagcatatacatacatcagagactttcagacaatagagcaactacccccgatttctaagaccttagagcaccttctgggccgaactctgattaaattactattaggatatttatttggcctgaacaacacaatgtagctgaaatcatattattcaatgattaagtcgaaaaatataaaaaatagattaggcctcccatcttactgaaagttactttatgattataaaacaaaatacgttacatgctttgtaaatcatcttggcacagctaatactcatggcctcacaaagtattaccacagtttatgacgacaccaattttaagtatgaaactgtggtaaacacttaggactgggtagcctcccctttaaatacaatgtcaattctgagttacctcccctttgatgactactgccaattcttaagatcattaagataaaaggagacttaaaaccaagtatttaaaaaaatgcttttgggactcttctttgtatctgttctctactactttataaaatgggtaaaatttactgttacagctctagaaatttaaataagcatacttaaaagcttcagtcactaaacctttttataattcattatcaaataccaaacatgtaaatatatctaaattatctatttccaagcaaaaaatgccctccctaatgaacgaaaaaattaataaaatttattcgagtaccttgcttttctcaaaacagtctagtttttcatttaacaaatcaaaacacatactcctatgcataatcaacacaaaaaaggcaataaaattctaaaataactctgtctcagcagtctttaattttcaaatggtcaaatagctatcctaatcaaaaaaaaaaaaaaaaaaaa

SEQ ID NO: 28537 - DNA, 4262 bp, Homo Sapiens
gatttttaaataaaaactgaaaatgaatttgggtatttggtgtgctgaaaagtgaaatttttgcctatttaaaactgaccctaatcttggacattagtaataaaaggcacatattaataaaagacacattgacctagattatgtttaacaaaactttaagttatttaaattatgctaacacagcatatgtagcacattttagaaattcatagatcttttatttttctagtgttaaacaattacttcaaattgatttgtattgctacataaggcaaaaaacaattcctgaactttgcagaatggaaaaatatttcaactgccacatttactcttttaaaactgagagctttaaagcaggagctcccaatccccggtacccatccctggcctgttagaaactggaccacatagcaggaggtgagtggcacgcaagccagagaagctttatcagtatttacagctgctcccaatggcttgtatggccacctgagctccgcatcctatcagatcattggcagcattaaattctcataggagcatgaaccctattgtgaactgtgcaagccagggatctaggttgtgcctccttatgagaatctaatgcctgatgatctgaattggagctgaggtggtaatggggagtggctgcaaaaacagattaacattagcagagaggcttgactgcacagagaccgtaatcaatcaactgcttgcagactcatatcaaaaccctctcagtgagtggcaagtaacaagctgcatctagtggcaggttttaagtcagaatctgacatttaatctgcatgtggcctgcccattacttatttaccacttccatccatgtctctttcctgcactgtgcattcgtctcagtcacagttttggtaagcccacaagctaaccctagccaaaatgagtaaaaaaacaaacgtccttggagagcttctttgaaaagggggaaagacccaatgatgagacagcagaagactctaatactgccaacaaagagaaagtggcatttaaaagaaaatatcaagagtcctacttaaattgtaggttcattgcaataggtgattcacattctccaaacctgctttgtctaatatgtgatgaccagctatccagaaaagccatgaaacctttaaaagcgcttcaccacatggagaccaaacaccctgcattaaaagacaagcctttggagtttttcaaaagaaaaaatcgtgaacgcaaagaacagaagtaattattgaaggccaccacttcatcaaatgtgtctgcagtgagagcatcattcttagtggctaatcacattgctaaagctaagaaggcctttactactggtgaagagttgatcctgcctgctgctaaggacatctgttgtgaactcttaggagagcctgcagttcaaaaggtggcacatgttcctcttctggctagcaccatagctagatgaattaatagaggatatgaggcacagttgttagaattaatgagtcactgtggtacccaatccaggttaatgagtctaccagtgttgacagcaaggcaacaatgcttgtttttgtgtgatacatttttcaggaggatgtgcatgaggatatattatgtgcacttttgctttcaaccaacaccacagctgcagaactattcaagtctttaaatacatatcaggaaaactgaattggtcattttgtatcgatatatgcagggatggagcagctgccatgactggacggctttctgttttcactactcaggtcaaagagcttgcttctgaatgtgagtctgtgtactgtgtcatctgtagagatgctggctagttggaaaatgccacctgaacttaccattttgtaggatgtgcttaaaattttcaaccacattaaagtacatgcccttaattcacatctgttcatgtagctctgtgagaagacagacacagagcacacgtcttctcttatacacagaagagagacggcttcctaaaggtagatcactggccactgtttttcagttacaatagctgctccagagatttcattttagaaaaagtcaccactggcagcacatttcgttgacacagaattgggtcacaaaattgcttacttggccaggcatggtgggtcacgcctgtaattacagcacttttgggaggccaaggcaggcagatcactcaaggccaggagtttgagaccagtctggccaaaggggagaaacctcgtctttactaaaaaatacaaaaattagctaggcatggtgcacatgcctataatcccggctactcgggaggctgaggcacgagaatcacttgagcctggaaggcagaggttgcaatgagccgagatcatgccactgcactccagcctgggcaagagagcgagactctctcgaaaaaaaaaaaaaaacttgcttacttgtgtgacatattcaatctgtcacctcaggggagaacaaaactgtgttcaagttggcagatagagtggctgcattcaaagccagactagtattatgggggccacaagtgaacattgggattttttgacatgtttcaaacattagcagagattttaaaagagactgagccaggaccttttttctcccagctggcacatgatcacctatctcagccttcaaagagtttgagtattattttccagccacgaaagagccccgaactgggaaggaatggattcacaacccatttgtgaataagccaggtgaatcgactttgttcatgctagaagaggatcagctgcttaagatcacaaatgatgttgcccttaaaagtatgtttgagacaacttcacatctccatacattctggattaaagacaaagtggaacatcctgagattgccacgaaagcactggaaagcctgcttccatttccaacctcctgtctttgtgaaacagggttttctgtagtgacagcagccaaacaagattacagagtagactggacataagcaacacacttagggtgtcactgtctcccatcacccctagatgggaccgtctagttgcagggaaaacaagctcagggctcccactgcttctacattatggtgagttgtacaattatttcattatatattacgatgtgataataataaagtacacaataaatgtaatacacttgaatcatctcaaaaccaccaccacccccctccatggaaaaattgttttccacaaaaccggtgcctggtgccaaaaaggttggaaactgctgctttaaactttaagttgctctgataaacttgataagcaaagaaaggcataaagaagagtcagtacatgaccattttatttagccatttgctgaacagaagtgcctagcttttttcactgtttttgttcaaagatagataattctgtttgttagagagtttttattaggtgactagaaaaaaatctttcaggataacatctacttattataagtaagctaaaacatttaatacccaaagtgcttagtaataaatatttatgctatctcaacatcaggcattttattttctattaggtaaccacctatggcataaattctcaaaagtcatagtaaaattagtcacaattagataaatcagccctgagtataatagcatctgtattatgggtttttgtgtaaattattaatttgactgaaacataactaaagtatcctggacatgcaggggaagaagacaagaaaattaatgaagaactggagtctcaatatcagcaaagtatggacagtaaattatcaggaagatatcggcgacattgtggacttggcttcagtgaggtagaagaccatgatggagaaggtgatgtggctggagatgatgatgatgacgatgatgattcacctgatcctgaaagtccagatgattctgaaagcgattcagagtcagagaaagaagaatctgctgaagaactccaagctgctgagcaccctgatgaagtggaggatcccaaaaacaaaaaagatgcaaaaagcaattataaaatgatgtttgttaaatccagtggttcataactcccaaacgcttagtctttgtattaaaagtaagccttattgttacaatgcacagtggaggactgcttatagagcacagacctttgtattataatttttaaaaaggcccttttaaataattacaaagagtgtttgctttcaaatgccatgggttacacttttatgggcatgactataaccatttttgtaaagagtaagggttgattaaataagaataattcggtactcaacttcctttcaaaaaaaaa

SEQ ID NO: 28538 - DNA, 5644 bp, Homo Sapiens
ggctggaaacctccagaatcctctggccccagatcctccccagggacccctgtggcttatctcaccagagcattcttccatctgtagatttcttggctgctccacaagggagtcccacttcaggtgtggtgctgggcatggtcactcctgctggatgtttagaaggtggaaaccaaggacctagggaaataccaggtacagcctttccaccctcatccagagaaggacaaagaggccaggcggtgtcaggagcccaggtctccagctggaggtaacgtcaaccccgcagtgagagcaggggcccattgcacatcctaggcagagatggtaacgtaggcaccacaggtatgcagggattggtacccctccctggcatcagaaagaagccaaacaaggagctttctgcagaatgaaacctttcctttcagaagcactgctgacagtttggtggttgccattggggcagtgagccttttgtccattctgaggttgggctggtttctcctcttggccgtgccctacagaccataaaggaaatcagctagaagtccccagaaacatccacagatggccctggacatcagccacattctgagaaacatgtcatgttctgggaggtctaaggcatcaagtaagtcttatggggctggaggatcccagggcaggtggggcaatccagagccatgggagcttcccatgggaattgggaggtcccaaggcagatgcaggggttccacaggaggagtcccagagccaccaagcgctctcctgtcccagggagcagtcaacaccatggactgaacagttactgggcttcaagctctgggccaggctggggcatgtggggccatgagggagctcagagtgggagacagagagacaattgtgctcagagggcacccatttctgggtgtaatgtggtcctgagattttggctgagaagggtttccagggtttcatatgtgttatggagctgcttcctctccccagcctcaccttgcaggaatcccagtgaatatattgccaccctatttgagctcagtgccctcatagtgtaatggcaccagcagatctgcctgtgcatggacttcctgtactacccattcctgaggggtgatgcttctgcagggcctgtgaccttgtgcacaactttagacaccatcatcctggagcagccctgcaccctcactagccagggtgttcatgacttcctcaagaccaaggccacgttcaagacttgggacttcagtgatgcacttgtgctgggcaaggtggcttctccagtatcttaatttgggaggtagaatgcagcttgagatcaaatgtctgatcaaagaacttgaacttgagctggagggctctggggagccatagaaggtgctggataaaggagggacagtcagatatattttagagatgactgtagaaggctgcctggaaggagtgaacaagagccaggagacccgggagggagcttgtggggcaggtctggagatggcaagggagggatcctgcttggatgaaaagtcttcagggactgtctcaggttacactcaggtgccctcagagctaatgtgttcagaggtcttgtctccaggatgaaaatgggaaggagttgtcagatgaggacatataaatggaggctggcatcttcatgagtaccagcggtggtcccggtgtgggtctctccatccagggacatggtggatggacactacatcactccattctgcccttcctttccctcctcccattctcccgagggcctcagtgcatgggcgctgtccaacctctggtgctgaagcagccaagagacgcaagcctgcgtggctgcctcttaggatatgacagcacagccactggcctctactgaatcctatgcaacctcagaagacacccaggagtgatgccatcatgtggtgcaagagttctgagggaccacaatcctgaagacattgaatggtgggtgcagggcctcatggcctgttccccagctcctctcattggctctgctccaggtggtgaagggggataacatttctgtcaattctgccacgattgcctagcaggaaaaggagcagagcccagaagcagggcctggtatgcagcctgcctaacaaggaagaatttataggctctgtggacagaaagatctgggagtccatatctatcacccactagcttgctgagacattagtaaagtcagttttctggactacatttctgtcatctgtaaattaagaggaatttcttctaccccacaaggcttcttggataattagtgacagtgtgtgtagagtaggtgccacccagccagcatttggtgtccagaacactcctcttcccccttgattttctgcctaaatttgcattttcttcttaagattttcactccccttaattctgctcttccctctgatttctgccttactgtatatcccatggagtcaccaggatcaaagtgggtaacagtcatgtatgcatgtatgtgtgtgtacatatacacattgttggggctggagtgtggtgtgtgggtaagtgtatgagttggaatcactgactgaaactctccacaccaggctgtgttcctgctcattgctggaggtactgtcagggtccctgtcctcaacccctggtctgacacttgcagatcaggcaggacattctggaggaatcatgcccttggaaggatccctgaggagtgactggtgggtattggtggataaataccccagctcccttgctttgggtgggtgactctgaggcacatgttctgtgctgtctctgcagatgtacctggcagggctgagtcctggctgccacaggggaaactttcttgatgaaggtccctttaactgctgcattcctttcctgtctcagttccccactcctctactggtgtttcctgggatacgcaccctaaggaagaactggcagtcgaattactatcctagagttatctccaaatagaatttttgtatttgaatatttgcctcaggatctacttccaggaaaattatactaaggcacacatttttctgtcagctccttcaatccccataggcctgccattgtgctgtttttatcaaaagggaatatgaggatcagagaggggaagtcacttgcccaaagtcacccagctgaacagtggtggagttcaactttgaccatgggaagtctggccccaaggtggatgcttgtttgtatcccatgagactcctcccttaccagggtcaaatgaatgaatggaggatgttaaaagtagagtctctgatgcctctccagagaaacccaggctcatggctggcacctgtgttctcactcttacctctttaagagtataatgaaaaacatgctcagtgctgactgtgtgcctgggggtgttgtaggcactctgcttactttaattcatttaatttttacaataaccttgtttttacttctagttgttagattaaaaaacagtggcaaagagcaatacagagagttgccaaaattcacaccgctggtccaggtttgaagcaagcagtctgtacctgcagtccttgtctgtaaccatggcaccctggcttctcacacatcttatcgtggagttccaccatgtgtcaggcatggcactgagcaccttcttttaagaatataatttgtaattatgtagattattaattctacttcaaaatgccacacagccttcatgtgataaaatgaaacaattggtgagtctaagcattgagaaaaaacgttcttttttccactcccgactccattccaacagttgggacagtgttttctctgtgcctgtagaaacctcagctcctgggctgaggagcctgttccctttggggaatgtggcagtcaggtactggcagggacctcgaagcggctgaagggtcattaagaaaaagctgtttacataggtgtgggcagggccaaggggaaccaggggtgatggcgcagggccctggggttagcgtcatctgggagctgtcaccaccctccaggctggtggggccatggagaagctgttccagtaactcggagaatctgcagctgaaagaggaggccagaggagacatcactcactgtgccctttgactgcatctggatgcccccactgaccacactaccatccccttattagactggagaggctgcagggaggggttctaagcctcctatagtggctcacctccaacagtgagtcagcaccagcccccctagtcccacagcacagggtccacttagacactgtatcctgcgtggtcccctttcctgctgggaagcagatatccaaatgagcagcagaatcctgtctctcccttcaggcccctctgctccttatgagtggtgttttcccttggttttggatgagaaacaccctttccccttccagagggattgtttctgtggaccccaccctgagttttcccctggttaggcaacgggcaggtgggggtggtggaaccaactctttagaaccagcaatgacaaacagatcccacttgggggaagttgatgttaagtgtcatgggtcctctggaattttctgaagctttcctgttttttttttttctccccctaaccagctcaactgatctcctgggatctctactaagatgttggcagcccggccagctggtctggccctggacgtgccttcatggtctggttatgcttcatgacctgcactgtggtcagtggtaagcagcacctgcttctagctttactgttgggtcagattttatccccactccagctctgcagtgcggctgcttcttgtttcatccatggaccctgcacgaaattgccccatgtttctgtttgtgcatcactgagaaaggaagcatgaaggacgcacaggtcaggccattccattgccctcctggtgccgggtttgccctcccaatcctggggttgcttcaggggcttgtcattctccatagtcccctccacatttctcaggtttctgctcaaaagtcaccttttggaggggtctccacctgtcactgtgtttgtaagagctccttcagtttctttctagctcatctcactctggtaatgtctttgattaccaccaccatctgacctggtcttatgacctgttagctttcttcatcagacgtgagcaccaggatggcaggggcctcatctgtcctgttcctcctgtggcctgggtcctagcaccatgtctggtacagtgtagatgctcaagggaagtttactttgtagaaccacttacctgggagatgttactgttagtctaacctgtaccattttgtaaacctccagccattttgcagactctgatcacagtgaaacgttccatgggaacttgggccatgagaaacatccttcctaaccacgtgactgcagaaacatccttatcgcgtcctcctgggcaaaggcccaacagcctgactgcagggacatccttgccatatcctgctgggcagcaagctctaccacccagatccctccctcccagtcccatgattaccccagcctgtgagtggcagttggtgctggcactaagctggtttcctcctccccagggttttgctggcaataaagatgttgctgttgaagccaaaaaaaaaaaaaaaaaaaaaaaaaaaaaaaaaaaaaaaaaaaaaaaaaaaaaaaa

SEQ ID NO: 28539 - DNA, 3440 bp, Homo Sapiens
gggagccacagggatctgattcctcccagggggatgtcctgcgcctcagggtccggtggtggcctgcggcatcccttgcggtgccagaagccgtgggacgaggagtgtgaggaagaggctgtctgtgtcattatgtgtgcgtcggtcaagtataatatccggggtcctgccctcatcccaagaatgaagaccaagcaccgaatctactatatcaccctcttctccattgtcctcctgggcctcattgccactggcatgtttcagttttggccccattctatcgagtcctcaaatgactggaatgtagagaagcgcagcatccgtgatgtgccggttgttaggctgccagccgacagtcccatcccagagcggggggatctcagttgcagaatgcacacgtgttttgatgtctatcgctgtggcttcaacccaaagaacaaaatcaaggtgtatatctatgctctgaaaaagtacgtggatgactttggcgtctctgtcagcaacaccatctcccgggagtataatgaactgctcatggccatctcagacagtgactactacactgatgacatcaaccgggcctgtctgtttgttccctccatcgatgtgcttaaccagaacacactgcgcatcaaggagacagcacaagcgatggcccagctctctaggtgggatcgaggtacgaatcacctgttgttcaacatgttgcctggaggtcccccagattataacacagccctggatgtccccagagacagggccctgttggctggtggcggcttttctacgtggacttaccggcaaggctacgatgtcagcattcctgtctatagtccactgtcagctgaggtggatcttccagagaaaggaccaggtccacggcaatacttcctcctgtcatctcaggtgggtctccatcctgagtacagagaggacctagaagccctccaggtcaaacatggagagtcagtgttagtactcgataaatgcaccaacctctcagagggtgtcctttctgtccgtaagcgctgccacaagcaccaggtcttcgattacccacaggtactacaggaggctactttctgtgtggttcttcatggagctcggctgggccaggcagtattgagcgatgtgttacaagctggctgtgtcccggttgtcattgcagactcctatattttgcctttctctgaagttcttgactggaagagagcatctgtggttgtaccagaagaaaagatgtcagatgtgtacagtattttgcagagcatcccccaaagacagattgaagaaatgcagagacaggcccggtggttctgggaagcgtacttccagtcaattaaagccattgccctggccaccctgcagattatcaatgaccggatctatccatatgctgccatctcctatgaagaatggaatgaccctcctgctgtgaagtggggcagcgtgagcaatccactcttcctcccgctgatcccaccacagtctcaagggttcaccgccatagtcctcacctacgaccgagtagagagcctcttccgggtcatcactgaagtgtccaaggtgcccagtctatccaaactacttgtcgtctggaataatcagaataaaaaccctccagaagattctctctggcccaaaatccgggttccattaaaagttgtgaggactgctgaaaacaagttaagtaaccgtttcttcccttatgatgaaatcgagacagaagctgttctggccattgatgatgatatcattatgctgacctctgacgagctgcaatttggttatgaggtctggcgggaatttcctgaccggttggtgggttacccgggtcgtctgcatctctgggaccatgagatgaataagtggaagtatgagtctgagtggacgaatgaagtgtccatggtgctcactggggcagctttttatcacaagtattttaattacctgtatacctacaaaatgcctggggatatcaagaactgggtagatgctcatatgaactgtgaagatattgccatgaacttcctggtggccaacgtcacgggaaaagcagttatcaaggtaaccccacgaaagaaattcaagtgtcctgagtgcacagccatagatgggctttcactagaccaaacacacatggtggagagatcagagtgcatcaacaagtttgcttcagtcttcgggaccatgcctctcaaggtggtggaacaccgagctgaccctgtcctgtacaaagatgactttcctgagaagctgaagagcttccccaacattggcagcttatgaaacgtgtcattggtggaggtctgaatgtgaggctgggacagagggagagaacaaggcctcccagcactctgatgtcagagtagtaggttaagggtggaaggttgacctacttggatcttggcatgcacccacctaacccactttctcaagaacaagaacctagaatgaatatccaagcacctcgagctatgcaacctctgttcttgtatttcttatgatctctgatgggttcttctcgaaaatgccaagtggaagactttgtggcatgctccagatttaaatccagctgaggctccctttgttttcagttccatgtaacaatctggaaggaaacttcacggacaggaagactgctggagaagagaagcgtgttagcccatttgaggtctggggaatcatgtaaagggtacccagacctcacttttagttatttacatcaatgagttctttcagggaaccaaacccagaattcggtgcaaaagccaaacatcttggtgggatttgataaatgccttgggacctggagtgctgggcttgtgcacaggaagagcaccagccgctgagtcaggatcctgtcagttccatgagctattcctctttggtttggctttttgatatgattaaaattattttttattcctttttctactgtgtcttaaacaccaattcctgatagtccaaggaaccacctttctcccttgatatatttaactccgtctttggcctgacaacagtcttctgcccatgtctgggaacacacgccaggaggaatgtctgataccctctgcatcaagcgtaagaaggtcccaaatcataaccattttaagaacagatgactcagaaacctccagaggaatctgtttgcttcctgattagatccagtcaatgttttaaaggtattgtcagagaaaaacagagggtctgtactagccatgcaaggagtcgctctagctggtacccgtaaaagttgtgggaattgtgacccccatcccaaggggatgccaaaatttctctcattcttttggtataaacttaacattagccagggaggttctggctaacgttaaatgctgctatacaactgctttgcaacagttgctggtatatttaaatcattaaatttcagcatttactaataagaaaaaaaaaaa

SEQ ID NO: 28540 - DNA, 2125 bp, Homo Sapiens
gggcaattaagtgctttcagtgtgtaccacagacacccgatccagctctctttaatcgaatttgacttggctgccctggatggggatttctctgaagacaaccgcaataagtgtcgcatcgccaccgcacccttgattgaagctgtggagaacccgacagcgttcgcctcaaaccctgagtttgtcagcattcctgcccagatcagctccgagggttcccaggcacaggaaccaatcctggtctcagccaagaccatgctggagagttcatcgtacctcattcgcactgcacgctctctggccatcaaccccaaagacccacccacctggtctgtactggctggacattcccatacagtgtccgactccatcaagagtctcatcacttctatcagggacaaggcccctggacagagggagtgtgattactccatcgatggcatcaaccggtgcatccgggacatcgagcaggcctcgctggccgccgtcagccagagcctggccacgagggacgacatctctgtggaggccctgcaggagcagctgacttcggtggtccaggaaatcggacaccttatcgatcccatcgccacagcggctcggggagaagcagctcagctgggacataaggtgacacaactggcaagctattttgagcccttgatcttagccgcagttggtgtggcctccaagattcttgatcatcagcagcagatgacggtgctggaccagaccaagactctcgcagagtctgccttgcagatgttgtatgcagccaaagaaggtggcggaaaccccaaggcacaacacacccatgacgccatcacagaggccgcccagttgatgaaggaagccgtggatgacatcatggtgacgctgaacgaagctgccagtgaagtggggctggttgggggcatggtggacgccattgcagaagccatgagcaagctggatgaaggcactcctccagaaccaaagggaacatttgtcgactatcagacgactgtggttaaatactccaaagccattgcggtgacagctcaggaaatgatgactaagtcggttactaacccggaggagttgggaggactggcttcacaaatgaccagtgactatgggcacctggctttccagggccagatggcagcagccacggcggaaccagaggaggtctgccaccttaagacccctattttaagatgcacacacacactggtgcccactcctgggtatttcttcatagcttagctccactctggaagaccccagcccagtaaccagagcccagtttatttccccaccactgcacagcacaggtccagaccaggtagccccagctgtactcaagtctcactgccccttatggggcagactggctaagaaccggggcatgggctttcagacagaaggactttgtatacagtgttctaccaggtcccctgtccctagccctgtcacctgtctcttttagcatgcccaagcttgggactgccatcatatcacttcctactccagttagcacatcccccgcaattatttttgttttccataggttcacagaagtgttgaaagattcaagtatgaaaattagctatccctctccctcgaaagagctactttcatgaaacaaagtcttgcctgaatattctgggtggctaagaattagcccagacatacctcctgtggactccttttattacttccctgcctttcctagaccagctttccttagtggccagtgtagacttggctttagaatgcctgtacccgtaagagtctaacggtagccaaagttgggccccaaaggccactttctaagagctgccatctctcatacttctaatggggtggtccattgggaaggacacaggtcatgtgtggctccaaggagctttgtagcatctatatcagtgtgaacacatagaaggagtccagggcttgggggaaccacatggcttcttagataaaggaagcccaatttaaaatgaagattaatggagtggattacagggacacttaaaagataaaagtaattatattctgtgaaattcagcaagctgtttattgagcgcaaaccatgttcgagacgttcctaaatgaactgagttgtcaaggcaaaaaaaaa

SEQ ID NO: 28541 - DNA, 7770 bp, Homo Sapiens
atttgggagtctttatttcatccacctcgaaagctgggcattaacgatattgaaggacagcgggtacttcagattgcagtgattttgagaaatctttcctttgaggagggcaatgttaagctcttggcagctaatcgtacctgtcttcgtttcctattactttctgcacatagtcattttatttctttaaggcaattaggccttgacacattaggaaatattgcagctgagcttttactggaccctgttgatttcaaaactactcatctgatgtttcatactgttacaaaatgtctaatgtcaagggatagatttttaaagatgagaggcatggaaattttgggaaatccttgcaaagcagaagataatggtgttttaatttgtgaatatgtggatcaggattcctacagagagatcatttgtcatctcactttacctgatgtgctgcttgtaatctcaacactcgaggtgctatacatgctcacggaaatgggagatgttgcttgcacaaaaattgcaaaagtagaaaagagcatagacatgttagtgtgtctggtttctatggatattcagatgtttggccctgatgcactagctgcggtaaaactcattgaacacccaagttccagtcatcaaatgttatctgaaattaggccacaagctatagagcaagtccaaacccagactcatgtagcatctgccccagttcctttgtataacataggggagaagaaaaggtaacatacatcatttttctacagatctcttcaacatgttagaaaataatagcttccagagcagttgtagcgcagcatgttgctccacctccaggaatagtggaaatagatagtgagaagtttgcttgtcagtggctaaatgctcatttagaagtaaatccagattgttctgtttctcgagcagaaatgtattctgaatacctctcgacttgcagtaaattagctcgtggtggaatcctaacatcaactggattttataaatgtcttagaacggtctttccaaatcatacagtgaagagagtggaggattccggtggcaatgggcaggcacatattcatgtggtaggagtaaaacggagggctataccacttcccattcagatgtactatcagcagcaaccagtttctacttctgttgttcgtgttgattctgttcctgatgtatctcctgctccttcacctgcaggaatccctcatggatcacaaaccataggaaaccattttcagaggactcctgttgccaaccaatcttcaaatctgactgcaacacaaatgtcttttcctgtacaaggtgttcatactgtggcacaaactgtttcaagaattccacaaaatcctttacctcatacccaccagcaacaaaatgctccagtgactgtcattcaaagtaaagctccaattccttgtgaagttgttaaggctacagttatccagaattccataccccagacaggagttcctgttagtattgctgttggaggaggacctccacagagttctgttgttcagaatcatagtacagggccacaacctgttacagttgtgaattctcagacattgcttcaccatccatctgtaattccacagcagtctccattacacacagtggtaccaggacagatcccttcaggcactcctgttacagtaattcaacaagctgtcccacagagtcatatgtttggcagagtacagaacataccagcatgtacttctacagtttcacagggtcaacagttaatcaccacatcaccccaacctgtgcaaacttcatctcaacagacatcagctggtagccagtcacaagatactgttatcatagcacccccacagtatgtaacaacttctgcatccaatattgtctcagcaacttcagtacagaattttcaggtagctacaggacaaatggttactattgctggtgtcccaagtccacaagcctcaagggtgtttcagaacattgcaccaaaacctctcccttctcagcaagtttcatctacagtggtacagcagcctattcaacaaccacagcagccaacccaacaaagcgtagtgattgtaagccagccagctcaacaaggtcaaacttatgcaccagccattcaccaaattgttcttgctaatccagcagctcttccagctggtcagacagttcagctaactggacaacctaacataactccatcttcttcaccatcacctgtcccagctactaataaccaagtccctactgccatgtcgtcgtcctctacccctcaatcacagggaccacctcctactgtcagtcaaatgttatctgtgaaaaggcagcaacagcagcaacattcaccagcacccccaccacagcaggtacaagtacaagttcagcagccccaacaagtacagatgcaagttcaacctcaacagtcgaatgcaggagttggtcagcctgcctctggtgagtcgagtctgattaaacagcttctgcttccgaaacgtggtccttcaacaccaggtggtaagcttattctcccagctccacagattcctccccctaataatgcaagagctcctagccctcaggtggtctatcaggtggccagtaaccaagccgcaggttttggagtgcaggggcaaactccagctcagcagctattggttgggcagcaaaatgttcagttggtcccaagtgcaatgccaccctcagggggagtacaaactgtgcccatttcgaacttacaaatattgccaggtccactgatctcaaatagcccagcaaccattttccaaggtacttctggcaaccaggtaaccataacagttgtgccaaatacgagttttgcacctgcaactgtgagtcagggaaatgcaacttagctcattgctccagcaggaattaccatgagcggaacgcagacaggagttggacttccagtacaaacgcttccagccactcaagcatctcctgctggacaatcatcatgtactactgctactcccccattcaaaggtgataaaataatttgccaaaaggaggaggaagcaaaggaagcaacaggtttacatgttcatgaacgtaaaattgaagtcatggagaacccgtcctgccgactaggagccacaaacaccagcaatggggatacaaaggaaaatgaaatgcatgtgggaagtcttttaaatgggagaaagtacagtgactcaagtctacctccttcaaactcagggaaaattcaaagtgagactaatcagtgcccactaatcagtaatgggccatcattggaattaggtgagaatggagcatctgggaaacagaactcagaacaaatagacatgcaagatatcaaaagtgatttgagaaaaccgctagttaatggaatctgtgattttgataaaggagatggttctcatttaagcaaaaacattccaaatcataaaacttccaatcatgtaggaaatggtgagatatctccaatggaaccacaagggactttagatatcactcagcaagatactgccaaaggtgatcaactagaaagaatttctaatggacctgtattaactttgggtggttcatctgtgagcagtatacaggaggcttcaaatgcggcaacacagcaatttagtggtactgatttgcttaatggacctctagcttcaagtttggattcagatgtgcctcagcaacgcccaagtgtagttgtctcaccacattctacaacctctgttatacagggacatcaaatcatagcagttcccgactcaggatcaaaagtatcccattctcctgccctatcatctgacgttcggtctacaaatggcacagcagaatgcaaaactgtaaagaggccagcagaggatactgatagggaaacagtcgcaggaattccaaataaagtaggagttagaattgttacaatcagtgaccccaacaatgctggctgcagcgcaacaatggttgctgtgccagcaggagcagatccaagcactgtagctaaagtagcaatagaaagtgctgttcagcaaaagcaacagcatccaccaacatatgtacagaatgtggtcccgcagaacactcctatgccaccttcaccagctgtacaagtgcagggccagcctaacagttctcagccttctccattcagtggatccagtcagcctggagatccaatgagaaaacctggacagaacttcatgtgtctgtggcagtcttgtaaaaagtggtttcagacaccctcacaggttttctaccatgcagcaactgaacatggaggaaaagatgtatatccagggcagtgtctttgggaaggttgtgagccttttcagcgacagcggttttcttttattacccacttgcaggataagcactgttcaaaggatgccctacttgcaggattaaaacaagatgaaccaggacaagcaggaagtcagaagtcttctaccaagcagccaactgtagggggcacaagctcaactcctagagcacaaaaggccattgtgaatcatcccagtgctgcacttatggctctgaggagaggatcaagaaaccttgtctttcgagattttacagatgaaaaagagggaccaataactaaacacatccgactaacagctgccttaatattaaaaaatattggtaaatattcagaatgtggtcgcagattgctaaagagacatgaaaataacttatcagtgctagccattagtaacatggaagcttcctccacccttgccaaatgcctttatgaacttaattttacagttcagagtaaggaacaagaaaaagactcagaaatgctgcagtgaaaaataattccacttacacagtgggggactcaaagtcagccacatttcacatactgttactgaagaaagcaccaagtcttaatggaacaaagaccatagaatggattattttatctcctcccatgatgctgagaggaagcttcgtattctgatctctgagtgaatccctttgttctctgtttaaaaaaatctaaaaagaaaaaggaaaaaaaaaaaaaagaactgctgtgggattgtcaaccagcttatctgcaggatgtttcagatctgataaatcctgatggaaactggtatgatcagaattcagtaccatccacattggaatatacatggaatattgtaaaacctacatgagcagatgaaatagaagcattaaatatttttatctatatccaaaaaggagcacatttttatatttacaaaaccgtttaagctggtttgaataatttaaaaaagtttcagcacacctatacccccgatctcagagggggccaccaatatctagctatggatcgtgtgttttgtttagaaatcagtagcttggttttcttacttgagccaatatattttcacttatttattatcataaaaatttaccagtctgaatagatcttgtaaatatttgtgaatagaatgaatacctttcatgccactgcagccactggaaatacattctgtggtgtcctagaagcattattggtaggttctaaagttttctagactttcctgtcaattgtaagtaattgtgatatattctatgcagtggatgaatgttctttaaatttgtgtaaatacttctgcaaaggtactgatgctgtaaagtcaaaacagttttgtggaactgtgatttttttttcttttttctttttttttttcttttttttttttgtattatacaccttgtagaactcattttgctggctgaaagagtatggaataatatatctcatgtcattttttagaagaaaaactatttgaaggtattttttggttttccttaacatgtatccactgtaaacgtttgtcgtgtacaagctcagagcttggacagaattttttgtatttgtaaattggtttaaatacatggaattttatacaggttttctcctgtgttatatatgcattatgtgcaggtatgatattttcttcactactttttctatcttaatatagtgtggaattttattgtattattcttccattcttaatactgtaccacattcctgctcagaaactgctcacttccttaaattgtcttttttcccccagcgtgaaatgtatccatttataactgcctattgcctgttctattagcatccaaaaatgtggaaggcctcccaaccaccatttctgctgtgtccttaggatgtgcggtaaaaaatatagacctaacagtttatgttatagaatggctttatttactttggtgactgtttatagtttttaaataaaagactgaacattttcttgagtccttcatttctgagtatgcttaagacatcttaaaaatatagagagaattctaaattcagctgaaggcaaggtataacggtcacctacctatttgattatatgttgattgataacatattaaatagagaacaaataagagaggtcctttacatgacaaatttgcatgaaataagcagattaaccaagtatttatttttcatcttgttataatgcagagcaaatgtagagaacagcaaatgattgatgcagttaaagctcaatatgcctttttttactggatactgtacatttggctaaaagcttttattgtttgatgttgtgtttcttgactgtttattcagaatcacagtgtatccaaatcttcagcttgaatttggaggcagattcttagagtgaaaaagcctcagtttccatattaaaaatgttttaaatattttgattgaattagtaccaatgtaaaatctagtttcttcctgaaggaggatccctggcgctgtccagccatgtctcaaaggaatgtttgagaaacttcatctaatattagttataaggttgtggaatttatgcttggtccaccttccaagactggcactgcccaacagacaccgctgaaatcatgtgggtatccctaggatggccttcagagccctcaaacttacaagcacctggtagttgacatcatatgggaattttctattcaccgtacttatccaaaaatctcttttaaaaagtaaatttgtgcaacaacgtttatttgaaagataatgtcttctcaaaatcagaaactgcagtggtaattaaattaatagaaaagagaacaaactgcaggtttagaaaaatggttttcatattcaccattcttccacctcattgaattgcatgctgtagttctagcttttctgctataatatgtaaatatgactgtagccttttaagcttcagtctcagcagagaatttcctaaatgcgtttgacctaatgaaactgatcatggcttcccacttaggtttttcttcttatagctttatagaactatataataatatggacttgctgtgtaatggaattaaagtgcttttgcacaataagttctgcaaaaccctctcattcatgaaaaggtgctccttgctagacagaaacttgctgatttacagtattgttatttttgtctaaagttctgtaaatacatgctttaatgttatctttgagaaatctatgtaaataatatagtctacaacatagagactgtataattctgtgttatatatgtgcctagtgctctgttggcactcaataaattttaagtaacaaaattgataatcatatagcgaaggcatatttttcttccaagctcaagtcaggattgtgactatatattaatgagactcagtaatccaacccacacctgagaactcgtctcattactttatagtcatgtcatgtatgtttttttaaccatgaaatgacaataaaatgatttttaaaatgaaaaaaaaaaaaaa

SEQ ID NO: 28542 - DNA, 7095 bp, Homo Sapiens
caaagtgctgggattacagggatgagccaccatgcccagcctgtttcttaaatcatcctttaggtggttgagattaaacaatgcctgccctcaagtggtgtgaccaggaggtgaggaaggattggaaaaagctggggataggagccagttagaaacaagactaaactgaatatgaaacccaacctggtttggatcttatgataggaagacttgtgtttagaagtcactgtctgttgtgcttaaattcttccaggattcattattcctaatgagcttggtggcgtagcttcaataccatttgaacactaaagccattatcagaagagaaggccattactgggtaatttcatgccccttaatgtctttaactaccacatacgtacccatcccccttcctttctcacttcagaaatgacaggttttttggaagagaagcaatttgccattcacagcaagtaactaataacagatgctttatgtggacgatgaagataattattgtgatctactgtctactaaacttatcgcaaaccccagctgtttcttttagggaactggaactagttcccagagtgggggcttgaaacacccctccacccccactcacacacacacttgcttatctgcgcagatttatgggggaggagcagagagcctccaggatccttgtatgtgagaatggggaagtaaatgacatgttaccatggcgtagatatcttgcgtttatttgaagaggagagagatcaggaaaccagaaatatcacaagccccactgctaaatatgactagcttaaagaaagaaatatcacaagctcatagattagtgctggacacagggcaggcaggctccagggattacttctaggaagacaaggggtattatggtctaaaaaaaaatcctcactttattcttgtcttttcagtgagttggcccattgcttctgctgtttgcaagtaaaattggctaggaatcaggatggtagttgggatgcagggcagaggttgaatgcagctcgctcatctaaagaccatttgaggaataattcctttggaagtaggagcctggcaccagaattctagaattgcaagggcttggtgattgatagggttattttgtgaacctaattaattctctgtatacaagatgataatctgtctatcccagaggggtttgccccatctttgggtagctccactgaccaatagaagcaaaccagctttctcccgtggtccagccctccttatgcccctgcaggaacctcagcacagagaagtggtcattggggaatgagaacggaatcatatgatgtggtgcatgtgtgtgcatttgcttggggaaactcccctcaccaaactcttgtcttattttttctagtctggacactgttattctgccccttaacacattggaagggggaatcacaatagctcattgtccccagcagaaaataactcctgtccttgaaaacagtagcatagtcctctgttaagccctttctgtttttttgtttgtttttgtttttttgagacagagttttgctcttgttgctccggctggagtgcagtggcgtggtcttggctcactgcaacctccacctcccgggttcaagcgattctcctgcttcggcctccttagtagttgggactacaggcacgctccaccacacccggctaatttttgtgttttcagtagagacggggttcaccatgttggccaagctggtctcaaactcctgacctcaggtgatccatccactttggcctcccaaactgctgggattacaggcgtgagccaccacgcctggccgtttttgttttgagctgaagtttcgctctgtcatccaggctggagtgcagtggcacaatcttggctcactgcagcctccacctcccaggttcaagtgattctcctgcatcagcctcctgagtaggtgggtctacaggtgcacaccaccacacccggctaattttttgtatttttagtagagatgggtttcaccatattggccaggctgctctcaaactcctgacttcaagtgatccacccgtctctgtctcccaaagtgttgggattacaggcatgagccactgcgcccagttcagccttttctgttaacagctgttgatgaggcgagagtggaggaggtgaggatgacctgaggttttccagaggagggaagaggtagatatgtggttacacccctagatttttttttttttttttgggaggaggaatctggctctgtcacccaggctagagtgtagtggcacaatctcggctaactgcagcctccacctcctgggttcaggaaattcttctgcctcaggcttttgagtacctggcattgcaggcacctgccaccacgcccggctaatttttgtacttttagtagaggtggggtttcgccatgttggccgggctggtcttgaactcctgagctcaagtgatcccccctcctcggcctcccaaagtgcacccctagatactgatgctgctcctcacccatggacacttccctgggaaatccatttctcaaagaaatttccaagtatacttgtaggcccccagttgaaatctttgagagaacagaccctaggagctgagcagtgacgggtttggacttgcattttcagctggagtgcagatacagttctgctaataggactgcccctttggttactgtaccattgccatgttaggtgtgaattcagttttgttgctcttcatttagaagaatccaaaattggcatgccatgctatataaagcaaaggacagtgtgaagaatagttacctcacaccgttttacaatggctttcagggaaaaaaaagccctgacttacagcatttggggactttcgcagtgtaaatactcctcctttggccaattcaggctaccaacatgacatcattaaacacatatttggcaagagatgtgcacgattgtgtgagctggccccagcacaccactgcaatacccgctaaatgtatccagtgcattccagctgctctgaggctgatgtgtggtggctggggaacaggcctgttgctgagtcgtggtgtgtacacacacacacaatttacctccttctctgtttcacttgcccttggcctagggaatgaactacatctcagtctaaggaaccactaaattggattcaaagacagttgagcagatctacagccctgttgggtccatccgaaaatcaaggtggccagtaaggtgacagctcttttaggagccttttacctgctataatctgtctgattattggattctttactcaggtcatagcacgtatcctcctctcccagcacatagcctgcacccagcacatctgagtgtgtgttctgaccacatcactattatgtgacctcccacgctcaggtcacgaaaggatcagcaaagaagggcaagaaggcccagcatttggtgcataccaggggcaaatcagacatcacagtattctatgtactattgtgtacctctgctctgggagccaaatccctggatttagttttattcttaaccattgagggatttggttaaatgatttctcactccagctgggtgtggtggctcatgcctgtaatcccagcactttgggaggctgaggccagcggatcactggaggtcaggagttccagaccagcctgaccagcatggtgaagccctgtctctactaaaaaatacaaaattagccaggcgtggtggcgcatgcctgtagtcccggctacttgggaggctgaggcaggagaatcacttgagcctgggaggcagaggttgcagtgggccaagtgcgtgccactgcatccagcctgggaaacgagtgaaactctgtctcaaaaaaaaaaaaaaaaaaaaaaaagtttctcaccccagttcctttgctcagaagggggatggggccatcactggggaagtagccttgagagttcctcaggaacagggtacccagaccatatgacttcccctctccagcctgtaacggtgggcctttttgattctgccacataggtggttgaggcaccatagggaaatgaaaagagactggcacagggtttgaggcttggcaggtaagccaggacctggtgatttccaaggtctgcccagtgccacagtgatttgttagaagattgctaggtgctcctccggtcaaataaacccagctggagtcccttggccctcctgagacttcctccccatgactttgcaacacggtgggttccccttaagacagcagcgtagttctggaagctgaagcccacaggactggggcagctgggagcgttcataagccttcccttgtttagagagagccaggatggggtgggggtgggatttgagttatatctttacatcttggccgggcgcagtggctcacgcctatagtcctagcacttcgggaggctgaggtgggtggatcatgaggtcgggagttcgagaccagcctggccaacatggtgaaaccccatctctactaaaaatagaaaaattagctgggcatggtggcgtgcacctgaaatcccagctgctcgggaggctgagacaggagaatcgcttgagcttgggaggtggaggttgcagtgagccgagatcgtgccactgcactccagcctgggcgacagagcgagactccgcctcaaaaaaatcgtcaagtcttggtgtttactgtctcaccctctctgtctcttgcagtagtattttgcctttgagtaactgtccccagctccagtgctgcaggcacattgttccagggcctctgtggtgctcctgatgcccctcacccactgtcgaagatccccggtgggcgagggggcggcagggatccttctctctcagctctaatatataaggtaaggaggaccctgggatggaaggctggggttggagctttctcagactccactgtgctgctgctcaaggggaataatcactttcttagtcttctggctcttagcctaggccagtggggggactgtgaaggactctttcagctgaggctgttgcatggcttattgggaatactagaggagagatatcagcaccatttgttgccttttaatctgctgtaattgaggcccagaagttagtttagcttctcactaagactgggatggaaggttagcaaggcagctgaattctgggcttttgagattgtgcccaagggagataacacggaccctgcagtccacttggaatcagactttggctgactggggctccagccaaaccctcatacataccctcatttgtttttggtatttccctttctaacagggaaggaaaagaacatggtgttgggggaaagcgtgggctttcgagtcagggagacctgggtttgaatctcatctctgccattcactgtctttggagccttgggtcagttgcttcattattctcagacttaaaagtggagttgttaattaccatctcaagtgcttgtcatgatgataaaggtaatatatgggacagcactttgtacttggcacctagtggacaatttaggtaaatatttccctttctgttttgctagcttttaccaccatcaactggtcttagtgcctggacgagaagctcactgtgacccaggacctccctgtgaatgatggaaaacctcacatcgtccacttccagtatgaggtcaccgaggtgaaggtctcttcttgggatgcagtcctgtccagccagagcctgtttgtagaaatcccagatggattattagctgatgggagcaaagaaggattgttagcactgctagagtttgctgaagagaagatgaaagtgaactatgtcttcatctgcttcaggaagggccgagaagacagagctccactcctgaagaccttcagcttcttgggctttgagattgtacgtccaggccatccctgtgtcccctctcggccagatgtgatgttcatggtttatcccctggaccagaacttgtccgatgaggactaatagtcatagaggatgctttacccaagagccacagtgggggaagaggggaagttaggcagcccgggacagacgagagggctcctcgctgtctagggaaggacactgaggggctcagggtgagggttgcctattgtgttctcggagttgactcgttgaaattgttttccataaagaacagtataaacatattattcacatgtaatcaccaatagtaaatgaagatgtttatgaactggcattagaagctttctaaactgcgctgtgtgatgtgttctatctagcctaggggaggacattgcctagaggggagggactgtctgggttcagggcatggcctggagggctggtgggcagcactgtcaggctcaggtttccctgctgttggctttctgttttggttattaagacttgtgtattttctttctttgcttcctgtcaccccaggggctcctgagtataggcttttcagtccctgggcagtgtccttgagttgttttttgacactcttacctgggcttctctgtgtgcatttgcgtctggcctggagtaagcaggtccgacccctccttctttacagcttagtgttattctggcatttggttaagctggcttaatctgtttaatgttatcagtacattttaaataggggcattgaaatttactcccaccaccagggcttttttgggggatgcctgggcctttaaaacactagccaaactctaattaattctcaaatcactgccaggagttcttgctcctggctgcaggcccaggccccaaggtctccttcttggggtcacaaacagcagtaaggaagaggaatatatagcaactcagggcctgggaattgtggggcaatccgttcttagggactggatacttctggctggctgagtatagtactagctgcctccccaccaggttccgagtagtgtctgagactctgctctgcagggcctagggtagcgctgggagtgtagaagtggcctgcccttaactgttttcactaaacagctttttctaaggggagagcaagggggagagatctagattgggtgagggggacggggatgtcagggaggcaagtgtgttgtgttactgtgtcaataaactgatttaaagttgaaaaaaaaa

SEQ ID NO: 28543 - DNA, 3683 bp, Homo Sapiens
ggaggcggtggcagtggtggaagaagaggcggcggcggcgggggtagggagcctggaaacgcgagcggggatggtaggtggtttggacccgccgggccgccgtcgtttccagaaagggtttgactggaggaacctctggagcagctgcttttggacaaactcttctgaaaggtgggcaacctagaaagccagttgatgccacttgctattggagttgtgggcagcttggattaattaggagaaagtcaattgcgccagcaaatggaaatctcggaagaagcaaatccaagcagttgtttgactacttaattgtcattgattttgaatcgacatgctggaatgatgggaagcaccaccatagccaggaaataattgagtttccagcagtgttgctgaacacatcaactggacagattgactctgagttccaggcttatgttcaacctcaggaacatccaattctttcagaattttgcatggaattgacaggcataaagcaggctcaagttgatgaaggagtccctctgaagatttgcttatctcagttctgtaaatggattcataagattcagcaacagaagaacattatttttgctactgggatttcagagccttctgcttctgaagtaaaattatgtgcatttgttacttggtcagactgggacttgggggtttgcctggagtatgagtgtaaaagaaaacagctgttaaaacctgtgtttttaaattcttggattgatctcagagcaacttacaagcttttctataggagaaaaccaaaaggactaagtggtgccttgcaggaagtaggaatagaattctcaggacgagaacattctgggttggacgattctcggaatactgcccttcttgcttggaaaatgatcagagatggttgtgtaatgaaaattacaaggtcgttgaacaaggttcccactaagaagaatttcagcattctggccagaaatttgaatacaattcaagttgaagaaatgtctgcctgtaacattagcatccagggtcccagcatatataataaggagcctaaaaatataataaatcctcatgaaaaagttcaaatgaagtcaatttgtgcaaattctcctataaaggcacaacaggatcaattacaagtaaaaaacaatataaaagcaagtcttcacaatgtcaaaagttccttacctctttttaatactaagtcctctacttctgtggggcagttgcagtctcctaccttgaattcacctatctgtatgcaaaagcaaggaaaaaatgaacatcttgcatttaataccaaatctaaggcttcaacagttggttcagaattggtacttgtttctaccaccgttccaactgttcatcatgtttctgatttggaaatgagctctactctggactgtttacctgtgttggctgattgggaggatgtggttttactgccagcatctcagcctgaggaaaacgtagactgtacagttcccattagtgactcagacttagagatttcatttaattctggagaaagattaatggttttgaaagaattggaaatgtcaagtcatgaaaactttggagacatagaggaaactcctcaaaaatctgagacttctaagtctattgtgtacaagagtcctcacactactatttataatgtaaaagaagccaaagatccaggttcagatatttctgcctttaagttacctgaacacaaatcaagtaccttcaacagagttaatgccaatatgtctcatcctttagttttggggaaacatcctcttctttcaggtggtaccaaaaggaatccatgcagtccccaagctttcccaccagcaaaaaaacaacccttcactattcatgaagaaaagcctacatcatctgattgctccccagtaagaagttcttcctggaggcgtctcccatctatattaacttctacagttaacctacaagagccatggaagagtgggaaaatgacacctccattatgcaagtgtggtcggagatctaagagacttgttgtttctaataatggaccgaaccatggaaaagtcttctattgttgccctatcgggaaataccaagaaaacagaaaatgttgtggttatttcaaatgggaacaaacacttcaaaaggaaagagccaacagcatggttccatctcattccacagggggactcacttttagttctccagaaacaagccatatttgtgacagaaatttaagtatttccaccaaaaattctttgagactcaggccttcaatgaggaattgataacctttcatgtatgaatcctaattgttccttgaatttccaaacatgagtattctgataacatcttacactattttatttttattttatatattaatgtttactgcatttaccatactttcttcaggaaccacaagtgtaatcttttgtaaacagtatttattagattacatataataagcaacaatagtatatgatccttcttttatagttagaccttgaaacaagtctaaactatttttaaattatttgcaaaaaatgtgactaataaaaatccctagtctattttcaggtagattcttgtactttgagattatcataatcttctaactgatattttatatttttctaaaaacttttataagttctttagttttatttcaggcttgaacattggttctgatttgtatatcaacatatcagaagaattagtcaactaaagtttgaaaacctatgtagcagagatctggttcagaaactgcttctatactatacatttaaaaattaatcagcaattgatggtattatttttatattaagaaatgataggaacattgacactaatgtggaggaatttgccaaatattttatttcaaaatttagcctctgatatcataaccacaagatattttaaatcaacagtttctaagcatactaccacagtttttatgacctctccatcatcttgtggtttctagagattgacagatactatgtttgttttatagatatggtaattaatgaaacaactttaaattgtcttccattctttcttcctcagttcatttctttttgtcttcccactgatagtctttggcagctcttgaataaattctacctgttggcatcaaggggaagaaaattagcctggaaatttttatctttacataaagccaattatatagcagtttgattatgaattctaggtggaagaattagaatagtctttggaatgggttttgggtaacagccaaaatagggaaaagggtattgttaggaaagttgtcttgatattaagtatttactgtgagtccagtaagccaaaggaccaaacaaaataggttcagggtttcattttaatctcaaagattctgattcttacccatatgtcatcagttcagtttgggacatgtggtgcagcatgtgtgaagaaaatattcattaaaatgtaaaaataaacacttgaaattgtccacaacactgagcaaatattcgttataattaggatgcctacctttctgggatatttgtaaggtgctgtagtttttttaacatgctcctgaatctcctttattagttgttcttgatcatgtgacttgtaatcaggatttagaacgacaaaagcctttactacctaaaataaatatttgaaacaccaggaaaaaaaaaaaaaaaaaaaaaaaaaaaaaa

SEQ ID NO: 28544 - DNA, 3655 bp, Homo Sapiens
ggggaaggacaaagtggagagggaggagatggagcaatctcttatgtgatcattccatcaactcacaaatttttcacctaacacctggttcaactgtaatgtgctcagctccgtataacctggacagcagctgtgccctcacccctaaactcagcaaaatattatggtcctctaatcaagagaattttgctcctgttactgcatgtcttgtgggttcatcgtcagaccagtgagttgataccaaacttcaccaaacggttctccggagcaaccgtttagagtcacttagagcacctgatactcctacagttcttaagagtgaataccttagaaaggagccgccaagacaactgaacccatcttaggcgctaacaaccagcatcttgggctccgattgtccaggtgacttgactaccctacctgtgtctgtgactgagtagaggcaagaggagggggctcttagcagaaatacattggacatgtgacctggtgaaggccaagggaggggtgttgatgtgaagacgctggggacatcatctgtgaagacaggccagccctccccttctgctggagcctcagtgtcccctcaccattctgcgctggtccagagatttcctgctattgatacttatcagagacacaaagctgaggaggaacagatgtgccatgtcatcagccataatagaaaaagtgcatgaatcttttttggaccagatgtttgcaagagttgtattaaatatatttcattctgctgtctcagcctctcaaatccttttcacgaagattactttaatgggtgtcagttacaatcacaaaaagcacccattttgcttttgttttctagcaaaaaacaatggggaaactttccatcttaaacagaatattgaaaaggggggggtagtaaagactttgaaaattgagctaatcattttattttcctcttttccatgttcctgtttttatttgatgttaaagctaaaaataatcagaatacaacaaagttgaatgagaaaggggcaactgaacagtttgtgtgtgacagttggtacctactattgtttataggtcgtctattctatcttaagccttccatttaaaggaaacttctaggaaatacctaacattttgaagaaatccaaacgactattaaaacactatcaaacaaaaggccataattagctgggcgcagtgcctcatgcctgtaatcctagtactttgggaggctgaggcaggaggatcatttgaaactaacctgagcaacaaagcaagactccatctctacaaaaaatacaaaaattagccagatgtggtagtagatggctgtagtccgagctacttaggatgttgaggtgggaggaaggcttgaggctaagaggttgaggttgcagtgagctgtgattgtgccactgctctctagcctgggcaacagagcaagaccctgtctcaaaaaaaaaactgtaattaagaaggaactattaatgcatgaaaaaatggagacaccctcattaccctcatggagcttgcattctaatggagaggggccagaaataagcatactgtacagcaggtcacatggtggtaagcgctatggaaaaaacaaagcatgacctgggaataagggagtgtaaggtgagagagtggggtgggcaatttaaaatagtgtagacagataagatctcattaggaaggtgacatttgagcaaagacagagctgagagaggctaaacatgggtgtgggggaaacgtgttccaggcagaggaagcagcaagtgtgaaggttctgaggcaggcacgcggctgatatgttgaaggaacatcacagcagccaggatggactgaaacaggagagggtcagtagtaagggtggaggctagatcatagagggactaacaggccatcataaggactttggcttttactctgagatgggaagccattgacatgttgatcaggggagtgacatgacttaccttctagttttaaaagatccttcttttagaaatgattgttatggttgataagagactactggagagggtggggatatgcagaaacatggtgaggggtagtcacattccagatgtattttgaagattcagcccataggatttatggagaggttagatgcaggatatgagagaaaggagtcaaggatactccaaggttttgacctgagcaattggaaagatggaaagccatctgctgagataggaaagaggagcaaagaagcagatgtggtgagagtgagagcaagagttgggttgtggacatgttgactttgagatcatctgagtgagcatggagagggtgcagttggagtgtgaatctggggctcaggggagaaacctgggctggaaatacaaacgtggagttgtctgcatactcatgggccagaggtcagaaccgaggcaggtggctgggggagctggcctggtttttgtgccctctgggaatggccagcctcagacctcctgactggtcatggccaggaggtcagaaatctgaaggtgaatcctaaccctaacttgagtccttggctgagatctcaggactacttcccagctggcctgggtcctcaaggagtaaaggagcagtcctggagcacccagctgtgccggtacctggggaaaaagtaactacagatggaaagtctccatggaagaaatgaccagatctctactctggaaagagaaataacaaagaaaatattcagaaaacatagtagaggtgagctgacatcatcaaaccttgaagttcttgcacttaagttttccactgtgtcctgaatcaggtgatattggggtctcctctgtcacccaagccccagggtacagtggtgcaatcacagctcactgcagcctcgacctctgaagctcaagcaatcctcccacctcagcgtctggagtagctggatctacaggaatcattaaccaatggcaacaggaatccaaggataaagtgatttccctcctgttaactcatctgcctttgctgaagccaggaaacctcgacgcgaaagtagaatatatgaaactgctgcccaaaatcctggctcactctattgaacacaaccagcacattgaggagagcaggcagctgctgtcctatgctttgatacatccagccacttcgttagaagaccgtagtgctttagccatgtggctgaatcacttggaggaccgcacgtcgaccagctttggtggccagaaccgaggccgctcagactctgtggattatggacagacacactactatcaccaaagacagaactctgatgacaagctcaatgggtggcagaactctcgggattctgggatttgcatcaatgcctccaactggcaggacaaaagcatggggtgtgagaatggccatgtgcccctctactcctcctcatccgtccccaccacaatcaatacgattggaaccagcacaagtacaaactgactctaatcctggctatacggaggaacccccacttccacttggggtacacctggcaggcaccagtcaaagcatccaccagatagtctgaaacggttgcagaagtaccagaagcaagatgtctaagctggaatgtcccaagacttcagggcagccgttaacagtctgcccaattttatttaatacttagacagctggaatggaaaaaaaaaaa

SEQ ID NO: 28545 - DNA, 2446 bp, Homo Sapiens
gcagcctcggcgcgtgtggccgcggatccccagctccaagggcctcaccttcctgccgccacctcctaggacagcggcgtgaggcccaaacctctaggtagggcccagttggatcctgatttttcattgagccaggcagtctcagcccgagttgaaaggcctccttagccttggaactaacgtctcttcaccctgacttctgggcaaggggagatcccaggaaaaggtttacctgcaggttttcctaggccaaagccccagcaaggaccccctctccaacctttgttatagggctacatggggcctgggctcagcatcctcatttggggtaaactgaggcccgggacaagcccggcagagcctaaggctgctcggggagtggggccaatcagagatgattggagctgccagaaactctaatcagatgacctccaattcatccttaaaagttgaatggtggggaggggctggagtctcttcctccctcctcccaagttggggctcctggatgtgttgactccaggctgtgcctggttgtggagggtctggggcagggtgtgaggggtgctgtggaactggagcaggagacagggctgggtgttcctggtgcagcccttctgggcatgggagagaagccccaaggccctgggttgctccccaagagcagctctgaggcctcctgctcagccctggcctgtgtggggagcgagtgtgccccccacccagcccctgccaccgccgttacttattctcactgatgtggggttatcatataattggcaccatgctgtctgtaggacattatgacgtgcttgggttctggtttgagttggcagcccgttgggtctctctgcctggtggagccttggggtggcaggtacgtcccttcccccgcccaggtgcttcatcctcatggccaggcctggtggcttggcacgtctctgctgccccaagcccagcttccttccgctgggcgttcccgccccactggctctgccggacttggctactgggctctcccctccctcatgcctctgcccagagatgtcccaaaggccctcagggccaagccgggccagggatgtggctgccacagctgagaccaagggctctggctggcccgtccccaccaggtggccctgccctccccaagttgggggttgtggcacttggggtcaggcctagccacgtaaggacacaggtaacaccctgaggatctggcattggcagcttcaggcctaactttcctggtcagggccccttaaggtggcccgggcacattggtttcatttcgatgagactttgtcagaggcctggtctggtcctggccctaccgccccagctgtccttcagcacagctcggggtggggactccaggatgctgggtctgccccttgggaggggcactctggaaggtcagggtgatccacaactgtgagctgaggttggatgcagctgggagcttgggacagagagagcccagggctcccctgctgtgggcacctgcccagcggggacatgagatgacagagacgtccccggcgggggtactcaggtgctacgaacatggcagctcttgtttccggctgagccatggccagagcagggctcagtctgcccctgaacttgctgaatggaccgacgagctgagcctgaaagcccagaagagcctcggtccagaagacggagactcggcccggtgtccagcgcagcccagggcttcctggggggcagcaggagtgcctgggggtcaccgccttcaggacaatggcctcagtggctctttctttctgccctgaactggcacctgcacctcctctgcttcctagagggtgacctgggccgagccgcccagtccttcttcccctgaggccagaggggacgccccgcagccacatcacacaggatcctcagcagccatagtctcgcttcagggtgtccagtgtttcgaggaggagaggggacaggggccaggtccactcccttggccctcctcttggaccccaaggccaggccggatccttttatcccgtggggagcccctgcctcggccatcgggatgaggtccctcaagtccctgcacaagcaggtcagagacccacccacatgccgttcctgggctacgccacgcgccatcccccggggctgtggacgcacccagcccccgacagacaggcgccctgagagctccgaaggcgcgatccccatccccaccagtggagaagccagaaccgcgattgttgcatctgggaaaacccagctggagccgaacggcccgtgcccccactgtaattgtgctgaaaatgtttctcaaatgacccaaattggctcttattttttctaatggccctttcaaagtattcatgaaattgatgctgtgtcataaaacaaaaataaaagatttcacagcaaaaaaaaaaaaaaaaaaaaaaaaaaaaaaaaaaaa

SEQ ID NO: 28546 - DNA, 5059 bp, Homo Sapiens
atgcataaaacaggtgatgagactgagcttcactcttctgagaaaggtttaaaagtagaggaaaatattcaaaagcaaagtcaacaaacaaagctttcttcagatgataaaaccgaacgaaaaagtaaacataggaatgaaaggaaattatcagtattaggcaaagatggaaagccagtttctgaatatattataaaaacagatgagaatgttcgtaaagaaaacaacaaaaaagagagacgcttgtcagctgaaaaaactaaggcagagcacaaatcaagaaggtcaagtgattctaaaattcagaaagattctctgggttccaagcaacatggtatcacattacagagaagaagtgaaagttattcggaagataagtgtgatatggactccactaacatggatagtaatttgaaaccagaagaggttgttcacaaggagaaacgacgaacaaagagcttgttagaagagaaacttgtgttgaagtctaaatcaaaaactcaaggcaaacaggtaaaagttgtagaaacagaattacaagaaggtgccacaaaacaggcaaccactccaaaaccagacaaggagaagaacacagaagaaaatgactcagaaaaacagcgtaagtctaaagttgaagacaaaccttttgaagaaactggtgttgaacctgtattagagactgcttcttcttcagcacatagtacacagaaggattctagtcatagagccaagttaccattagcaaaggagaaatataagagtgataaagactccacttccaccaggcttgagagaaagttgtcagatggccacaaaagcagaagcttaaagcatagtagtaaagacataaaaaagaaggacgaaaataaatcagatgacaaggatggtaaagaagttgacagtagtcatgaaaaggccagaggtaatagttcactcatggaaaagaaattaagtagaaggttgtgcgaaaatcggagaggaagcttgtcacaagaaatggccaaaggagaagaaaaattagcagcaaacactttgagcactcccagcggttcctcccttcagagaccaaaaaagagtggtgatatgacattgatccctgaacaagagccaatggaaattgattctgagccaggtgttgaaaatgtgtttgaagtatctaaaacccaagacaaccgcaataataattctcagcaagacattgactctgaaaatatgaaacaaaaaacttctgccactgttcaaaaggatgaattgagaacttgcacagcagattcaaaagcaacagctccagcttataagccaggccgtggaacaggagttaatagtaattctgaaaagcatgccgatcatagaagcaccttgaccaagaaaatgcatatacaaagtgctgtgtccaaaatgaaccctggggagaaagaacccattcatagaggaactactgaagtgaatatagattctgaaactgttcatagaatgttactgagtgccccatcagaaaatgatagggtacagaagaatttgaaaaacacagctgctgaagaacatgttgctcaaggagatgccactcttgaacattccacaaatttagactcctcaccatccttaagttcagtgactgttgtgcctctgagggaatcgtatgatccagatgtaattcctctgtttgacaaaagaactgttttggaaggtagcacagccagcacctcccctgcggatcactctgctctccctaaccaaagtctgactgttagggaatcagaagtccttaagacaagtgacagcaaagaaggtggtgaaggtttcacagtagatacaccagcaaaagcaagcatcactagcaaaagacacattccagaaggtcaccaggctactttattggatggtaaacaaggaaaggtaatcatgcctcttggaagtaagttaacgggcgtgattgtggaaaatgagaatattaccaaagaaggtggcttagtggacatggccaagaaagaaaatgacttaaatgcagagcccaatttaaagcagacaattaaagcaacagtagagaatggcaagaaggatggcattgctgttgatcatgttgtaggcctgaatgcagaaaaatatgctgaaactgtcaaacttaagcataaaagaagcccaggtaaagtaaaagacatatcaattgatgttgaaagaaggaatgaaaacagtgaggtagacaccagtgctggaagtggctctgcaccctctgttttacaccaaaggaacggacaaactgaggatgtggcaactgggcctaggagagcagaaaagacttctgttgccactagtactgaagggaaggacaaagatgtcaccttaagtccagtgaaggctgggcctgccacaaccacttcttcagaaacaagacaaagtgaggtggctttgccttgcaccagcattgaggcagatgaaggcctcataataggaacacattccagaaataatcctcttcatgttggtgcagaagccagtgaatgcactgtttttgctgcagctgaagaaggtggggctgttgtcacagagggatttgctgaaagtgaaaccttcctcacaagcactaaggaaggggaaagtggggagtgtgctgtggctgaatctgaggacagagcagcagacctactggctgtgcatgcagttaaaatcgaagccaatgtaaatagcgttgtgacagaggaaaaggatgatgctgtaaccagtgcaggctctgaagaaaaatgtgatggttctttaagtagagactcagaaatagttgaaggaactattacttttattagtgaagttgaaagtgatggagcagttacaagtgctggaacagagataagagcaggatctataagcagtgaagaggtggatggctcccagggaaatatgatgagaatgggtcccaaaaaagaaacagagggcactgtgacatgtacaggagcagaaggcagaagtgataactttgtgatctgctcagtaactggagcagggccccgggaggaacgcatggttacaggtgcaggtgttgtcctgggagataatgatgcaccaccaggaacaagtgccagccaagaaggagatggttctgtgaatgatggtacagaaggtgagagtgcagtcaccagcacgggataacagaagatggagagggccagcaagttgcacaggttcagaagatagcagcgaaggctttgctataagttctgaatcggaagaaaatggagagagtgcaatggacagcacagtggccaaagaaggcactaatgtaccattagttgctgctggtccttgtgatgatgaaggcattgtgactagcacaggcgcaaaagaggaagacgaggaaggggaggatgttgtgactagtactggaagaggaaatgaaattgggcatgcttcaacttgtacagggttaggagaagaaagtgaaggggtcttgatttgtgaaagtgcagaaggggacagtcagattggtactgtggtagagcatgtggaagctgaggctggagctgccatcatgaatgcaaatgaaaataatgttgacagcatgagtggcacagagaaaggaagtaaagacacagatatctgctccagtgcaaaagggattgtagaaagcagtgtgaccagtgcagtctcaggaaaggatgaagtgacaccagttccaggaggttgtgagggtcctatgactagtgctgcatctgatcaaagtgacagtcagctcgaaaaagttgaagataccactatttccactggcctggtcgggggtagttacgatattcttgtatctggtgaagtcccagaatgtgaagttgctcacacatcaccaagtgaaaaagaagatgaggacatcatcacctctgtagaaaatgaagagtgtgatggtctcatggcaactacagccagtggtgatattaccaaccagaatagcttagcagggggtaaaaatcaaggcaaagttttgattatttccaccagtaccacaaatgattacacccctcaggtaagcgcaattacagatgtggaaggaggtctctcagatgctctgagaactgaagaaaatatggaaggtaccagagtaaccacagaagaatttgaggcccccatgcccagtgcagtctcaggagatgacagccaactcactgccagcagaagtgaagagaaagatgagtgtgccatgatttccacaagcataggggaagaattcgaattgcctatctccagtgcaacaaccatcaagtgtgctgaaagtcttcagccggttgctgcagcagtggaagaaagggctacaggtccagtcttgataagcaccgccgactttgaggggcctatgcccagtgcgcccccagaagctgaaagtcctcttgcctcaaccagcaaggaggagaaggatgaatgtgctctcatttccactagcatagcagaagaatgtgaggcttctgtttccggtgtagttgttgaaagtgaaaatgagcgagctggcacagtcatggaagaaaaagacgggagtggcatcatctctacgagctcggtggaagactgtgagggcccagtgtccagtgctgtccctcaagaggaaggcgacccctcagtcacaccagcggaagagatgggtgacaccgccatgatttccacaagcacctctgaagggtgtgaagcagtcatgattggtgctgtcctccaggatgaagatcggctcaccatcacaagagtagaagacttgagcgatgctgccatcatctccaccagcacagcagaatgtatgccaatttccgccagcattgacagacatgaagagaatcagctgactgcagacaacccagaagggaacggtgacctgtcagccacagaagtgagcaagcacaaggtccccatgcccagcctaattgctgagaataactgtcggtgtcctgggccagtcaggggaggcaaagaaccgggtcccgtgttggcagtgagcaccgaggaggggcacaacgggccatcagtccacaagccctctgcagggcaaggccatccaagtgctgtttgtgcgaaaaaaaaaaaaaaaaaaaaaaaa

SEQ ID NO: 28547 - DNA, 6494 bp, Homo Sapiens
agggctgttcatgtgaagtgtgtggattctcatgccatataacttgtgtaaacaaagctccaaccacttgtccagttcctcctgaacagacaaaaggtcccctgggtatagatcctcagaaaggaataggaacagcatatgaaggtcatgtcaggattcctaagccagctggagtgaagaaagggtggcagagagcactggctatagtgtgtgacttcaaactctttctgtacgatattgctgaaggaaaagcatctcagcccagtgttgtcattagtcaagtgattgacatgagggatgaagaattttctgtgagttcagtcttggcttctgatgttatccatgcaagtcggaaagatataccctgtatatttagggtcacagcttcccagctctcagcatctaataacaaatgttcaatcctgatgctagcagacactgagaatgagaagaataagtgggtgggagtgctgagtgaattgcacaagattttgaagaaaaacaaattcagagaccgctcagtctatgttcccaaagaggcttatgacagcactctacccctcattaaaacaacccaggcagccgcaatcatagatcatgaaagaattgctttgggaaacgaagaagggttatttgttgtacatgtcaccaaagatgaaattattagagttggtgacaataagaagattcatcagattgaactcattccaaatgatcagcttgttgctgtgatctcaggacgaaatcgtcatgtacgactttttcctatgtcagcattggatgggcgagagaccgatttttacaagctgtcagaaactaaagggtgtcaaaccgtaacttctggaaaggtgcgccatggagctctcacatgcctgtgtgtggctatgaaaaggcaggtcctctgttatgaactatttcagagcaagacccgtcacagaaaatttaaagaaattcaagtcccatataatgtccagtggatggcaatcttcagtgaacaactctgtgtgggattccagtcaggatttctaagataccccttgaatggagaaggaaatccatacagtatgctccattcaaatgaccatacactatcatttattgcacatcaaccaatggatgctatctgcgcagttgagatctccagtaaagaatatctgctgtgttttaacagcattgggatatacactgactgccagggccgaagatctagacaacaggaattgatgtggccagcaaatccttcctcttgttgttacaatgcaccatatctctcggtgtacagtgaaaatgcagttgatatctttgatgtgaactccatgggatggattcagactcttcctctcaaaaaggttcgacccttaaacaatgaaggatcattaaatcttttagggttggagaccattagattaatatatttcaaaaataagatggcagaaggggacgaactggtagtacctgaaacatcagataatagtcggaaacaaatggttagaaacattaacaataagcggcgttattccttcagagtcccagaagaggaaaggatgcagcagaggagggaaatgctacgagatccagaaatgagaaataaattaatttctaatccaactaattttaatcacatagcacacatgggtcctggagatggaatacagatcctgaaagatctgcccatgaaccctcggcctcaggaaagtcggacagtattcagtggctcagtcagtattccatctatcaccaaatcccgccctgagccaggccgctccatgagtgctagcagtggcttgtcagcaaggtcatccgcacagaatggcagcgcattaaagagggaattctctggaggaagctacagtgccaagcggcagcccatgccctccccgtcagagggctctttgtcctctggaggcatggaccaaggaagtgatgccccagcgagggactttgacggagaggactctgactctccgaggcattccacagcttccaacagttccaacctaagcagccccccaagcccagtttcaccccgaaaaaccaagagcctctccctggagagcactgaccgcgggagctgggacccgtgagctgcctcagcactgggacctctcgctctccgctccctgccactcgcctcctctcactttcatctcttccctccacctcgcctgctcggcctgaaagccaccaggggctggcagcagtagcaggacagggattcaggagttctgacgacacgactctcagatccacgcccccagcctaacagcaacaacaaagacagactttccgtagcagcttagattaacgttgatttcattccatgcacttagagttgctttcagtaacattttacccctactcccaaaggtagcttaaatagacagattacacaaatgtaagtgataagaataagattagacagattttgctttcacagtagagtctcattatagtcctaaaatagctcatgggcttctccgcatccagaagggagaattggtccctggagtggctcactaagctcttaatcagcaaacgcagtgagtatcaacctgattgttgccaggaaatccttatgaattaaaacaatgcatattttactacagtacagagtttaaatgaatacataaatgtagaagtactgaatgtatatatttaaaaggagcctcttgtattcaacaaaagatggatgcatatataagagagatgatttaatttaaagaaatatgttgtttcttgtctgtaatgtaatgtaaagggtggaaaggcctcaagctcacatttgtagagagagagcgagagaaatcagagttccctttattgccctgtcctcaaactggtcataggctctagtcacctggggagctgtagaaaacacttgcagagccaggttttgctggtttggggcatgccctgggcaccagagctttaacatttgaagccacttcagcagcagcagcaaaaggcgaactcatctctacccaagatgtttcttttcctagtggtggaatttgaacacttctcactttttattgtattttatcttccgcagatagatgtagaaatacacgattctgtcacctctgatcccttccatctgaaaggttacaaggagtgttgtagcttctgaaggtgcagaaaacaatttctaaaaatgcttttattcctgggctaatcctgtccctccctaagtcacagcgaggtgtctgtcccagggctggagatgcttcccaaggaggagtctgttttgttgagagtgggcgtgggcttcttcacataagcctggggaaggaagaaaaaacggctttcattaccaaataatgtaaaacctcaaaagcaagggcttcaacagccttaaccaaatattattccccatagccagtggaaaatggatgtgacaaccccagtgcgcaggccagagtgagtgagcccagcacggcgctccgactggcttcctctctcaggtgctggattgtggggttagtggcatttccagctggattcctcctgttgtagttgccataaggaaatgagatgcagaatcagaaggatctatttctacagaatcatttcaccagttaagcacatgagtagagaaagagataaaaataaaagtatctcatgaaggaaagagattttgcctctcttttacttttcacctaagtttctctgagaaatagagacaggattctctctttaaaattcagtgaaaatgaagaaagttttcctgcagttgctaacctgagttgcagtgtttaaggccatcatttcactgctgctgtctgtgactccacgtctgtgtcactgaggtgacctgcgtgtcactgaggtggccaccatgctggcctgcggcatgtgcagggagctgaggctgtttccaggtgatgctgctgtgtggagaaggttctgagatgcggtgagggaagaaaggatcctgctggggattccattgtaagcacctataatcgggaattttcatgtaacagctttgacatttaaacattctgagtttggtgccagctcagatttgattatattttattttggatgggtgtaattcacagcacagttctaatctcccaaatctttctgctttttagaatgaagtataaaaatacttttctcacctgaataccaagggttggccctttagttggatcattgtcatatgacttggtagatccttgtcctcagcacctcacgtgagagaagggagtcagccagccggccccctgcttggtgctcgtgaccagctcgcaccccttctgtccacccttctctcctctcctccccactctccccaccctcctcactctccccaccctcccctcctctcctcctcactcttcccaccctccccatccccaccctccccatcctcctcttccctttccccctgccttctcctctctcccttctcttctcaggcagggaggaggccatcccaagccgagattaacaggacttgacataagccattagtttgtagctttgacaagtaattatgaatttttgttgcttataggtgcttattttgcaaaggatgcttttaagatcaaaataataaccctacctaaagtctagctccactgctatgggtcatactcttcagcctcccaacagggcagagagagagagctactgaggcttgtctaggttgccaggctaactgggcggcttgtccatattcaccccatggattgcaccatggcactctttgatttttccactgcaatggcaagtaatctcatcagtcataatagagcagtcccgaatgcgtgcagattctaaaagcagggctttaggagagaaacactgccagggggaatagttttggggagggttttcccaaaataacggtcatcctactgggtttatcccacccttaaatatgaagcctgttacctccagaagcttctgagaagaatgatgtgaaaagacagggagtgggttctaggcaaagaaaacataatgaccattcagaggaatcagtagcacagctcacagataaagtattttattactatctgaagttttcttttgttttcatgcaggacattttaaaaacgtatatggcagcagaaacctgtttctcaatagaaaaaatacattcagaggcatttctgggatagtctatctgtgttagtatttggtgctatctatgtccagccaagttatctaccctcaaattctgactaatcatgtttgtgctttgggtatttaaaattacatacatatatattctttttgccaaaaacaaaagtcttgcttcttgtcaaatgattgctaaagtagatcttacattttttgttattatgtatgtatttatacacatccccaacacacttagtgatttctgttatttcctagggagcacagctttaaggctatgagatacaactaaaaggagcccatctatttggttttccagccaattattgtactcacatttcaggggagaatctgaaattcctgtcatgtttacagcaacaatctatcattcctggctagctctcagcctctctctccttccataggttagaattatgtcattttgttacttagtggccacgtctatttctgagaaagactggttacatttatgtggcatctcaggtatcattaaggaaaagccagagcaggggtgagcagaggtcaaaaccacagacgcagcagggccatttgccgcctttggccgggatcacaaccactgcagtctcccagcaggtaggccttgccaagcctaaggctccccatctaatctagacagaggggcgctcagagcagactttgccgtagcccatgtctggtgagcacaacagggaatgaattgggcactccactcccccgtctctctggcccagccctgaactagatgagctgcatttcatggagcccattttaaaatctctttccttatgactttgttactcaagtccagagttctctgtgcacttctgctagataaggagtgtaagccctgccccccagcactggcagcacgctgggccctccccacacaggacaccgtgcagttccgggggaagctgactcaaatcaaccttgaaatctcatgaaaacaaaatgacttgtctttttatttgatagtgtaatatcattcattttataaattttttagggtttttctcgtaatattgtacagttttgcatggcctggtgtgatcattttttggttagaatataatgctgacaaatgtggatggaggggaagatactgctttagcctatcactccttattttattttgtttggttttatgccctcagtgtcttagggaactttttaagagatcctctgctaccaaacaatgatgtggattcttttgcacagaaatatttaaggtgggatggtaaaaaaatgtcacaaaagactcctcaccaatactttatgttgatatcacttaatattaaccagactttgctgtattgcaataaaacagagaactgttagcattaaaaaaaaaaaaaaaaaaa

SEQ ID NO: 28548 - DNA, 5166 bp, Homo Sapiens
ggaccctggaaaaatctgtctcacccacaaagatgtgggctcagctccttctaggaatgttggccctatcaccagccattgcagaagaacttccaaactacctggtgacattaccagcccggctaaatttcccctccgttcaggaggtttgtttggacctgagccctgggtacagtgatgttaaattcacggttactctggagaccaaggacaagacccagaagttgctagaatactctggactgaagaagaggcacttacattgtatctcctttcttgtaccacctcctgctggtggcacagaagaagtggccacaatccgggtgtcgggagttggaaataacatcagctttgaggagaagaaaaaggttctaattcagaggcaggggaacggcacctttgtacagactgacaaacctctctacaccccagggcagcaagtgtatttccgcattgtcaccatggatagcaacttcgttccagtgaatgacaagtactccatggtggaactacaggatccaaatagcaacaggattgcacagtggctggaagtggtacctgagcaaggcattgtagacctgtccttccaactggcaccagaggcaatgctgggcacctacactttggcagtggctgagggcaagacctttggtactttcagtgtggaggaatatgtgctgccgaagtttaaggtggaagtggtggaacccaaggagttatcaacggtgcaggaatctttcttagtaaaaatttgttgtaggtacacctatggaaagcccatgctaggggcagtgcaggtatctgtgtgtcagaaggcaaatacttactggtatcgagaggtggaacgggaacagcttcctgacaaatgcaggaacctctctggacagactgacaaaacaggatgtttctcagcacctgtggacatggccacctttgacctcattggatatgcgtacagccatcaaatcaatattgtggctactgttgtggaggaagggacaggtgtggaggccaatgccactcagaatatctacatttctccacaaatgggatcaatgacctttgaagacaccagcaatttttaccatccaaatttccccttcagtgggaaggtaagagttaggggccatgatgactccttcctcaagaaccatctagtgtttctggtgatttatggcacaaatggaaccttcaaccagaccctggttactgataacaatggcctagctccctttaccttggagacatccggttggaatgggacagacgtttctctggagggaaagtttcaaatggaagacttagtatataatccggaacaagtgccacgttactaccaaaatgcctacctgcacctgcgacccttctacagcacaacccgcagcttccttggcatccaccggctaaacggccccttgaaatgtggccagccccaggaagtgctggtggattattacatcgacccggccgatgcaagccctgaccaagagatcagcttctcctactatttaatagggaaaggaagtttggtgatggaggggcagaaacacctgaactctaagaagaaaggactgaaagcctccttctctctctcactgaccttcacttcgagactggcccctgatccttccctggtgatctatgccatttttcccagtggaggtgttgtagctgacaaaattcagttctcagtcgagatgtgctttgacaatcaggtttcccttggcttctccccctcccagcagcttccaggagcagaagtggagctgcagctgcaggcagctcccggatccctgtgtgcgctccgggcggtggatgagagtgtcttactgcttaggccagacagagagctgagcaaccgctctgtctatgggatgtttccattctggtatggtcactacccctatcaagtggctgagtatgatcagtgtccagtgtctggcccatgggactttcctcagcccctcattgacccaatgccccaagggcattcgagccagcgttccattatctggaggccctcgttctctgaaggcacggaccttttcagctttttccgggacgtgggcctgaaaatactgtccaatgccaaaatcaagaagccagtagattgcagtcacagatctccagaatacagcactgctatgggtgcaggcggtggtcatccagaggcttttgagtcatcaactcctttacatcaagcagaggattctcaggtccgccagtacttcccagagacctggctctgggatctgtttcctattggtaactcggggaaggaggcggtccacgtcacagttcctgacgccatcaccgagtggaaggcgatgagtttctgcacttcccagtcaagaggcttcgggctttcacccactgttggactaactgctttcaagccattctttgttgacctgactctcccttactcagtagtccgtggggaatcctttcgtcttactgccaccatcttcaattacctaaaggattgcatcagggttcagactgacctggctaaatcgcatgagtaccagctagaatcatgggcagattctcagacctccagttgtctctgtgctgatgaagcaaaaacccaccactggaacatcacagctgtcaaattgggtcacattaactttactattagtacaaagattctggacagcaatgaaccatgtgggggccagaaggggtttgttccccaaaagggccgaagtgacacgctcatcaagccagttctcgtcaaacctgagggagtcctggtggagaagacacacagctcattgctgtgcccaaaaggaaaggtggcatctgaatctgtctccctggagctcccagtggacattgttcctgactcgaccaaggcttatgttacggttctgggagacattatgggcacagccctgcagaacctggatggtctggtgcagatgcccagtggctgtggcgagcagaacatggtcttgtttgctcccatcatctatgtcttgcagtacctggagaaggcagggctgctgacggaggagatcaggtctcgggcagtgggtttcctggaaatagggtaccagaaggagctgatgtacaaacacagcaatggctcatacagtgcctttggggagcgagatggaaatggaaacacatggctgacagcgtttgtcacaaaatgctttggccaagctcagaaattcatcttcattgatcccaagaacatccaggatgctctcaagtggatggcaggaaaccagctccccagtggctgctatgccaacgtaggaaatctccttcacacagctatgaagggtggtgttgatgatgaggtctccttgactgcgtatgtcacagctgcattgctggagatgggaaaggatgtagatgacccaatggtgagtcagggtctacggtgtctcaagaattcggccacctccacgaccaacctctacacacaggccctgttggcttacattttctccctggctggggaaatggacatcagaaacattctccttaaacagttagatcaacaggctatcatctcaggagaatccatttactggagccagaaacctactccatcatcgaacgccagcccttggtctgagcctgcggctgtagatgtggaactcacagcatatgcattgttggcccagcttaccaagcccagcctgactcaaaaggagatagcgaaggccactagcatagtggcttggttggccaagcaacgcaatgcatatgggggcttctcttctactcaggatactgtagttgctctccaagctcttgccaaatatgccactaccgcctacgtgccatctgaggagatcaacctggttgtaaaatccactgagaatttccagcgcacattcaacatacagtcagttaacagattggtatttcagcaggataccctgcccaatgtccctggaatgtacacgttggaggcctcaggccagggctgtgtctatgtgcagacggtgttgagatacaatattctccctcccacaaatatgaagacctttagtcttagtgtggaaataggaaaagctagatgtgagcagccgacttcacctcgatccttgactctcactattcacaccagttatgtggggagccgtagctcttccaatatggctattgtggaagtgaagatgctatctgggttcagtcccatggagggcaccaatcagttacttctccagcaacccctggtgaagaaggttgaatttggaactgacacacttaacatttacttggatgagctcattaagaacactcagacttacaccttcgccatcagccaaagtgtgctggtcaccaacttgaaaccagcaaccatcaaggtctatgactactacctaccagatgaacaggcaacaattcagtattctgatccctgtgaatgaggataggagctggaaactcaattagtcctctgtgacattactggagggtggaacattcttctgtcgcttgaagcagaactcattcaatcaaataatttaatttctctgactagtatatgggtaacaaatgaatatgtctgaacctcagctataatactttctactacctttgcaaggagatgggataggaacaatcactcagaggaggcgttgcatggacagggtcatagggggaagaaaggtggtttagctgttttatttagccattcagggggctctccagagaggagacggtggtagagggtgaactagagaagataagaatgtcttcctaggccggatgcggtggctcacgcctgtaatcccagcactttgggattgcgaggtgggcggatcacttgaggtcaggagttcaagaccagcctggccaacatggtaaaacccgtctctactaacaatacaaagattagcctggtgtggtggcacgggcctgtaatcgcagccccttggaaggccaaggcaggagaatcgcctcaacactggaggtggaggttgcagtgagctgagattgtgccactgcactccagcctgggcaatgaggcaagaccctgtctcaaaaaataataaataataataataataatgtttttctagagtttcagtctaagggaaaatgtgatttagggctttggaaattggctaaaaaaataaaaatggaaaagaaaaaaataaaaaaaaaaaaaaatataaaaaaaaaaaaaaaaaaaca

SEQ ID NO: 28549 - DNA, 8635 bp, Homo Sapiens
caaatgctctcagcaaacagtcagctttacaaatggagacagcaggaccagaagaggagccagccggagctacagaatccttgcagggccaagatctcttcaacagggcttcaccactggaacaagcacaagactcacctactgattttcatttacagtcatggatgaataataaggaacccaagattgttgtgcttgatgctggaaaacattttgaagacaagactctaaagagtgacctaagccacactagcttattagaaaatgagaaacttatcttaccgacaagcttggaagattcttctgatgatgatattgatgatgaaatgttttatgatgatcatttggaggcttattttgaacaactggcaattccaggaatgatatatgaagacctagaaggaccagaacctccagaaaaaggttttaagttacctacaaatggtcttagacaggcaaatgaaaacggtagcttaaactgcaagtttcaatcagaaaataacagctctctgatttccctcgactcacactcttctgaaacaactcacaaagagtctgaggaaagccaagttatttgtctacctgggactagtaattctataggtactggagatagtagaaggtacacagatggtatgttaccattttcctctggtacttggggaactgagaaagaaatagaaaatttgaagggtattgttccagatcttaacagtgaatgtgcaagtaaagatgttctggtgaagaccctcagggctattgatgtgaaacttaactctgataattttcatgatgcaaatgccaatagaggtggttttgatctgactgaccctgtaaaacagggggcagagtgtcctcaccaaaataagacagttttgcacatggatggatgtttagacactgagactcctacggtgtccattcaagaaaatgtggatgtagcctctttgaagcccattagtgacagtggaattaatttcactgatgccatttggtcaccaacttgtgaaaggcgaacatgtgaatgtcacgagtccatcgaaaagaataaagacaaaacagatctcccacagagtgtggtctatcaaaatgaagagggtaggtgggtcacagaccttgcctattacacatcttttaatagcaaacaaaatttaaatgtgtctctaagtgatgagatgaatgaagacttcagatctggttccatcatttggctattttattagatcaccagagaagagagaacctattgccttaataagaaaatctgatgtatcaagaggtaatttggaaaaagaaatggctcatcttaaccatgatctatattcaggagatttaaatgaacagtcccaggcacagctaagtgaaggatcaattacacttcaggttgaagcagtagagagtacttcacaagtggatgaaaatgatgtgacgttaacggctgataaaggcaaaacagaggacactttcttcatgagcaacaaaccccaaagatacaaagacaagctaccagatagtggtgattctatgcttaggatcagcaccattgcttcggccattgcagaggcatcagttaatactgatccttcccaacttgctgcaatgatcaaggcactttcaaataaaaccagagacaagacttttcaggaagatgagaaacaaaaggactattctcatgtgcgtcatttcttacctaatgatttagaaaaaagtaatggatccaatgcacttgatatggagaaataccttaaaaaaacagaagttagtagatatgaaagtgcattggaaaacttttcaagggctagtatgtctgatacttgggatttatctttgcccaaagaacaaactactcaagacattcatccggtggacttaagtgctactagtgtaagtgtgagggcaccagaagaaaacacagcagctattgtttatgttgaaaatggagagagtgagaatcaagagtcatttagaaccataaactcctcaaattcagttacaaatagagagaataacagtgcagtagttgatgtgaagacatgttccattgacaacaaattacaagatgttggtaacgatgaaaaagctacctcaatttccactccatctgatagttattcatcagtgaggaaccccagaataacatccctttgtctgttaaaagactgtggagaaatacgagataacagagaaaatcagaggcaaaatgagtgtgtcagtgaaataagcaacagtgagaagcatgtgacttttgaaaaccatcgcatagtctcacctaaaaatagtgatttgaaaaatacctctcctgagcatggtggacgtggctcagaggatgagcaggagagcttcagaccttccacgtcaccactgagtcattcttctcctagtgaaatttctggaacgagttcatcagggtgtgcgttagagtcctttggttcagcagctcagcagcagcagcctccctgtgagcaggagttgtctcccttggtgtgctcgcctgctggggtgagcaggctgacgtatgtgtctgaaccagagagctcctatcctaccacagccacagatgatgccctggaggaccgcaagagtgatatcaccagcgagttgagtaccacaattattcaaggcagtccagccgcattggaggaacgggctatggaaaaattgagagaaaaagttccatttcagaatagaggaaaaggaacattatcatctattatccagaataactctgatacaagaaaagcaactgaaactacttctctgagtagcaagcctgaatatgtaaaacctgactttagatggagtaaagatccttcctccaaaagtggaaatctgttggaaaccagtgaggtaggttggacatcaaaccctgaggaattggacccgatcaggctggctctcctgggcaagtcaggtctgagctgtcaggtggggtcagccacatcacaccctgtgtcctgccaggagcctatagatgaagatcaaagaataagtcctaaagataagtcaactgctggccgtgagttcagtggccaggtttctcatcagaccacctctgaaaaccagtgtactcctattcccagcagcacagttcacagctctgtggctgacatgcagaacatgcctgctgctgtgcacgcactcttgacacaaccctctctcagcgctgctccttttgctcagcggtatttgggaacactcccttcaactggaagcaccaccttgcctcagcgccatgctggcaatgccacagtctgtggcttctcaggaggccttccctatccagctgttgcaggagagcctgtgcagaactctgtggctgtgggaatttgtctaggatcaaatatcggctctggatggatgggtacctcttccctctgtaacccatattctaataccttaaatcagaacctgctaagcacaacaaaacctttttcctgtgccgtctgttggtacaaactgtggaattgaaccatgggattcaggagtgacatcaggattggggagtgtccgagtgcccgaggagttgaagcttcctcatgcttgctgtgtcgggatcgcttcccagaccctcctcagtgtgcttaatccaactgaccgctggctgcaagtcagcattggggtcctcagcattagtgttaatggtgaaaaggtagctttctatgtctttctcatttaacctaacagttgcattgtgattaggtgcttgatttcccccatctctagtgctaggttctcccttcacgcctttattaatgcacacagtcattgccatggtatctttctctcagaccccttttgttgtagtgcttgtagagtgtaaagtgaaacagttttgcattttccatcatttattatttatattttattgttatttattggtaaattcctataaatttgcttttagtgctattatttaaatcatcaaaagttctgagtttcttgtttctacttgtcagttttgttaaaggtgattgaatataagtaaccatgacttgtaaaaaaaaaaaagaaagcagttactcttggagcttatgccttcatttggcaagggaagtctttttaactagtttatctgatgattttcttacatgagcttttgaaatacctggaaatgcagttttaatatgaacttttaagacagatgtctcttacatgatcaattacagttgctataattctagactctaaatcttctctcctggttacagtgaccatttgaacattggtgagtggagaggggggatatatggtcagcagctgttttgaaatgtcccagttttacgactgttacttgtgaatcagtattggtggatgcttccctcgtgcctcttagtggccatcgtctgcctggtaaaataagatcgcctccccctacgccgtcttggcttttcccctctacttccagtccttaggttagatgaaaagtaggtgattgaaggagaggattgagggtggaaggtgggctgtgaagactttttgggggcatcctggagtctgtgaatgaagcagtgttgtctatggaagtggggagtagaaaagaagatccccattgacagtgaggagggagggtggctggagttgtcactgcagtcgaggcggagtcagggctgtgggacctcagcggttagcctgactcttcttccccccagcccccacccactgctgtgttgtgtgtgctagagagacttacagggctgtgaaagagtgacctttgtcagtgtcctttttaagacaagtgagtgtaagggtcaatgtgcttgcttggaggtggactggggagacagccttggtgcagcaagaacattcaactcaggaagcatttgactcgttgtacttcagagaccataaatgacaaggttttgacatttttgaagagataataaatgttttaatttggcagtttgagtgattgggaaaaggaatcttaaactaggtgattctacttgattttcagtgtgaagccattaataacgaactttatggctcttttttgaaggtggatctttcaacatatcgttgtttagttttcaagaataaagccatcataagacctcatgccacagaagagataaaagtgctttttataccatccagtcctggggttttcagatgcacattcagtgttgcttcttggccatgttcgacagatgctgagaccatcgtacaggcagaagctttggccagcaccgtcactctcactgccattgccgagagtcctgttattgaggtagaaacagaaaagaaagacgttcttgattttggtgacttgacttatggaggctggaaagccctcccactaaaattgataaaccgaacgcatgccactgtgccaattagactgattattaatgctaacgctgtagcctggcgctgtttcacgttttccaaggaatccgtccgagctcctgtggaagttgctccttgcgctgatgtggtcactcggctagcaggcccttctgtggtcaaccacatgatgcctgctagttatgatggacaggatccagaatttctgatgatttgggttcttttccatagtccaaagaaacagatcagctcttcagatattctggactcagcagaagaattctcggcaaaagttgatatcgaagttgacagcccaaaccctacgcccgttcttagaagtgtgagtctccgagcaagagcaggaatagctaggatccatgctcccagggacttgcagacgatgcatttcttggccaaagtggcttcctcaagaaagcagcacttacctttgaaaaatgctgggaacattgaagtttatttggatatcaagatcccagaacaaggaagtcacttttcagtggatccaaagaatctactccttaaacctggagaagaacatgaggttattgtttcatttactccaaaggatcctgaagcctgcgaggaaaggatcttgaaaatatttgtgcagccatttggacctcagtatgaggtagtgttaaaaggcgaagtcatttcttcaggaagtaaacctctgtcacctggaccttgcttagatattccatcgattttgtccaacaaacaatttctggcttggggaggagtccctctaggtagaacacagcttcagaaactagctttaagaaataattctgcatctacaactcaacatttacgactgcttattagaggacaagatcaggactgctttcagcttcagaacacttttggttcagaacagcgattgaccagtaactgtgagatcagaattcacccaaaggaagacattttcatctctgtattatttgcacctactcgattatcttgcatgttggctagactagaaatcaaacaacttggaaatcgatcacaaccaggcattaagttcacaatacctttgtctggatatggaggaacaagcaatcttattttggaaggcgttaaaaaattatctgacagttacatggtaacagtgaatggcttagtacctggcaaagaaagtaaaattgttttttctgtccgcaacactggctcccgagcagcttttgttaaagcagtaggttttaaggattctcagaaaaaagttttgctggatcctaaagtattgaggatttttccagataaatttgtactcaaggaaagaacacaagaaaatgttactttaatatataatccatcagacagaggaatcaataataaaactgcaacagaactatcaactgtatacttatttggtggagatgaaatttcaagacagcagtatcgcagggccctgttacataaaccagagatgataaaacagatacttccagaacatagtgtgcttcaaaacattaattttgttgaagcatttcaagatgagctattagtaactgaagtatatgatcttccccaacgacctaatgatgttcagctcttttatggaagcatgtgtaaaattatactttcagtaattggagaattcagagattgcatttctagcagagaattccttcagccttcttccaaagctagcttggaatctacaagcgacttgggagcttctgggaaacatggtggcaacgtctctttggatgttttaccagtcaaaggtcctcagggttctcctcttctctcacgggcggctcgcccgcctctggatcagctggcctccgaagagccgtggactgtcctacccgagcacttgattctggtagctccttctccttgtgacatggcaaaaactggacgtttccagattgtgaataactctgtgaggttactgagatttgagctgtgctggccagcgcattgcctcacagtcacgccgcagcatggatgtgtcgcgccagagagtaaactacaaattcttgtgagtcctaattcctccttatccacaaaacagtcaatgttcccgtggagtggtttgatctatatacactgtgacgatggacagaagaaaattgtgaaagttcaaattcgagaagatttaactcaagtggaacttttaactcgtttgacctccaaaccatttggaattctttccccagtatctgagccttcagttagtcatttggtcaaaccaatgacaaaaccgccttccacaaaagttgaaataagaaacaagagtattacttttcctacaacagaacctggtgaaacttcagagagctgtctagaactcgagaatcatggcaccacagacgtgaaatggcatctgtcatctttagcgccaccttatgtcaagggagttgatgaaagtggagatgtttttagagctacctatgcagcattcagatgttctcctatttctggtctgctggaaagccatgggatccaaaaagtctccatcacatttttgcccagaggtaggggggattatgcccagttttgggatgttgaatgtcaccctcttaaggagcctcacatgaaacacacgttgagattccaactctctggacaaagcatcgaagcagaaaatgagcctgaaaacgcatgcctttccacggattccctcattaaaatagatcatttagttaagccccgaagacaagctgcgtcagaggcttctgctcgcatacctgagcagcttgatgtgactgctcgtggagtttatgccccagaggatgtgtacaggttccggccgactagtgtgggggaatcacggacacttaaagtcaatctgcgaaataattcttttattacacactcactgaagtttttgagtcccagagagccattctatgtcaaacattccaagtactctttgagagcccagcattacatcaacatgcccgtgcagttcaaaccgaagtccgcaggcaaatttgaagctttgcttgtcattcaaacagatgaaggcaagagtattgctattcgactaattggtgaagctcttggaaaaaattaactagaatacatttttgtgtaaagtaaattacataagttgtattttgttaactttatctttctacactacaattatgcttttgtatatatattttgtatgatggatatctataattgtagattttgtttttacaagctaatactgaagactcgactgaaatattatgtatctagcccatagtattgtacttaacttttacaggtgagaagagagttctgtgtttgcattgattatgatattctgaataaatatggaatatattttaaaaaaaaaaaaaaaaca

SEQ ID NO: 28550 - DNA, 7610 bp, Homo Sapiens
gaggagcggtgagctcccgattgtagaagcctagacagcacagagagtgacctgctcccaggttaggaagtaagatgtcagatgtttgcagatctctgtctcagtctcacttaatcaccattatacacaatgtgtaagtagctcacggtgtttctgcggggagggcgtggaaagcagaggctggtgttgaaggacagtctggagtggtatcagtggccaggaaccacgccagagaggaaccacagcctcttgctgtggggtggggccgggtagtgctgctgaaagctcccccaggtgactctgagcagcagcggaggctgagccactgttctagagccaccagtcagctgtgtggggaaatggccaccacagcaagtttctgtgaagaagtagtagtatgatttcatggagacaaactaggacgatacttgaggattgtgtgggggaccctgagtagggaaagccctttccacgtggctggctttgacacaaacacaccattccagatgtggggagggtcactattttggtttgatgtatggagcccttggtcaggagcagctctgggtagggcactgtgatgaaaatgctattcactaatactgtcaagcagtgaatagtgccaggaactatccaagcagtttcgccctctgccttaatccctaccacagccctgaaagtctcagtgacaatcccatgattttacagatgaggaaaccaaggcaccgagcagctaaatggcttcccccaggactgccttgtggtactcgccgtggggacctagcagctggctccagggctgtgctcttcagcactcctcccacagtgtcccgagagctcaggcaggggttagagaggttgtggccgagctgtagggtaggagagagaagccatgacatctcggagtacagcagatgacacagcacagggactgcgtgctgagaacacatgcctgcacggtggccgctgcaggaactgaggaggttatgctaaggcctcatttaattaattttccccacatcccacccggaagggaggaatgagttttcgctgctcggatgccttcgtttctcattacttttttcagtaaaataacaaggacagatttgagtgcccaggtcagtgggaaaggattagcaacagcctcgccggcgtcctgctccctccctcatcgtgctgtggtccttgcagctgggctcctgctggtgctgacctccagccgtggggccacggaggaattgggatcctttccgcagggcctctgaagtgcctctgaatgcgtgtttgttttgcaggaaatgctgcttgggcgatggccacttccaaacctgatatcttgattatacttttacagaaattaatggaggaaggaaatgtgatgtacaaagtaagtggttccgcccttttctttgccattgaaactgcctgggagcaccctcttaattgggtatataatggctacagctgtgctactgcacagtctccatgtaatagaagtgcaaaaagtggctgggtggggtggctcacgcctgtaactccagcacttttggaggccgaggtgggcagatcacttgaggccaggaattccagaccaacctggccaatatggcaaaaccccatctttactaaaaatacaaaaatcagccaggtgcctgtaatcccagctactcgggaggctgaggcaggagaattgtttcaatctgggaggcagaggttgcagtgagctgagattgcaccactgcactccagcctcagcaacagagtgagactcagtctcagaagaaaaaaaaaaaagtgccaagaggtgctgacctggcctcatgcccgttgttggcttaatatctttccggcagaatcttaaaggtagaaagcacctctctttgtgtctgagagccattatttctgagctaatccttgaggttgtagtggtgacttcctgtctgaagccatggcgtgaagctgagtcacctctaggtcaactgaacatcatagagaaggttcctcagcccttcacattctgagttcagaacaccatgctgaggcacagtcatgagacgtgggagaggaacacccagcagacatttctagaagaaaagggttattctgtctcctaagcctttcctaatttttaatatctattaatttctagaatttgaaagtgttgttagagatttttacttaatacagtcaagtaatacctcagttactcagaagactgaattaattttttccattttcccttggaaatggaaatatgatttacagatcaataaacttcactttaaatttttccaaataagacatcagtttaggtcagaggtcagcaaactttttttgtaaagggccagacagtaaatgttttaggctttgcagactgtgtggcctctgtcacaactccccagttctgatgtgggggcacagatagcacagagtgaatgaacacagctgtgtcccaataaaactttatttgtaaacacaggtggctggccagacttagtatccaagctatagtttgccaacccctggtttagatagatatgcaggccatttgcataggtcactattctttgcagctctgtgattagacagaattaaaagattataggggaaaaactagattatgaccatgttaatcctttttactgttaggcagctgtatttggtatgttgtagattttttccttctcattttttaaaatagtaacaaataaataggcaatatagcatgacccagcagggttcctggcttggaatcagcttgaaattgagttgagagtgtgtattgttgtggctttgaagtgcttttaatatggattggtaggcaattatgtcagaaataggaagccattttcaacaggcttcatacctgctgtgcaatgggactgactgagcaaatggatttttttagctttgaaaatgatgtgtggtgctgttctgatttttaaagcccatgttttaattcctcttagaagaaaaattattattctgcagcaagctctctaggtttatctacaagatgctacttgtcctaggaataggatcagtttttcatctgatttctattacacttagcattcaaatagatttgagatcattcttgaaataattttcaaaaatacataccagaaggtaatctgattcattaagtttggtaattatcaatctagcagtttacagacaccttattgtaaaaccagcttctttctcactgtgtaaccacaggatgcgggtgcatgtgaggacagtgaagccctcatgtgccagcccagttagtgaactagctcccaccttgacacttgtttggatgctttcaatgttctgtcatgggtttgcaggggggagtaaactccccacggtgttccgggtgtgggagttattcattttagaacctctgaaaaaggacaaatgtttgtgatttttgaatcctagaaagggaaaatgaaagaggcagcccagaggtaccagtatgccttaagaaagtttcctcgagaaggattcggagaggacatgagacccttcaatgaattaagggtttccctctatctcaatttgtcacgatgccgaagaaaaaccaatgtaagctgtgcccctttattccaacccagtcttccagcaacagagcccttctccagcggtgaaggccagcccttctccagaccagatcctgggccctcctgtccaatttgcttgcacatttacatgaacctggcatgtgggaaacagctcctatccgtgactatcgtttggtcacggctgctacgctcctcgcatgatgttgaaggaatgcacttgggtttcgtttccttggcctcagtaatgagaagcaaatgcagtctgctcctctgcagcttcccaacactgttgctgctggcactgccgtccccggattcaggagagtccaacccaagcctattgtggtgggcctgccttctgtgttaggtttgctcagagggtctgccagtaactaatttgtaaccggtcgtggggaactcatagtcgatttgtaactagtagatctgtttcagtagtacttcctaccttttttttaactgtgtcctcctgccccagtctgttgagctgcttgcttctgtgccctgctgccggaatagatgcagtgtctgcgctcctctctgaggctgcccctccaccgggctgtgaggttccaccatctggccttcttggggcactgttactaccactgttttcatagtggattcttctcctaatgatattaatcaaccatcattatctcctcactttaaaacaagatagaaaacggaactttcccttcctccctctctggctgtgcctcagagcgctgctaccctttagaacaaaactagacgggcttcccacaatcgtgtgtccaggctgcttctgactcctgtatttcttgtcgacaccaggactttggcatggcagaggaatttgcttccaaggctctcgaattgaagcccaagtcctatgaagccttttatgccagagcaagagcgaagagaaatagcaggcaattcgtggcagctctggctgacctgcaagaggctgtgaaactctgtcccaccaatcaggaagtcaagaggcttctggcccgcgtagaagaggagtgcaaacaactccagaggagtcaacagcaaaaacagcagggcccgctaccagctccactcaacgactccgagaacgaagaggacaccccaacccctggcttaagtgaccactttcactctgaggagactgaagaggaagaaacttctccccaggaagaatctgtttccccaactcccaggtcccagccatcctcatctgtcccttcctcatacatccgaaaccttcaagaagggttacagtccaaaggaaggccggtatcgccacagagcagggcaggaatcggcaagtccctgagagagcctgtggcccagccagggctgctcctgcagccctccaagcaggcccagatcgtgaaaaccagccagcacctgggctctggccagtcggcagtgagaaatggcagtatgaaagttcagatctcttctcagaaccctcctccaagtcccatgccagggagaatcgctgctgctcctgctgggagcagaacccagcatttagagggaacgggtactttcactacaagagctggttgtggccactttggggatcggctgggccccagccagaatgtccgcctgcagtgtggtgagaatggccctgcacaccctttaccaagtaagacgaaaaccacagagaggcttctgtctcattcctccgtggctgtggacgcagcccctccaaaccaaggtgggctggcgacctgcagcgacgtgcgacacccagcttccctcaccagctcaggctcttctggttctccatccagcagcataaagatgtcaagttcaaccagtagtttgacttcgagcagcagtttttcagatggcttcaaggtccaaggaccagatactggaattaaagacaaggttgtaacccacgttcagagcggtacagctgagcacagaccccgcaacacgccgttcatgggcatcatggataagactgcgaggttccaacagcagagcaatcctccaagccgcagctggcactgtccggcaccagaggggctgctgacaaacacgtcttctgcagctggcctgcagtctgctaacactgagaagccctctctcatgcaagtgggaggatataataaccaagccaaaacctgttctgtttctaccctgagtgcaagtgtccacaatggggcacaagtgaaggagctagaagaaagcaagtgccaaattccagtccactctcaagagaacaggataactaagactgtttctcatctgtaccaggaaagtatctccaaacagcagcctcatattagtaatgaagcccacaggagccacctcactgcagccaaaccaaagcgatcatttatagagtcaaatgtgtgaaccttaagaaagccccatttgtggaatttggaaacgtgtgttgactcctggtggtaaattaaatagtttttttcatcagaaaaattattttttagccattttttttctttggggtggatctgatgccattgatatatctaaaatgtgggataaaacttctttaatagctagaaatcaccataaataagaatgctaaacagaattgaaaattatatcaacttaaaattttaagacagcccagaagacattaatgactctcacttatgaaattgtttggcttttgccactttcctccttgcctttgccatatggtagaatcacagaacttacttagagaataaatatgtctattgttcaagagtaacaggtttaactcatgaccaagtgatgtacatccaagtgatgtattctggaaacgatggaattttacagttacagttccattgagtcaaatcccattttatatatacataaaaattaagttctgagtgagttctagctaaatataagtgcgactgtaaacgcagccaatttttttaagcagaatatgagaacacctaagtattctcttcatagcagttcctataaagggattaaacacttatttctgtgttatggttcttattcatatatttttatagcacctttttttggaacctatatttgtgcttgaaggtgtttttgatatttggaaacagtataagccatttggagtcatgattggtggtcaagtggattcaagctaaaatactaagaccagcattcttagtggcgcttataaattagctctcacctggtttccaaactgcttttaacaatggtagtgctcctggaacaatccttccaagctcctctaaggacaatatttaattcagatactaaaggtaagactggttgttacttttgttttgttgtacaattagtactttatagtcacatgttgtatatattaaatagcccagttttattcagacttgtaaatagaactatttcaatgtagttaatctaaaaacaaaaaagaaaaccccagtcacgatttgcatgttctctgtaagcttcatccatgctggttattgcaccgaatgatatattattagggcatgttaacagtataccagtaacagcactttatctcatttatatgaacacctttgaggtgctacttaagtccaagctctgatgtattattcatttgtaaagataaggtacaggaatgaaccttggtttaaaggtatttttatatgaaaatggtgtgttattggaagatgttaaagtgctaatttgagagaagtaggagtgtatctgttttatatgttgggatgtgaaatttattttctaaaattgaggagaaggaagttatatatttgcagaatgttttaaagtgaattgttgtaatgaagttcctgtgaacatcattatggttttgtacaaataggaacctctgatgtcattcttcaacgtttgttcctgtgtgtacaattgtactttgtatgaacagctttatcatttttataggctttccatgagttttgctgtaactactatggcttatttattttctttaatatttgtgaaagtcttactcctttgttagttttgtttctgcacaactactgtacttttccatatggaataaagactattaataaaaaaaaaaaaaaaaaaaca

SEQ ID NO: 28551 - DNA, 6275 bp, Homo Sapiens
gactccccaaacggagcggatcacacacagtagtgtttcatggtctttcctgctgcggttttcccgggggaagttgctaatgttgcgggccgcggcgctgcacccagacgagctcttcccacacggggagtcgtggggggaccagctcctgcaggaaggcgacgacgaaagctcagccgtggtgaagctggcgaatcccctgcacttctacgaagcccgattcagcaacctctacgtgggcaccaacggcatcatctccactcaggacttccccagggaaacgcagtatgtggactatgacttccccaccgacttcccggccatcgccccttttctggcggacatcgacacgagccacggcagaggccgagtcctgtaccgagaggacacctcccccgcagtgctgggcctggccgcccgctatgtgcgcgctggcttcccgcgctctgcgcgctttacccccacccacgccttcctggccacctgggagcaggtaggcgcttacgaggaggtcaagcgcggggcgctgccctcgggagagctgaacactttccaggcagttttggcatctgatgggtctgatagctacgccctctttctttatcctgccaacggcctgcagttccttggaacccgccccaaagagtcttacaatgtccagcttcagcttccagctcgggtgggcttctgccgaggggaggctgatgatctgaagtcagaaggaccatatttcagcttgactagcactgaacagtctgtgaaaaatctctatcaactaagcaacctggggatccctggagtgtgggctttccatatcggcagcacttccccgttggacaatgtcaggccagctgcagttggagacctttccgctgcccactcttctgttcccctgggacgttccttcagccatgctacagccctggaaagtgactataatgaggacaatttggattactacgatgtgaatgaggaggaagctgaataccttccgggtgaaccagaggaggcattgaatggccacagcagcattgatgtttccttccaatccaaagtggatacaaagcatttagaggaatcttccaccttggatcctcacaccaaagaaggaacatctctgggagaggtagggggcccagatttaaaaggccaagttgagccctgggatgagagagagaccagaagcccagctccaccagaggtagacagagattcactggctccttcctgggaaaccccaccaccgtaccccgaaaacggaagcatccagccctacccagatggagggccagtgccttcggaaatggatgttcccccagctcatcctgaagaagaaattgttcttcgaagttaccctgcttcagatcacactacacccttaagtcgagggacgtatgaggtgggactggaagacaacataggttccaacaccgaggtcttcacgtataatgctgccaacaaggaaacctgtgaacacaaccacagacaatgctcccggcatgccttctgcacggactatgccactggcttctgctgccactgccaatccaagttttatggaaatgggaagcactgtctgcctgaaggggcacctcaccgagtgaatgggaaagtgagtggccacctccacgtgggccatacacccgtgcacttcactgatgtggacctgcatgcgtatatcgtgggcaatgatggcagagcctacacggccatcagccacatcccacagccagcagcccaggccctcctccccctcacaccaattggaggcctgtttggctggctctttgctttagaaaaacctggctctgagaacggcttcagcctcgcaggtgctgcctttacccatgacatggaagttacattctacccgggagaggagacggttcgtatcactcaaactgctgagggacttgacccagagaactacctgagcattaagaccaacattcaaggccaggtgccttacgtctcagcaaatttcacagcccacatctctccctacaaggagctgtaccactactccgactccactgtgacctctacaagttccagagactactctctgacttttggtgcaatcaaccaaacatggtcctaccgcatccaccagaacatcacttaccaggtgtgcaggcacgcccccagacacccgtccttccccaccacccagcagctgaacgtggaccgggtctttgccttgtataatgacgaagaaagagtgcttagatttgctgtgaccaatcaaattggcccggtcaaagaagattcagaccccactccggtgaatccttgctatgatgggagccacatgtgtgacacaacagcacggtgccatccagggacaggtgtagattacacctgtgagtgcgcatctgggtaccagggagatggacggaactgtgtggatgaaaatgaatgtgcaactggctttcatcgctgtggccccaactctgtatgtatcaacttgcctggaagctacaggtgtgagtgccggagtggttatgagtttgcagatgaccggcatacttgcatcttgatcaccccacctgccaacccctgtgaggatggcagtcatacctgtgctcctgctgggcaggcccggtgtgttcaccatggaggcagcacgttcagctgtgcctgcctgcctggttatgccggcgatgggcaccagtgcactgatgtagatgaatgctcagaaaacagatgtcaccctgcagctacctgctacaatactcctggttccttctcctgccgttgtcaacccggatattatggggatggatttcagtgcatacctgactccacctcaagcctgacaccctgtgaacaacagcagcgccatgcccaggcccagtatgcctaccctggggcccggttccacatcccccaatgcgacgagcagggcaacttcctgcccctacagtgtcatggcagcactggtttctgctggtgcgtggaccctgatggtcatgaagttcctggtacccagactccacctggctccaccccgcctcactgtggaccatcaccagagcccacccagaggcccccgaccatctgtgagcgctggagggaaaacctgctggagcactacggtggcaccccccgggatgaccagtacgtgccccagtgcgatgacctgggccacttcatccccctgcagtgccacggaaagagcgacttctgctggtgtgtggacaaagatggcagagaggtgcagggcacccgctcccagccaggcaccacccctgcgtgtatacccaccgtcgctccacccatggtccggcccacgccccggccagatgtgacccctccatctgtgggcaccttcctgctctatactcagggccagcagattggctacttacccctcaatggcaccaggcttcagaaggatgcagctaagaccctgctgtctctgcatgtaaagtggatttctcctgtagggggcagggctgcgtggctttcccagtgggagccacctcacaggccctgttgcagtgaggtggactggtgcagggaagtcctggagggtttctgagctgcagcccatcggcatgggcccgatgccaccaccataggaccagggctctctcttgctgggagtcacctgtcactgaccaaggctgtgctctctggttcgttcatggagtttcagataatatggaaagggaaccttagagttgtcagcacatggaggctgtatggtgatccaagggaaaatggaccgactcttaccctaagtccccagggttgtatgtcataacatctccatggaaatcctggaaatcaaagtgacaggacaaccagtcacaaggtgtgatctctgcggtttgttggggactccaagtggaagtcagttaatgactgtctcaccgttgcagcccttccctttcactttggttctgtccctttgacccacttctttcctaaccttccctgactccatagatgaaaacttgaggagtgtgtgatgctgggagaggagtggatggagccttccccaggggatgtttgatgcttcctgagccagcagcctccctaatgcaaggcaccccattttggggagcgggttttctcaaaaatggaggaaaaaaaagggtggctgtctcgaatggcatcgacacagtggaaaatcatctgattccattgttgaacttcacactccaggcacttgctcatccctaagaaagaatagtacggcattcaagtttacatttacttctgttaatgaacgacacttatttggttccagaaaagcttagaggcagccagtgtttaggaagagatgtgttctttttaagattcgagtttgttgggtcctgtcccctcccccaagaaaactctcacattgttttgtaaaactttctctggaagaggtagagactaagaagttgacatcactttaagctaaccctcttttattcaagtcatagagcttgattgcctttctgaacatgcccctgaccaggacagggtggtgatggtagtggtagtggaactgaaagaaatgggacgtgggttatttgcacattttaaggaaatttacttaaactgggactttttctctaacctgaggttatgacatgggtttatgaatcccatgattcccgggttaatggaagctcatttgaatgtgtactcttgcctgggacaaacgacttttcaattttcaaataaaagtgtagttgaccttaggcccgccccccatataagctgcctgtttttccactgaagccaaatcccgttttgtacaatctttcttggctgactacgctcccagggggcgtaagtgaagccaagccccaggaggctgttaggcaaggcaggaacttgtatgacctcagggacagccagctaacccctgaatgttggctttgcacatctgctgggcttctcagagcaggagcctggattggaaactgaatgaagcaagttctgcatggagttgaggaaaaatatcagactcagcatttttttttatttttattattttttaaaagacttgccatagaccacatccgcagaacaatgtactggacggacagtgtcctggataagatagagagcgccctgctggatggctctggtgaatccccgtgccatcgctgtggatccaatccgaggcaacttgtactggacagactggaatagagaagctcctaaaattgaaacgtcatctttagatggagaaaacagaagaattctgatcaatacagacattggattgcccaatggcttaacctttgaccctttctctaaactgctctgctgggcagatgcaggaaccaaaaaactggagtgtacactacctgatggaactggacggcgtgtcattcaaaacaacctcaagtaccccttcagcatcgtaagctatgcagatcacttctaccacacagactggaggagggatggtgttgtatcagtaaataaacatagtggccagtttactgatgagtatctcccagaacaacgatctcacctctacgggataactgcagtctacccctactgcccaacaggaagaaagtaagtacagtaatgtaaaggaagacttggagtttacaatcagaacctggaccctaaagaacagtgactgcaaaggcaaagaaagtaaaaaaggaattggccattagacgttcctgagcatccaagatgaacattttgtagtgcaaaaagacttttgtgaaaagctgatacctcaatctttactactgtatttttaaaaatgaaggttgttattgcaagtttaaaaaggtaacagaattttaactgttgcttattaaagcaacttcttgtaaacatttatcattaatatttaaaagatcaaattcattcaactaagaattagagtttaagactctaaacctgatttttgccatggattccttctggccaagaaattaaagcacatgtgatcaatataacaatataatcctaaaccttgacagttggagaagccaatgcagaactgatgggaaaggaccaattatttatagtttcccaacaaaagttctaagattttttacctctgcatcagtgcatttctatttatatcaaaaggtgctaaaatgattcaatttgcattttctgatcctgtagtgcctctatagaagtacccacagaaagtaaagtatcacatttataaataccaaagatgtaacaattttaaaattttctagattactccaataaagtgttttaagttttcctatgaaaaaaaaaaaaaaaaaaaaaaaaaaaaaaaaaagaaaaaaaaaaaaaaaaaaaca

SEQ ID NO: 28552 - DNA, 5783 bp, Homo Sapiens
agactgggtttcaccatattggtcgggctagtcttgaactcctgacctcaggtgatccacctgccttggctccccacagtgctgggattacaggtgtgagccattgcgcccagcccagactcataagtttaatattgtttgttgagttgctcttaacctttgtgtaaatctatattcaccttgtacttcttaattaataatgactctaaataacactctaaatctgacataatattcagtgctttacacttagcaaatttaatccttggagtggccatgtgaagtggtaggtattagtatcatcaaattttacaaattgggaaactgagaataagagagtataaaaatcaaaccgaagtctttctagcatcaaatccattaaccgtttaacatgctaaatctaatatgatttgtgttttagaaaaaacattcaagtatttgaagagtattagggagaatctttggaaaacatttaggaaattttccaccctcacctcaaacacttgaatacctattatgtgcttgatactttcataaacaacaataatcacatttaatgtagttaacatttgttgagtgtaaactatgtgctgtacatgcattcattctttgtgattataaaatatttcaaaagtacagaaaagtatagaaaataaatctctatgtatcattaccaggctttaacagtttttaacattgttattttagctttattaaaaaatcaccctcagttgaacaccctgtacattcttctttgatcccattcttatcttaaaagcttcctaccatccttcccttgctacagaaatgtatctgctatcttgaacttggtggttatatgttccacatgcattgttcagttaatcttctcaaaaacctgaggcaaattctgattatattttataggtaaagaaaccgaggtttcagtttcttgcctgaggtcaatagacacttggaatcagaacgcgaaccctcaggctctctgtcagcaaaacttatgctctaaccacttttctatgctgccctaattttcattttatgctactagtcctcacttttctctcacccgtgctttcggaaagagtctgtctaatggacattgctattctgatgtctaacaaagcacgtcaacatgcctaaaatatagttaatctttcctttcaacccccaggacttgcctcttcctcctgtgttttatatctcgttgaatgatcccattttctatctagtttccaaaacttttccctctccttcagcctctatgttcagtcactaagtcctgttgtttctgccttaaaaaaagctaggtgtttgcctcactcctgtaatcccagcactttaggaggctgaggtgggtggatcacctgaggtcgggagtttgagaccagcctgaccaacatggtaaaaccccatctctgctaaaactacaaaaaattagctggatgtggtggcagggagcctgtcatcccagctagttgggagactgaggcaggagaatcgctcgaacccaggaggcggagattgcaatgtgccgagattgcaccaccgcactccagcgtgggcaacacagcgagactgtctcaaaaaaaaaaaagtatctcacagccatttgcttccctctatccctgtttgtgtttccttagcctaggctactatcatctcctaatcagtctcaacagccttttagcagtctcctaatcagtctcaacagccttttaatttttacttatctatttattcattcatttttgagacagcgtcttgctctgttgcccaggctggagtgcggtggcacaatcatggctcactgcagtcttgacctcccaggctcgggtgattctcccatgtcagcctccagagtagctgggactccaggcatgcaccaccacacttggctaatttttgtatttcttgtaaagatgggatttcgacatgttgcccaggcaggtctcaaactcctgagctcaagtgatctgcctgcctcagcctttgaaagtgctgggattacagtcttgagccactgttcctgtctctcatcagcctttaaaaaaattctctattttattcttattaaaccaggataatctttctaaagttcagattgatcatgttctatacctgtttaaaacccttcagtggtttaccactgcatttaggatatagtctgaattacaaggcttataagacacttcattgtcttgcccctatttagctcttcagcctcggccattcccctgccattatatatactccagtaatattaaacttctttcagattccaattactttaaaaagccatgtgttttcatacctctagaccttcaatcatattgaacactcttcctctccccttatctctcccttcttgtatcagactgatttctgtttaccctgagtctcagctaaaagatcactttttctaggaagctttccctgatttctcttctctccttctcccaaagtgactttaggtgttcctgctctgggatttcattatgtagttgacccttgaacaaaacaggtttgaactgcgtgagtctacttatacatgaattttttccaacagattgtggttggaaagtacagtattcccaagatgcaaaacccaagtattcagagatccaactttttgtatatatgggttctgtagagctgactgtgggacttgagtacaggattgtgggggtcctggaaccaatcccctgcatatcctgagggacagctgtacactgtacattctttatcatagtactcattatacttattatgattgcttatgtaatcgttgtctgctcccgtccttatcccccttaaacgttgagctccatgagggcatacatgttggtattacatttttattacctagaacaatacttagtacataattgacacaataaatacttgttgagggactgaatgaaagtgactatgagatatttagatggaagttttgagtttgcaataggaagtatgtgttctgcacgatgggaaccatgtctgggctctcgtttctttggacaataaaacgatttgtgaggcaatacctacttgaaaagggggtttgagtaccttgggaaaaactaattatttgttatgatatacatcatagagttctgttttataaagtttttaattttgtattttatctctacttttataaaattaagatgtttataaattaattaaaaaaatttttttttttgtctgcagtctgaatcaccatcttattctcttcagcctcagccatttccacagaactcttcccagtcagctgctattactcagccttcatctcagccaggatcccaacctaagcttggcccacctcagcagggagcccaacctccccatcaggtccagatgccactgtataactttccccagtcaccaccagctcagtattctcccatgcacaatatgggattgttgccaatgcaccctctccagatccctgccccgtcctggcccatccatggcccagtgatccactctgcaccaggcagtgcccccagcaatattggcctaaatgatcccagcatcatctttgcacagcctgctgccagacctgtggcaatccctaacacgtctcacgatggacactggccccgtactgtggctccaaattccctggtaaacagtggtgcagtggggaattcagagccaggctttcgaggactgactcctccaattccttgggaacatgcaccgcgtccccatttcccccttgtcccagcttcgtggccttatggtttgcatcaaaacttcatgcatcagggaaatgcccgattccagcccaacaaacctttctatactcaaggtaccactgcttacaaattagttaacaggcttgggtgggttttattctgggatagagagccttagtgaaggccaggatctgggagtgaaaattcatgaattcagtaaacatttactgagaaattatactgtgtgtcagatggtgctaggtgcttgtaaaacaaaatctccattacttgatgcacactttattaggaaagccagacatgttaaatagaaaaggagtttagatgaatcagttaacattgccctagcaaatccaaacaggatgtggatttaagattattacatcacaagattttgacagttgagctagatcttgaaagagatgcaggaattttttttttgcctagagatgagagaggaggaggagtatgcttagctgagggattaatatatgcagtcactgagttttgcctggcataatgaaaaagagtagaaaatattagggctagaggacggaggtatatgggaaagatggtgataaggctagagagggtaggcttagaccatattatggagtttggacttggtttactgagcattggggacctaattaaaggtttttagtggaacgaagacataatcatatttgtttagtaaacgtaggacttgaatgaccttaaaatttattatgttctgctggtgctattgtagtactaataatggctttgactgggtaatgaatattacaaacaaagaattcctagaaacttggagcattttatctaacctacttgcctcagaggtatttgttcttataggcattgtctgagtctggccttcagctctttgttaacttagttcagaacacttgggtcagagtcagtatagttaaactaggagttcaagaagttaaaacaggcactcaggaaatgctgattgaatgaaatgataacttaaaggggaagtgcctggtatggtctcaggcttgttatatttaagccttcttaaaccacccatatactactggggcatccctgtattgtagagtggcagagccttgactgtggttgagctcttctcttgagcaaagaactggggctgaaggaagttactattagtcataagcccttttaggaggggagagtctgcaactcttttctagtgggttttttccctttgattccgcctctccatctttcgtgtcctctccttttttcacatacaggtatttccttcccttcttcatttttctccccaccctctcaaatgttttgcagcatgctttatcacctcctattatataaatagaaaaaaagaaagctaactacaagttaattctaaggtgttgtcagataaacaggcacaagcctttcagtttcctgtctgtgttgtatccaacagacagatgtgccacccgtcggtgtagagagcgttgtccccacccaccaagaggaaacgtgtcggagtaatgcgagtccattttctttcagctggtctaccgatgcacagcaaccagccaatcctgctgtctcaagggtatccgtacctcaatgtcggttacattcagcagaaaaagtgacatttaatggaaagcaaaacaaatcaggtcctgatttaaaattttaacacgtttagatagcttatttaaattctaagactgtttttacagactgtattatttgtatataaatatgaactatagtttttactagtatcaccaaattgagtgatacaaatttcatctattttattaccctatttttaagggaattttatgttttgtttaaccttgatgaattgtataaagagagaatttaaaaaattacattctttattttctattagctgtattcatactttggttgcttcagactttatatattgttcttaaaagttaggaaagaatttcatgtgttttaaattgtcacttctattctttacagaaccttgtagtgccaaaaactttttaaaaggtaaaaaaataaaataaaattacaacataaaaaaaaaaaaaaaaaaca

SEQ ID NO: 28553 - DNA, 6694 bp, Homo Sapiens
gaacattatattctgattccaagagtcagaacgctcactccatcttctttttcttcatctgtttctgggacaattaatcttcttttccttcatccgttcctactcacctctgcttcttatttgtatcttagtgttttctcccatgaagaatacaagtcgggggacagaaagcacactttattggatttgtagatgatgcagaaatgaaaaatatctccagtttttggctgatggattcaagattaatgtattcaatgaacaatcattggagtctaaatgtgtattgacactgggatatagaaatagttacagtattttgaaatatctgaactaagactgaaagtaaaatgatgattgaataggcattaatgagaaaccctatattctgggtttttaaaatgcaaccctctaagtacagagtggagtgtgtgtttgtggatgtgtgtgtttatgtgtgtggtgttgatgggaacggtgttaggaagacctggtttcacggtagtttatagagaaatatttccttacagaaatggaggttcaatgttgaatcagaaatatatcatggctattcacaaagctaatgtagtcagctggtgttaataaaagccttacatgcttttattaaccctccatctagtccatatctaaatggagggttgagttcaattatgggtatcatattttaagagagacattaataagttgattgtgtccatagggaggtgaccagggttgtaaagggtctgatgatgcaagaacaagggagtagcttccctgaaggaacagaaggtatagctggaaagggagtgcagacaaggagggaatgatacaatagctgcctagaaatttctgttgagctatgaaaaggaagaggaattagatttattctgtgtagcttcaaagggcaaaaataagaacaaagaggaactttacaggtgacaaatgtttgcttcaatataaggaagaattgtctaataagggttgttctaaagaggaatagactcaagttagtaagatttcctgttcctgtgaatgcccaacagttaaaataaccacctatcccacgtgctgtgaaagggaatcttacattggatttggtctatatgtctaccaagattccttctaaatataggtttagtctcaatagtaataagactctctaacttcatttgtctttttcttcataagtggtttttcatgctctttgaaatacagtggagttcctttgaggtttttgtcaaggaatttcaacgcatatctcttcccctgttgtactgaaggcttttgagattaattcctcatagaacatctaaatggattggagagttggcaagggaaatgaagctcatcccagcaccttccttagtcactcacgcttagcagtctgtcaagatctctgcctcatctgctagcataacatgtggattgcttgttggagcttatttccccgccccccatggtaaattctcatttcctgtgtacatgcacctggacttttttgttttttttaccaagagttgggaaaaatcccttctatgctatctatattctgcaaacaaattattattattattattattgagacagagtattattattattattattattattattactaagacaaagtttcgctcttgtcgcccaggctggagtgcaatggcgtgatctcggctcattgcaacctctgcctcccaaatctcctgcctcagcctcctgagtagctgggattacaggcgcctgccaccatgcaccactaatttatgtatttttagtagagatggggtttcaccatgttggccaggctggtctcgaatgtctgacctcaggtgataagcctgcctcagtctcccaaagctctgggattacaggcgtgagccaccatgctggacccacaaattattattaatttttaaaaacctaacatcttaatttcatcaaatttgttttccctctactgtttttaggaaactgattatgggtagcatttaggggtttggggataataatactatatatttttagacgtaatgagtgttttactaggtttaaataacttctaaagaaaatacaagtgggcaaattagctatgtaataacctacatagaaaacagttgggcaaattacctgtggatatgcagattctacttttgcaaccctggacctggactttttattttatttttttgtggtcacaaataatctttgttatcaataatgtgaaaatattaaaaatgaattcattttaccagtacatagtattactcttagaacataaattagatatcacgtggtatcaagagctgtgctttcttttgagtctagggcctgctttttgactttacagcaaaaagataagaaatgtactcatgacatgtcagacaagacaatgtgaggcactttgtggggagaccattagatgatcccccttgcctgctcttgcagacatagtactagttattccttatcaaaagtttgcatttcattcatattaaatattatctggacagtttcattttttctatttggctcttcccttactgtgccttcctgcattattggcagggttcataatccttgagaacattgtttgatttaaaatattttttatttgaaatgagactgatttctattcaaatccagtggctgggagtaagagtttatttccctagaaacttatgtttctgataaatgggatccatgaaggcaaggactatatataattttttgtgtttccaacacctagcacaaagcttggaatataatagggttcagccaccttaaatgcttgccaggagggcaaacgtatactcatgaaataaaggaaaatgagtatgtattcaataaatgtttgctgaaagaatactgaccctgagactcgaaggctacttaacccttacttatcatcaaatactcataataaagccagcaagcatgcttttatttcctgaaggacttaaataattttgctttccttttactcctgcctccagagtcaagtaataaaacctgtcagcatttaggcacttaatatgctgctgaatttgaactacaatgtacctcattcacattgaaaaacatttttgtgccccaaagcatagtagcatagatgctgtccatagtcacggtgattgattgctttgttcctgcaagtcaaacagatccatgagcctgagccttgcccatttcaatggtcagtaggaaaagaaagcatttgatagagtgcacaaccagtcttcatgcagtaggtctttgttcttccagcactaaccgctgaccgttactttgcatttattttgtcaccacagtaagatggaggtctgagatagtaaggtcaaaatttgtgagataaagtcatgatttcagaggtgatatatatttcaccataagtttagtggtgggaaaacagaatgagctgaagttttttcttaaaagccttgggaatattaaattggtttaagtaggaagcactaccatccagcctgcttatagaaatgctcccagttcgagtggtaactttaactcttctaaaaatgaggattatatgttaattccagcatatctagaccttagtcagggaggtccaatcttttggcttccctgggccacataggaagaagaattgtcttgggtcacacataaaatacagtaacaacagctgatgagctttaaaaacatggccaaaaaatagcattttcttttttgtttttttttgtttttttttttttttttgagacggagtctcagtctgtcacccaggctagagtgcagtggcacgacatcggctcactgcaacctccgcctcccgggttcaagtgattctcctgcctcaacctcccgagtagctgggactacaggcatgcgccaccacgcctgactaatttttgtatttttagtagagatgggatttcattatgttggccagctggtcttgaacttctgagctcaggtgatccacccgccttagcctcccagagtgctaggataacaggcatgagccgccgcgcctggccaaaatagcataatgttttaagaaagtttacgaatttgtcttgggccacattcaaaaccatcatgggccaagggttggacaagctagccttaggtcatgtccagaatgcaatttaacaggaatttcaagcaaaactaacaaaaaattaaatccacaaaaaaatatcatttggtaaatgcactgtctcacacactttactactaagtcccattcaaaccatgacgaccctttacataaaattagggcattctcaccaagtttctaaagatgatttctaaacattaccaaggtctaagtgctaattccccacaaaccatttcttatcttgtttaaatgagactggctttagatatcatgactcatatttatgtgtttaaggaattaaacgtgaaggagatgtataaggcaaccacaaatgtagaaaacaaatgtatgtattagtaatattctcccatgtattaactagaacaagaatgtgagatttttacatttcttctagtgtgccttagcaaatctgctggaaagagtctagttgttttgagaattgaaaaaaaaatgtgtctctcaatttgtcaattctaagcctgtaaaggcagaaactatccacagtaatgagtttggtagtgcctggagagaggcaaatgatcattggatgtaacaaaagctacaagagaatagactaaaaaaagaatttcaatatgaaaaagtaaaatctagagagatgacaaatcagcattgggtaccaagcctcaaaatacttgaactagaagccatctcttaaagttaaaagtaagaagctccaggaaaaataaagattgcatagtaaaaagggatagatggcaggattaattcaactcaacaaatatttatcaaatgtctactctggtcaggtgctgtgttagcagccagcttccctaaagggaggaaaggctagacacgaggacattgaggattgtttatttaaagtcactcataggcatgccataatggatttattaaggggaaattggggtttctgtgaatctttacaggacatagccatggagacaatcactatgttaagtaagttgctgttttcccaattgggcttcagtttcctgaggcaaaaaagtgaggaagttggattaattgtttcttcaagtcctttccagctctaaagttgtgggttattttacaaaatatccattggtgccacctttcagtgactcttcctatgtttataagaaccaagaaatttaaattttgaagattggaaaaatcacctggtccatctttttccttttcacatctctctctttttttttttttttttatcatttccccagacaacagaaacagacaaccttccaaatcctctatattgcagttgccttccacacacagatttaaaaagaggatcaaagagggtggtgaagatcaggtggaatgcttctttggaagttccactggcatcatctatcagaacaatggtgtgagcatgaagaggcacagacaggtctccaaaatagatgttaggatttgggtgctacctgacacagaagtaggtccaaccctccaagtactggggatgataggataatcaatgaggtatatatatatttgtcattttgtataaaatattgtgaaaattgaaggaggacactcagtaaacatcctgggactatttgtaagttatggcaaaaccagatgagagaaaagggacagtcccctctgtatcctcgttgtctcttagtaacatcaaattgtagttaaaaaaattttaaactatgtacaagctacaaaatagcatctcttccatggtatgtttgagtgtgtaattttagtttcttttctggttgtatttgtggtagtcagatgtgttggattgattccaactggacagagtaaggaattccagcatcctcttcctgcttgctcgtgttaccccacagatcaaaccctcaattctagttggggatgctgtctagccccacaccatgactgaagccttaagcactgttgcgcctccatgtgctttggatcagcaaccccagtggtattctaccagagcattgtgggaaagcagatgtatagtcaggtcccaacagcaaattgttgggtgtgagagttctaaagtataggggtgagggaagagaaggatatgaactcctctgaccttaagccagcattcatttaacttttatgtctacttaacaagagaacctggagaaaactaccgtattcaagagattaatcaaaatcagtgttttagccaggcgatgacagagaagcaccattcctcaccctccattcttgtaatgtctgtaataaatttcagtgcgtcaggatggatgaacccaagatccagtgaatgattcagctgttccaagccttacattttccatcattcatcatccattctcattcagtgtaacctcttgcactattgtggttaattttatgtaaaaccagtttatgtttttttttttttaatatgtgcctatgtaataaagtctacacactggctatctctgtagaggtgaggttttgtttttagttgttctactgattatatccttttctgagctatgaaaatgaattattaataaaaaatttttgaacaaaataaaaaaaaaaaaaaaaaaaaaaaaaaaaaaaaaaaaaaaaaaaaaaaaaaaaaaaaaaaaaaaaaaaaaaaaaaaa

SEQ ID NO: 28554 - DNA, 6107 bp, Homo Sapiens
gaagggtggtatcccgttgtggagtagaatgtaactatgaccttctgggatttgggcaccagatttatcttactgcaacaggagccatggtgggagccacccccataactcttatagagctggtgggccaccaggactgccagatatatatatatattttttgaaacagggtcttgctgtgttgcccagactggcctcaaactcctggactcaaaggatcctccctcagcctcctgagtagctgggattataggcacataccaccacgactagctgccagatcatcttatcttggaccaggcttctaccattaattcacatgctttaaaaaaattaaaaattaaaaaaatgaaaaataaaaaaacttaaaagattttacctatattcctggaacatagttatcttaccccagctttgtagttcctgtttaaggaaattccctctgaaggaaattttagctctcaagagtcaaagaagatgtatagaggtggtatctgttagtttttgtttgtttgttaaggatctaggcagagaggtcattacatttttctgaagttgaggtcacaggtggggtacccacaagagaggtcattacatttctgaagttaggcatcccaggcatctcttctaaagaactatcctgtattctaattgttaaataaatatcttcttcattgtgagcctccacaactgctgtttctgataaatttagatcattctttgcagaattttatatactggcaatctcaaaactaggctccttcaagattcctaggaagtctcccaagctcgggttgggttccactattctagtttctttgtgtatgatgccatggggttgactcagaaactttgctcaatatatgacaaggcagcatttggtgagtggtgatctccacgtttatcttctcatttatatccctaggaagacatactgattagctgagcttgtcaatgaaagcccgggttcaccattggattatctataactctcctttctctttttttctctcagtagcattgtaggaggagagaacacttaattctggttgaatgtcagcttggataaacatagaaacaaactagaaagaactgatgatgttctcctaggtggaaaagatggagattccaataccaaataggtgtgaatcagcaaatgtatgttatactgtctctcaaggccaggtgttcaatacattgtgggtagttaattataatcaaagtaataatattagagttacgacatggatcctaagctttttagccattaaacatataagaaatttgtagcatagtgagtttttttataacatgatcatccaggttaaaataagacacaattgacctcacatatcctatctgagctccgattttgtcatccgtaaaaatggagatagtggtacctaccttacagagttatgaggctgagataagagggaaagttacaaagtagtaccatgtacaaagcccggaactgtgcaaataggaggttgtaatactgtttgaagcattcccatctcaaaaagccagttccttggcctttataaatttgaaggaataatgaaactgatttgtttcaattgtgaaaattatttctctcctgcccctgtgcacttctgccctgtctatattagatttcaagaggtttcccttttgtcatcttggccagacaatggaatgtctatcccgtttgaatctgggtttaaaaaagcatgggagctagtggccaagtgtcacatgtatgccgcatccctaaatagaagtctccccagggcgcttcctgacctgcgcaatgctgccgaaggcctcctttccccgctccccaggcagaggagcaaagtcacaggctgaggggcctgccacgacttgcccacaaaacaggtctggagtttggaagttacatttgctggttgcccagagatgagtgcagaattcagcttggaggtcctggaaacttctagtttactgatgtttatgcttttgctcatgcacccacagttcctgggacacagaatgctcacctgggggtttgtaccccagccaagaaggtgtcttcacagactcccctccttttagcaacttcatgcagatggagcttgggtggatggatcctggcacagtgttcagaacagtggccctgccagtgtgtgggcgccgcttgtgcagagcccctgtgggttctggtcctcaagggcaggggcgctcactgacagcggaacccatagtaccagcccatctttggtgggctgtttccaccccattcatccctgctcagctcttcataggacagcctgtgctggcagaaaattgcccccaccagtcaagacgtagggcatcaacatgagccatcagtaatgacagggcagctttgcagagcgtaaggtagcacctgataccttggaccaaaaccgtatttttatgtatctttcacatgtacagctcttgtctttgactcatcaaactttctttttttttttttttttgcttatttcagtttgagtatgaattaatgaaaacaattgtttcataggcacttgtatttcttacaactgaagatggatatttgcgaaggaaggttaacctgccctcttaactcagcagtggttctagcgtcctatgccgtacaatctcattttggagactataattcttccatacatcatccaggctatctttccgatagtcactttatacccgatcaaaatgaggactttttaacaaaagtcgaatctctgcatgagcagcacagtgggctaaaacaatcagaagcagaatcctgctatatcaacatagcgcggaccctcgacttctatggagtagaactgcacagtggtagggatctgcacaatttagacctaatgattggaattgcttccgcgggtgttgctgtataccgaaaatacatttgcacaagtttctatccttgggtgaacattctcaaaatttctttcaaaaggaaaaagttcttcatacatcagcgacagaaacaggctgaatccagggaacatattgtggccttcaacatgctgaattaccgatcttgcaaaaacttgtggaaatcctgtgttgagcaccatacgttctttcaggcaaagaagctactacctcaggaaaagaatgttctgtctcagtactggactatgggctctcggaacaccaaaaagcgaagtcctcggctccggcacgaaatccgaaagccacgccactcttctgcagataaccttgcaaatgaaatgacctacatcacggaaacggaagatgtattttacacgtacaagggctctctggcccctcaagacagcgattctgaagtttctcagaaccgaagcccgcaccaagagagtttatccgagaacaatccggcacaaagctacctgacccagaagtcatccagttctgtgtctccatcttcaaatgctccaggctcctgctcacctgacggcgttgatcagcagctcttagatgacttccacagggtgaccaaagggggctccaccgaggacgccagccagtactactgtgacaagaatgataatggtgacagctacttagtcttgatccgtatcacaccagatgaagatggaaaatttggatttaatcttaagggaggagtggatcaaaagatgcctcttgtggtatcaaggataaacccagagtcacctgcggacacctgcattcctaagctgaacgaaggggatcaaatcgtgttaatcaatggccgggacatctcagaacacacgcatgaccaagtggtgatgttcatcaaagccagccgggagtcccactcacgggagctggccctggtgatcaggaggagagctgtccgctcatttgctgacttcaagtctgaagatgaactgaaccagcttttccccgaagccattttccccatgtgtccggagggtggggacactttggagggatccatggcacagctaaagaagggcctcgaaagcgggacggtgctgatccagtttgagcaactctacagaaaaaagccaggtttggccatcacgtttgcaaagctgcctcaaaatttggacaaaaaccgatataaagatgtgctgccttatgacaccacccgggtattattgcagggaaatgaagattatattaatgcaagttacgtgaacatggaaattcctgctgctaaccttgtgaacaagtacatcgccactcaggggcccctgccgcatacctgtgcacagttttggcaggttgtctgggatcagaagttgtcactcattgtcatgttgacgactctcacagaacgagggcggaccaaatgtcaccagtactggccagatccccccgacgtcatgaaccacggcggctttcacatccagtgtcagtcagaggactgcaccatcgcctatgtgtcccgagaaatgctggtcacaaacacccagaccggggaagaacacacagtgacacatctccagtacgtcgcatggcctgaccacggtgtgcccgatgactcctccgactttctggaatttgtaaactatgtgaggtctctgagagtggacagcgagcccgtcctagttcactgcagtgctggaataggtcgaaccggtgtgttggtcactatggaaacagccatgtgcctaactgagaggaacctgcccatttacccactggatattgtccgaaaaatgcgagaccagcgcgccatgatggtgcagacatcaagccagtacaagtttgtgtgtgaagcgattcttcgtgtgtatgaagaaggtttagtccaaatgctggatcctagttaagacaactgtgaaaaagttcattcctctttcccaagggcatcctccttgaaagaggaggacagacctctctggaagcagcaagaggaaccagtagctgtgggaaaggaatgggcacctctgaacccaggcactttaaacttctatagaaaagatatcgtgtacataggaactggtgtagataagcatgcaattatggcatcatttaggcctgtatttctatggaaagatacaaaaaggatctcagtttggggcctgtcctaatgccttcttccctaacatcaccacacacacccctgtcggcatcctggagcaattgagaccggacacccacagagctgttgtcctcccagcaacaagatggtgtggttatcttgggtcatttggatgttttgtttgtttctgtgtgtcagactgtaagggctgagctttctgtgcttctaggtggagctggaacaattcagattcacccgccctgatgctaaggaaaccctgacgtatgtactagatggcagggcactgggggtcaggctgaaggctgagcaacacctctctgccctccctccctttgtcccatctcccagcgacttccaatattcatgtttctgagaattgtgtccctcttcaggttccctcttggtgcctaacctggattagtaatgtgcattcaggtgaattttcagctgaggctctgagaactggtactctcagtgtgttctggtcatcttgtggcttagttgtagaagcaggtgtgtctcttgcctctgcttgcctcctactgcacactcagcacccaggactggaatcaccgactactgaatctcctacatgtattgctgctacttcaagctcctccacttgaaaccttatgattttcccaaggggagatgggacagtgtcatctaaatattccgaatgtttggccttctgagaaaagagcttctagtaattgaaccatgggaaacccagcttctggagggttggccgtggggctgtgtacatgtgtgtgcccaggggtgagtgtttctcaggattcctaacgattcaaattaccgttgagtatatataaagaatgagtctctgtatggaagaacaaatgtgtgcattcacccccagtcacaatggtctccattgcatttcaaaggagaggatcagactatctgaatataaacacaatctgatgttaatttattctaagaacaccatcattttgattgtcctaaagaattctgcctttgtgaataccgtgttaaatttttttaaatttgtgacaggattgtagcaaattattatttaaggaaaataaattgtgtaaacattaaaaaaaaaaaaaaaaaaaca

SEQ ID NO: 28555 - DNA, 6745 bp, Homo Sapiens
gagacacgcactgcctgtgcaggatccggagcccagcagcactgccagggccttgaagtgcttcttcagagacctttcttcatagactacttttttttctttaagcagcaaaaggagaaaattgtcatcaaaggatattccagattcttgacagcattctcgtcatctctgaggacatcaccatcatctcaggatgaggggcatgaagctgctgggggcgctgctggcactggcggccctactgcagggggccgtgtccctgaagatcgcagccttcaacatccagacatttggggagaccaagatgtccaatgccaccctcgtcagctacattgtgcagggatgcaccagacacctatcactacgtggtcagtgagccactgggacggaacagctataaggagcgctacctgttcgtgtacaggcctgaccaggtgtctgcggtggacagctactactacgatgatggctgcgagccctgcgggaacgacaccttcaaccgagagccagccattgtcaggttcttctcccggttcacagggccacaggcagcgtttcctggtaggacgtcatgttgatgggcgacttcaatgcgggctgcagctatgtgagaccctcccagtggtcatccatccgcctgtggacaagccccaccttccagtggctgatccccgacagcgctgacaccacagctacacccacgcactgtgcctatgacaggatcgtggttgcagggatgctgctccgaggcgccgttgttcccgactcggctcttccctttaacttccaggctgcctatggcctgagtgaccaactggtatgtgtcctcccttgcacagccacatgaggatgggacacaggagctcaggtaggctcagcccagaccctgtgcccacttgcctgcaggcccaagccatcagtgaccactatccagtggaggtgatgctgaagtgagcagcccctccccacaccagttgaactgcaggaagagaggacccatcctgccacaggacccagaaaaaaagcccaacacacactcgggttaagaaatacctttaaatttaggtaaataaagctcaaggaggtggggctgtcatctgtggtgtcagtccttctggccccctggctgtcagtgtcgctccagggccttgacaagcagctcattcaagcggcccaccatggccctagggtcgtcaacaagtccagcagcaatcatggcgttctcgtatatctgaaaggcaagaggagaaacccattatgaggggcatggggcaccttttcattttttttttttgggacagagtctcactccagcctggcaacagagcaacactccatctcaaaaaacaaacaaacaaacaaaaagacaggattttagaggaaaccgctgttccaccctgaaggcaggctggcagggctggtagcctgggtccctgcagtcatcctaagctgctgcactcacctgatccaccagcagctgagccaggccaggctcgcttgcgcgcagctgattcagcttcttgatgagcgcgtgcctgcaacacagaacccaccagaaaaagcagctcagtaccacgtgctgtgaccctcccttcatgttttgggattatcaggatatttaaagaagcacagtaagactgtctgtagttttttaaataaggtatgttaatgatcatttatagataatatcattatatacccagaaaacccaagagaatcaggagtgtcagtattagaaaatgctgtaaggtagccaaactccaagattaatatacactaaagggacaaaaggagcttagtacgtgaagacatgccttggttcctagataaataataaaagagaagggagtaagacccacatgttgaaacatattatagggctctagtaaataaaacagtttaggtctggaaagggggaaggcaaacaactccatgtaacgagggtggacactgagtgtctgatgaggacagtatttcacagaagagggaggagacagatcactccatccagcagcactgggatgactgggagccatgcagaaaaccatttagaccagagtaaattccagagggatcaaagatgacaagcacaattctagggaagaaatgtttcatcatctcagaaggggaaagcctttccaagcaaaaccacaaaccaaaaagtaaagaatgattgacatatttgacgtcagaacaatatttttttctgcataggaaaaagcatcatgtagtatttaaccttaacatgaatattataatttttcacttagaagtctgataaaaccgagggctctggggaactgtaaatttgtacaacctctccagaggacaactggagtcgggaaaaccacatgtggatgatatgctgagactcagccattccatttcctaactgcatccctttaaacacttttttttttagatagatagatagatagatagatagatagactctcactccttcacccaggctggagtgaaatggcatgatcttggctcaccgcagcctcctggtttcgggaggttctcttgcctcagcctcccaggtaactgggattacaggcacccaccaccacccccagctagtttttgtatttttagtagagatgaggtctcgaactcctgacctcaagtgatccacccgcctaggcctcccagaatgttgggattacaggcgtgaggcaccgcacccaacctaacagaggaaacacttcaaatgcacatcctcacatttctagtctacgtagctggaaaaaaaggacattcttaatatgctaatgtggaggtcacctagttaccctaagggagaaaagcaaggcaaggacccactgcacagcaagttcccccttggaagcccacgggcgcagctgcccacaaatgcacataatctctgcagaaatacaaaagccctaatgctggctgcactggggacacaggtaggaggaaattttcccctgtaagcagttttgaattctgaactatgtggacagaacaccaaattttaaaacaaatgaaagtgaagctggctgggcacagtggctctcgcctgtaatcccaccactttgggaggccaaggctgcagtgagctctgatggcgccactggtacactccagcctaggtgacagagcaagaccctgtctccaaaagtgaagtggcaacagacagaaacgagcacttctgcagctatctcacaaaactagtttggcaccaaaactagttaaagtgacctggtgtccgcctcactgagctgctcaagcagaggcacaggcattctgcatactggcgctgctgtgcactgacaaccataagccaagtcagcctttccccaggagtgccatggctaggaagatgcatctccctcgcctccagtataattttaaaagttatggttgtaaaatgacaaaagaaaaaaactagacatgtactaaagaacaaaacaaaaactggctgggggtggtagcccacacttgtggtcccagcacttcggggggctggggcaggtggattgtttgaggccaggaggtagaagttgcagtgagctgagattgccccactgcactccaacctgggggacagagtgagaccctgtctcaaaaattaaaatactacttaggctacattgtgggggggtggtaagtctatggattttgatttcctttttgctgttttctatttttggtaacttgtttatgtaacttcattttttaaaaaattgctacattcaaaatttcccccaaaaaagaaacttcatatacaagttagttcatatacaagttagaaaatgaaattttaaaataccccataagacacatcaaagaataattctttaaaaatggtaccagaaccctacagagaatgtaaggtaccaaaggatgttaaagacctaaatagatcacattcatgggtgcaaagaagtgatactgtaaaaagaaagaaactcaaaagatacctaaaggcaggtgaaaagacatttacaacagataaagggcatataaagaacaacaggaagaaacgagggaaatcttacggctcagccactgtcagggctggggggttctcggtgcaccctggaagcagctcccaccaccggggccacagagaaacccacacaagccccagacacgtggacaagaatactcagagcagcctggctctccacaacttctgaccaagaaccaccggaggcccagcagagcagaacggagcagtctgctgtgccgaggtgggtttctgcagcggacattattcggctatgaaaatgaacttgtggcagcccctctgcatgggcaaccctcatgccaagtgagcaacgtgagacttcagcaaacaccaagatccacgtacaaagctcaaaacaggcaaaactgagcatgtccaggacacgcacaggtggcaaagccataaagcaaaacgaggacatggtcacaggctgggatgtggctaacctcccaggtgacacctggggatggtaaggggctggccaggttccatttcacatgggtgcagcctaaactgcatacagctccttatagttacccacatgtccacaggcctcacgcacttttcttctgtgtcacattccacaacaaaagaacaccacacacaggattctggggaatcccacaggctggaagagccaggagcgtggcctcacctggggttgatctccagcgtgggctgcaggagctgtgcgcgctccttctgggtcttggccagctgctgcatgcgcaggaagtggcgggcagcccccatctccagcacggtgaccatggcagggtgggtgtccagtcggaaggtcacctgtgagcaaagcccggggttgagggtgatagaggttcccaatgtgagagggctggcaggatcttaccaggggtgaaggtcacccagaccacgaggtagcaggcggggtctcaaggactcccctggaccagcgctgctccctccccattacccactaacttgtgggccctgagctgatgccccacgcaaagatactgtgcccgaggggctccaccaccctggtgccccgctgctgcctccaggagctgcccgaatccatcgtcctctgctccatgccagcccaccctgcatgaggccccttcctccaagtgaccatgcatgggacgctcatttctcactctgagctagacaggttggtggggggagtcttagctctctgaagcccacccaaaacccccgactaagcacccaagtgagcatgtgagctcctgagggctggggtagcatgtcccttgtttggaacccccacgtcctcagccattgcagctcccactcaggatgctggtttttcagttctcagttcacacctgctctggagcagggctgggagaaagacacggccttcctgcctcagcggcactcccgagcaacacgtgccgagcagggacccacagggtctccacctgacaccaagggcttctgctgctgctggaaggacacccaacgggccaggtactgggagccaccagctggccagcctgttagggacactgcggccaagtggtggtccatccccgggaaagcctcaccttcacgttggtgacacgcgaccccagcacatttctcatccaggccatgagctcctccgtctccttctctgataggcactcggcggctgcggaagagcaggcgacagggagctcaggcctgcatcccaactccccggcttccatgggggccacgcagcatgcttccagctcccacctcctctcccaccaggatggagacacaagctagcaagatgcttttcatctaaaagtaaaacctcaaaggatgcttcaggttgcctgaggcccatacaacttggttagggctttaaaaaaatacacagcctctcaagaagctgggccagctccagaagccaccgtggcaggagcactggacagacccctgatatctaaaccaggaggcaccttcctccagtcaccagggtgctcccacaaggctcttctcgggggtggctgagcccaggtcaactgacgaaaacccaaaggaagccctcgctgcggggcaggagaggcgtgcggggagtggaaaccagccccacgcctagagagcaggggatgccgacctggggacctgtcctcaaacttctcctccttgtagtgatccacgactatgtccgtctccacagagatcagcttcttcttgtcaaactcacgaaggtgcagcagggtgagctcatcaaactgctcaaagcagaagagaacctgcaggtggccaagagcagctccatcagaccccgggggcctccagccaccacagaagaaaggatgagggcggcaggagggctgggggagccaagcgggccacactggggaacaccggggcagttggggttcctaggcctgcatgacagttactacgacacctgggtctaaggaaggctctgactgccttcaaggcagaagcactccacgcataaagaaatccacatgtggctgagtgcagtggctcacgcctgtaatcccagcactttgggaggccaaagcaggcagatcatgaggtcaggagttcgagaccaacatggtgaaatgccgtctctattaaaaatacaaaaatttgctgggtgtggtggtgtgcacctgtagtcccagctactcaggaggctgaggcaggagaatgacctgaacccaggaggcggaagttgcagtgagccgagatcgcaccactgcactctagcctgggcgagagagcaagactccatctcaaaaaaaaaaaaca

SEQ ID NO: 28556 - DNA, 5640 bp, Homo Sapiens
gggttgtttttaaagaaaaggggaacagaatcaggagagtgggcaaaggcaataaaatcaaagttcttattaattatttctgagaaatagaagtttctcaatttatgactcttggaatgtctgaaagggagcaaatttggaatagatcaatctgttaataagccatctggcaactttcagaacctctattaagagactgctgagtcacaaacagcacttccattaatgaagcgagaggaaaagccataataattacatcttcacccactacccttccagagctttgcttctcctccacatttagccattaaattgcatgagggtttctcttcatcagggtccgcatggaatctttcttatattttaccctttcctacatgtagccttgaatgtcctttccacgaatatgctcccacggctgggagcattttcttttcttttcgtcacctttgatttttgggattagattaataggggaaaaagtccctggctttaaagaaaacaaaagtagaattcttcaaaaataaatttcatactgggaacagaaaggaactaaatgcttcataaaacagggaaaaagaaattaagatcatcctagaaataaactaagataaaaataagtatactgacccttggttggtagataaaaagatgaccagtcttgtattgttttaaaattagataaacatggattaagcatgcaaagactctgttccttttttttttttcttggagacagggcctcacgctgtcacccaggctggagtgcagttgtgcaacatcatggctcaccgcagcctcaacctcctgggctcaaacagtcctcccaactcagactccagagtagctgggactacaggtgtgcgccaccacactcagctaattttttattttatttttttagagatggagtctgtgttgtccaggctggtctcaaactcttgggctcaagcaatcctcccacctcagcctcccaaagtgctgggattacaagcatgagctactgcacctgccctctgtttcctttggaaatctcttacctttcattagggtttctttcatagcaatttcctttggtttttaagacttctacattgctttttcttttattatctgtgctccgtgaaccttatgaatgctgcttaaaaataatgtcaaaatatgttttagctgcctactcaggtaacgttttcttttgctctcaccttggtttccatatactatttttggttttttgtgagatctaatcaatgatctagtcagaagctacttcactggctaacagtgatcatgttcatgtgctaaaaatgaacttgaaacacggaagtagtggttggtccagtttgaaagctcttattagtattcttcatcctggctgtaataatagccattatttgttatgcctttgttatgtagcagacactcttaaggattttatgtgtattattcaaattgctattactgttctttttatagttgagaatctcaggatacctacatttatcactttttcaatatatatgtatttcttattcttattttgtcttggagtgtttaatgtgttatttcctgttcattactttaatattatggtatctaggcttgtctttattaccatgagcaaggtctccaggagttccacagtactgaaggaaaattttgtcatatccctcagaagaactgaatatttattattggtatgggctcctttgtttattctcttctcccaattaatagattttaaatgaaatcttattagctagaaacaaaagccacttactccttgctgagagccaattacttaaatatatttcttccttataataaaataatttgcttctaggagcagaaatctatcttgccataccctttggtttttaaagatttctcttctatttgcatttctgcactttggtggttctcccatgaagataattatggtgtcataaaattcacattccactggttcctttgaatcttaccaaccactcttgttaacagagacaatgaacctgaactgttttaggactcttgttattactgagacaggtcacaaacatcaaaataggagtccgtggcttgtagtgatgctttttagtcttgtgatagcacaatccatcactttccccaaaattcttgtcatagaacataatgaaaaatatgtaaaatacccatttatgtggcatttcattcacttaagttgcggttaactctaagccaaattataccattttttctctctgtactttagctccttgaatttccttaatctgggaaacttttgttcccacaccaaggaacaaattcagggggtacaagtgcaggtttgttacatgagtatattgagtgatgctgaggtttggggtacagatcccatcaccaggtggtgagcatagtacctaacagatagttctttaatccatgccctcctctctccctccctgctctagtagtccacagtgtctattctggtctgggaaattttcatcactttccaccaatcttctatttattctccaaatgtcttccaaagtatcctgccccaccccctcctcatcctaagagattcctttaacttcaagatcatatccagtgattgctgaaaaatgtctgccatgcacttgctaagctagtgtttttaggcattaacatttattatcacatccatatttatatttttgaaataatttatacttctcactgatatcatctaaacagatgcttctcacagttttatgttttgttttttgtcagggatgaaagacaagtgagtggtatcacttaaggggaagaacagtaggcttaacgaatagcagacctggattctagttctggctttgtcatttactagctctggtaccccaggccagtcacttaccatctctggttcagttctcatctatcaaacaaagaggctagacaagattagaaactaaaggcagaagacaaggtagaaaaatcatatgattttgggaagagcattttgtcctttggtttagaagaccaggctgcccaaaagagcctcctattttatccataacccctgatgataaggttggtgggaacagagtttctaatagtaatcataataaatttcagaagagttttaaagcttctggtcaacccccttgatttatatgggtgataaaactgaggcctagagcagttgtaatatgtgcaaagtcatagtgactggcctcctagcccaactactttgtcagctacaatgaaatgctcattaacagaatctttctgcaagtataaacagaatctattttttataaaacagctggccacaactaaccatgccccatctttacaactgcttctgacattcatttatgactgctttgctcacatttaggaataaactttgaaaaaaatactttgtcagaaatagtgccaagttttcactacatctattcttgttcctgtatttcttttcgtacttttaaattttatacatctttttaaaacaattttatacaatttcctttactacaacatccaagcaattcattagatgactacagcctagatgaaggtataaatgcctattacatctacctcattaaagaacttcgttgtaattcttgggcagtttccagactctgttacagaaacagagggctgtttctttttgttgtctttaaacttttcaaattaattcaaaactagtatctaattgtcctttttgctgtggtatgtggtgtaatgttgattgggaataagaattatggtagaaatagcagatgtttcaaattctcccatattagtctcttagggacgctagctccagattccagcccctggggcaataacttgtgaggattttcctggtgttacaaaaaatattgctgttaaaaaactaagactcaaaaccaaaagttgtgattaataataacaggattattagtcaataatattttgattaatactatagaatagcaacagtgaatatacctcaaattgaaaacttttaggttgtgttcttggctcattctctcataacctggatctaagttggaaagctgtggcaccctgtttgggtgtcccatctaccctgttttctgtttctgcagatggcttgttcaagcttcattttaagcctgctctgtctacttatcttccttatatcctaatagacttctcttgtgttattacacatttctcttttgctctaatatttcattattttccagtttgtcagtaccgttatcagagggacgaggaaggaataacacaccagttgaccattttgtttctctgaaaatctgagcaatacggagatccttttattagtaaaactgaatcattactcatactacaagggctttcacttttaaaatgtaatccatcgttgcttgccatttttatgaaaaccaaagttgaaaagtcttctgaatcacaggctatgtatagccacacatgcatgacttcaggctagcataaagacatgtctgctcctgagcctcttcttttaaagggcaaccacttgtataccctctggtggccactcctccttcgccactccaaggcagccctggtactttcctaagtggcccctcctacagagcacttgccggcatttggcctgctgctggtgaagacgccccttactagcttcataaatgtttttctgcaagcagggatcccagacacatactttggtttctagtgtttcagttactatgttgtatttgaaattctcattccacaattaccctttagttgaagtcctgaagtacatgccatgtactccccctttatttctaccttgatcaatggcctctgcggagtgtagtgaaagacatctttttattatgatctacactttaaaaaaccaaaggctgcctgtattacattgctttggggagttgttaagactctgttttttctactgcttcacattaaacaataattttgttgaattttgaattcttaaaattctcactgacaaacattttaggtcagtgttgaggaaaatgtgtgatgcatgttagagaggtgatgcattctcccttatgcagggacatgggtatatgtgttacatatgctgatatataacccaccattcatcccaggaccacaagggtagctgtagataaactggttatcctaaaatcatgattatcagtgttgatctctgcaaccaacattgctttagggagttgctagtcattacccctgctacaatagatagtatttgtcagtctaagttacagacaaaaaattctaggttgactgattaagaaagccatgtgttttaatttccttcatgttttaaaaacaatggacgtaagtgcagagagacctttgaaaatattaagggaaatctatttaatcctataggtatgtgatgacttgtttttttggaaaaaggtatttggaacatcaatctgtaattatccattttccattcatgcattcactaattcaatatttgatatgtgtctgggagtgctgggaataacataaatacaaaaaaaaccctaagataatcattcaccagaagctcatagatataatacagttatatagctaaatgcaaccagttgtttttccaaatgtactcatcatctgtaataaaagaaaaatgaagtaaaacatctgaaaccttaaaaaaaaaaaaaaaaaaca

SEQ ID NO: 28557 - DNA, 4356 bp, Homo Sapiens
gattgaatcaggtgctacccctaatccatcatctactcctttccctgcagaaactcagagaagattttcaagtcagaggtattactcaggccctcaatctggtggatagtttatctctgaaacttgaaacagataccctactaagtgccatgcttaaatccaagccctgtatcttggctactttgttagatccttgctttaaaaacagtttggaagacttttttcctcaaggtgctgatttagaaacttataagcagttccttgcagaagaggtctgtaattatatggaatcttcaccagagatctgccaaattccaacttcagaagcttcttgtccctcagttacagtgggagctgattcatttacctcatctctaaaagaaggcacctccagttcaggttctgttgatagctcagctgtagacaatgttgcccttggaagcaaaagcttcatgttcccttctgctgtagcagttgtggatgagtacttcaaagagaagtattcagagttctcaggaggtgatgaccctttaatttactggcagaggaagataagcatatggccggctttgacccaggttgccatccagtatctaagttgccccatgtgtagttggcaatctgaatgtatctttactaaaaatagccactttcatccaaaacagatcatgagcctggactttgacaatatagaacaactgatgtttctgaaaatgaacttgaaaaatgttaactacgattattctacgttggttctgaactgggatcctgagcagaatgaagttgttcaaagcagtgaaaaagaaatactgccttaatttctttttctccatttaaaatgggcaactttttgctgtgttactgtatcttaatagctgtagttgttaaatataatcattatctttataaacacatctggggaaacctgaaatcacacaagggctgaaaattcctcagaggcaatataattttgataaaatgaagattaaagatttcatagctataactgtggcgctagcacttgaaaattttgcttataccaatgagagagaagatatttttaattaaaaaaaatatagtgcagcattgaaaggccttaggctttcttcctggtagatggaactagtaattggttttaagtaaaacttcccccaccatgggaaattttattgctctgaaatcaacgaaatgagaaaaaagtacactggctggcattcctcctgcccctgtttttctgtttccttaaaaaccctgatgcttaattacaacttggcaaaaagaaaacccgtgaaattgttttatatttggaaatttctaattgcctcctcatactggtcagctttataatttcaaattgttgagtgtgatagtgttaccctttagaattggatcttatataaaagggaaatattagaaaacaattaggaaaatatacttttagtctttgaaatgcctgttttaacctttataaaatattataaaaatagattgtgtaggtactttcaaataatttatgggtaaaaacagactaaaatgtttgcaagaattggaaaaggttgaatgggaattgtaatgagagccctttgaacatgcttggaagaacccagtagacatttcccaaagattgtttctgtaattttaggtaatctttttaaaaacatacttaatgacccataatactgtattaactgtgcggttgttttggccactgaattcttaatgaaaactaagcagtcggtatttttatgtgttaggaatcattggtgaaatgagtgaattgatctcattttaagatccctttctactctgaaagtatgtttctgagattgagtaggaggccagaaaatgatgacttttagtaaaagtctattaaaagtttcagactgaataactaatgtgagatcccaatttttcctttttttcattttagatttggggatattccctgcccaaaaaattcctggaaaattgactagtattaagtgtgagtaaaaggtgtccacttttttttaagttttgattttagttttgtcttggatagtatttggcaagatttagcctagaaattatgtagtatttattacataagaatcaaaattgctttgttactgggctggtttcaaagtttagaactcatttctatgtatcaaaatcgggttttttttggttttgattttttttttaaattcttaaatggtaaatatgccattgtgaaatgaaatctcaactccaaaagtttacccttttactaactggagtaaatgtatacttacaaagtctttagctgtagccattagtagtaaagaatttggacctaggctgcgtaagcaagcctttccagggccactatttaatggcaaaccagtgatactggtgttgatacaaaataagaaataaattttcccttagataaagctttctgtgttttgacagtgccagtttagaatggctataatgctgctctgccttctacagcttgctgcaccactctgtagttactctattaccatacgtttctatcttttttggttaaacactccctgatgacgatgatggatatatatacatacatccatattatacataatgatatatgtgtaaggatttaccttcgtctttattttgtgggctgggcaaaatttagtgtaacaataacttcatgatactttggtataagagtaagttctttatttttataatgaacccaaatctaaagtcttttatagtgcattttaaaaggggaaacttatccaaatgttatatttctatacatttttgtgtatatgtgtgtgtgtataagccagttagtatatatctgtatgtatattatatacataaaacactatatttttacatacaagtatgcttttattatacagataataaagatgggggaaggtttctgtttttttcttaataggtgaagaaatcttgaagaccagaaattggatcttactgaaaaactgatgtttttttgttttttttttaaattatattgttcagctatgggagatggatttttttttcatgatcctttaactctcaagttcatctttaaatgaactctttttttttgtttttttgttttgttttgttttgttttgtttttgaggagataactaaccctagctgtctccagtctgacaaaggttatttgaatggacttaatctcccagtagttgggagatgttttaaaaacacatgctgtgtttgaattgtggctgagaggttttcttggcaatgtgaggaggaaatttttttctgcctcattattattaattcatggattgagtgttggttcgacctacaggcgtaatagattggaactcagtgaagacacagatgttcctgttcagagcaaccagctaatgattacagtttaaagacaatttctgtgatcaagttgtcatttggaagattaaacccatttcacgaggacttggagcctggtccttgctttgaggaagcagtggcttgtttcaagaagccacttctgatctaagaatctacccagcatgcctaatcaaggagaagactgctatttttttttctattccacatgtaccaaaggcgacagctgcccattccgtcactgtgaagctgcaataggaaatgaaactgtttgcacattatggcaagaagggcgctgttttcgacaggtgtgcaggtttcggcacatggagattgataaaaaacgcagtgaaattccttgttattgggaaaatcagccaacaggatgtcaaaaattaaactacgctttccatcacaatagaggacgatatgttgatggccttttcctacctccgagcaaaactgtgttgcccactgtgcctgagtcaccagaagaggaagtgaaggctagccaactttcagttcagcagaacaaattgtctgtccagtccaatccttcccctcagctgcggagcgttatgaaagtagaaagttccgaaaatgttcctagccccacgcatccaccagttgtaattaatgctgcagatgatgatgaagatgatgatgatcagttttctgaggaaggtgatgaaaccaaaacacctaccctgcaaccaactcctgaagttcacaatggattacgagtgacttctgtccggaaacctgcagtcaatataaagcaaggtgaatgtttgaattttggaataaaaactcttgaggaaattaagtcaaagaaaatgaaggaaaaatctaagaagcaaggtgagggttcttcaggagtttccagtcttttactccaccccaaattccatgtcaataaagaacagctaaattcacaaaaaaaaaaaaaaaaaaaaaaaaaaaaaaaaaaaaaaaaaaaaaaaaaaaaaaaaaaaaaaaaaaaaa

SEQ ID NO: 28558 - DNA, 5760 bp, Homo Sapiens
gtgccacctactctaccccagatgggccaaggtaaccgagtcgcactgtgcagggagggccttcctgtgtgtgtgtgtgtgtgtgtgtgtgtgtgtgtgtgtgtttcttttcctgaggacacagccaccctgctgtgcagggacccttctcccagactcctcttctcatcttgggtgcaggttgacgtttgagaagcaaagacaccaagggtccccttcctcccacccaggcctcacgtcccctcagcgcctcctggccacgcactgttgattcctaaggtctgctgccctctgcaagcactgctcctcccgtgtcctggcctccacctgcccctgccctgggacaaagcatcctcctcgcccccaccatgtccacgcagcagaggcagatgtccaggcactgggggaacgtggtgctggggcctccccgccccactggtagagaggagccagcctctgcttgcagaccatccctcacgctctgctcctgtccagtgagctgtggttgcacccgcaggccagtgggctgtctgcccacatgggtgggggaccatggggctcccaaggtcacgagccctgagtggtttgggtctctgtcacagaagacgcagccagttggaacattcctgaaactttatgagaccgctgggccttttttacttatttgggccaaaagtgagcgacagtgactgccccattaacaccacctggaaaccagtccgtccttctcgttgagaaactgatttcctagtatgcattttttgaatcgaataaatttacgacaccttagatttcacttgcaattttgacttctaaaaaatgttttagtcgttggtaactggtttctcattgaaaacggatgcctatttgtgatactggtgttcccattacaatgtaacacaaagatttaaacgtagagtgagtggaagccccacacaggcaggccgggcggcatccagtggcatcgggcgcctttttcgtggctgcagcgtcagcctgcactgccgggtgtgaggcagacgcgcacttaacggcgtgagaagccagatgtgggaggcaccgggcactgtgggcagtgaggcaggagcttggccgcgtgtggggcagaagctccatggctagaatgggatgtgtttgggtcacgggtctgggggagggtgcgttctggctataactggatgtgtttgggccacagaggtctggggggtgcattctgcatccagcagctctcacatggcagtcgtggtccccgttgctggtctgggctgttgtggagtagcgggggcatttgtgggcgaacccagaggctgaaattccaccccaatcagagctctattccagggaaaaggggagaaattgagtcaggctttgttgttctgcaaaacagtgacgccgctcaggcagcgctgcgggttacagcatactcagtggcttcatttcactctcacggtaaccgctgggggtggattctacgattgtcctcatttttacagaaaaggaagcagagatggttcacagccaagtcacctgtccagggtgatgcctttgcggggcccaccagagcccgccagtgtcgcagaggcggtgagcccctcccgcccaacacacagccccttggcaggggctcttgagcaaacctgcaggtgggcagcttggggcgtttctcagctagcatcacccctgcttcaggacttgaaagcatttgactgggttcgctggcctgaggattacgtgctcggtggaaattagtcattctgggctcttctctccttcactctaggaggactgggacccagagagctccgggatcagctccctggcttggagtccaaaggcagctctgaccacgccgcctggggcaagagggagggcagctgggttccatctccgtggcctggcacatccaaggtccctttgtggaaaaggcacgtgtagcacccgttactggaggataacctgtaactttgtgcctctcccaagggagcacacaggtctacacgggaagtaagattccctgtacccactgtgtctcacagttcagaaaaagtcgtcaaagtgctcagactcaagaagtaaataaggaaatatgaaaacatgactttatttctttctttttttgagacagtctcgctctgttgcccaggctggagtgcagtggcaccatcacagctcactgcaacctcaaactcctgggccaagcaatcttcccacctcagactccccagtagctgggaccacaggcatgcgccaccacactcagctaatctttgtatttttcatagagacagggtctcatcatgttacccaggctgatctcgaactcctgggctccagtaatccacccaccttagcctcccaaagtgctgggattgcaggcgtgaaccaccacgcccagctgaaaatataactttaaaaaaaatcttagctccgtaagaactaagccagatcagaaaacgaattctgtctgtggcccccacagctgtgaaatggagtcgctgactcgccatgctcgtgcacgtgcttagtgcccactgcagaaggctgctttgaatgaaagctagtgtttattcgtgtactcacccagaaggtttctgctgttattgaatcaaattaccctacatgtgaggcatttttcacggccagatgcagacagggacacagacgcagcagcacccaccacacatgaacgttcgggggtcactgcctcgtcttcatgtcttgggagttgctgtttctgtctttaaatccgagcgtcagaaggatctgagacacccgatataaatccctggcttgttaatgatgctcacagagagcggccacgcccatagactgcataatttatctccatcctgcagaattctgattttcatgtaaacctaggacatgttcagagacttggaagttagcgattctagcccctgccttaggcatgcccgtgtggttgtttctgctttggattggctggtggtagcagctgctggcatcacgcaattggcttggctgcagagtgagcccacggaagagggctctccgcaccgactctgtgactcaggcttctactaccaggctcatccgaggacggaggctgtcgttatacaacgcgcaagtgtggtctctgtcacagatgtggctgtcgcggagagtgctgcctcctctcccgtttccagcagatgcttgggaaccttcagaagtcttggggattttctcccagcaccgtagccatgccaccacgagtgaatccttaacgtggaccagcacgggcacctcagatgccaggaccggcgtgatgtatgcgccataagactgttttggagggtttagtcagctggtcacccaggaaaggaaaatgactcggctcttactgtggaatagcaaatgactgagctcgggagagatggttctgcctcaatctgtgactcgaggtggttggtgttaggctgagaaataagaacacaccaaaagtgcctgcccttccgtagatgagagcaggttctgggactgcggggatggggctgccggggcccccgtgtgccatgcctctcacctggtattgcagaaatggcatcatgaatacgggggatcgctctcccaagaggttttctgagggatttcgtgggcagccggcttcccacctgcacacattaacggcggcgtctcttcctcactgcagcctgcaggacgctggcatcggattcatcctggtgatagaccggcgacgggacaaatggacctccgtgaaggcgtccgtcctgcgcatcgcagtaagtgccacccggggctctgccctgcgcccggcccctccctgggctgcatgaccgcatggtgcccttcctctgtgtctgccgcagttcctgctttgtgctgagtgggacagagcccagtcccggcgggtggaggccggcgccaaggccccccctgcttgggctcccaaggcactggtgcctgggtgtgagttttcccagatgaaggaactcttagggagcccaatgtgacttgcaaacaatttccccaggcagagcagcccatatgtttccgaacaccaagtctgagatgctcgggactgaatatgcctcttacatatttatacattagtgattttctcctttccaaatcgggccatctatctttagctgtgacactgaacgagccaccaccgcctcccttccccagtgggattgaacatgcacttcctcttacacaaagcacaacagtcctgaccaggcaggacgggggctgtgtgcagagacgctccaggctggaagttggaagtggtactgcacagctttcctatgtgattttctcctttccaaatcaggccatctagctgcgacactgaactagccaccaccgcctcccttccccagtaacccagcctcgcatgtagccaccctcctttccaaggactttcccttggcatccgagagtctgtttgcagattctgcacgctgccttccatagcagaaggggagctgggtttgctgttggttttaacccagagtaatcatttaagagggaagagattaagtcagcagaagcccccaaatcttatttttgtcggtagctcccacccgtatgcatgaccccggcatggagcatttttcacccacgctcgctctccccgcctgtccgtccaaatttcattgctgccaaaggaccaaaaaaggctgcctgtctgccaagaggtgacccagagcctgggtccaggcacctgcatgttctcacgcccgccacagcccgtccctcccaggctctgggaccctgggtcctcagctgtgatggcacaattgctccaagcattccccagcaccaaaccccagtgaagtcagattctcccagtgaagtcagattctcctggcctttcctgggtcccgcgttcagactacctttgggttccccagcctctcggtggctgctggctggtgcgccaaggtttgaggtatactgaaaaaagtcattcctttccccgcacattgcctcattccttcatcttttacaagaattagaggccccatatctgctccgatgcccacaaccttcatcgttttggtgcaagcctgtccctgagccgctggttctcatcgaagtctttaggatgaggcatctccttgcacccccacggcacctctctgcccctcgccgcggcggatccccgttcctgaccctgactcaacctggcacacaccacctatggcatcgttatctgaaataattcaaaacgcttcaggatgcttccaaaaaagtagacgtgtatagaatcggtcttcctttgttttaacagtgcgttcgtttgcttttgcgtcactataaagacgtacttgagctgggtaattgataaagaaagaggcgtaattggctcacagttctgcaggctgcacaggcttagcacctgcatcttctcagcttctgagggggcctcagggagctgccagtcgtggtggaaggcagcggggagccggcatcacatggtgagagagggagcgagagagaagggggaggtcccagacttttgaacagccagatctccagtgaacttactgagcgagaactcacccgtcaccaaggggatggcgctgagccattcataaggggtcacgcccagacttaatcacctcccaccaggccccacctcagcactgggaatcgcatttcaacatgagacttggaggggacaaaaatcccatccatatcaagcatccccagaaatgcagaaagttctttagataaaagccatcaccagctaaaaaaaaaaaaaaaaaaaca

SEQ ID NO: 28559 - DNA, 7472 bp, Homo Sapiens
gttggtggaggggtatgtgtaaaataataatgaaagctaacacttactgaatatttcctatgtcctaggcacaatcttaagcactttatacttattactaatttaatcatcatttattactcatttgatatcccattttatagatgaagaaaccaaaacaaagacagataagtaatttgaccaaagtgtatcagtgtccaagaacaatctcattctctggccccagagccagtgttcattactcgttatatcatttgtatgtgttttctaatacgaggaagtatgtatatgtgtgtatgcacatatatacatgtgtttacataatatataatttaaatgataaccaaaatcaagagaataaatcagtgcttaacaaacaatatgatcatcaagtacttagtatggaaagactattaaagaagaaaacaaaagagtttagatttactctcagctgtgtgaccctaatcacttatctttactaagtcctcatctgtgataaataagcatcacctgggggcagatatgtggttaaaaacagaaattcctgcaccccaagttggaacccctaaatccatatttctaagggaagcccagtaacctttgtattttaacaattaaactgagggattcttatcaatattgtcatagaattttgaaaaacataaatcagtgtgattgtcaagtctagtcgcacatcagaatcaacttgggaactttcaaccataccaatcatctctgatctccttcttcaccccaattaaaaaaatgattaaaaattatactcttacatgcttttatttagttgccaggataagcttctctttcaaacacttagaaatgtctttaaatagtcaagattttaatggtttgtctgaatgtgccgtgtattttctagtgacagcgaagaacctcctgaaaccctttctgataatgtagtaaacatttctatcccggtaaaatatgaagttggactacagttttacaggtaggagaaaactacatttttatgtggatgcctttctattaacccagtggttctgaaagtgtggtccctgcctggccaagggcatcagcatcacctggaaacttgttaggcaaattctctggccccaccagaaacctaccaaatcagaaactcggaggatggggttaaacaagccttccaggtaattctcatgcatcctaatgtttgagaaccattatactaaataacccaaagtgttaggtgttagtgataccggattgcatttgctgtccagtcttaattcccgaatgcaagttgaagacccagaagtccttcgcaaaacacgatattttcttagaggccgccagcatatttcttggtcatcgttctcatcctgtggaagctgatcagtcttctcaatctggacacacaagattaaagcatttctcattgataagagctgtttatttcttccaccattcataaaccattctttctcttaagaacttcttatctatcccaacacaaaccatgttgacaaactttccctctataatttcccctgcttaagcagaactccaagcttttgccaaataaacatgtgcaatatacttaaaaggataagaatcagtggcaagtaggtttattctaaaagtcttatcattttattaattttttaataatagtggctaacatttattgagcctttgtgttctgtcttatgtgatcctcatgataacactatggttcaaatacaactactatctccattttccagttgaagaatttgaggttcagagaggctaatttacccaaggttatatattcaggaagtgttagtttaaaccatttcacatgctttttttttcttttaatttaaaaactgttttaaattgacacgtaataattgtacatatttataaggcgcttggagacgttgtgatgcaagtaatatatagcaactaaacagggtaattggaacatccattgtctcaaacatttatcttttttttgtattgggaacattcaatatcttctttctggcttaataatttattatctatggcactctctctttactaaatggagactacaaaaatggcatgattataggacatacatgtagattgtgctaatatttctcagcctttaaattctgtctccacttttctgtatttttctgtatccacttctattggtgcactgacttttccccaagagttttccatttacttaaaatcaaattttggcaaacacttataaatattttttgtcttcccttgactgaagtgctgcttaaaaacatactattttactctaccaagttcatccaaagaacatgatgaagctgtgtagagaagattgaacttttaagtttagcagtaaatataggactttaaattatgaaatggtaaaaatttttaatctatttagaattcagcattacattttagtttcatttttcactaggtataaatggtattagtgaatttacagaaacttttcacttgttaaccatgaaattttaacttttaaaacacatattctagcattttggggtcaaataagcatcagtgactattgaactaaattacataatccttctcactctcctcaaagatttaattttacgtttcaaggtaaatgaattcccctatgatttgaaatccctacaagtatttttgtggaattacatgatatggagaaagaaaataatgaggccaaataaaagttaaactttgttatgttttatttttcttctaattaattttttaagctctgcaagtgaataccacatttcaattgctgccaatgagacagtccctgaagttattaattctactgaggacattggaaatgaaattaatatcttctacttgactagaaaaagtggatcttgtccaatgccagagcttaagctgtcaatttcattccccaatatgacatcaaatggttaccctgtgctgtacccaactggattgtcatcttctgagaatgcaaactgcagaccccatatctttgaggatcctttcagtatcaactctggaaagaaaatgactacatcaactgaccatctcaaacgaggcacaattctggactgcaatacatgtaaatttgctaccatcacatgtaatctcacttcttctgacatcagccaagtcaatgtttcgcttatcttgtggaaaccaacttttataaaatcatatttttccagcttaaatcttactataaggggagaacttcggagtgaaaatgcatctctggttttaagtagcagcaatcaaaaaagagagcttgctattcaaatatccaaagatgggctaccgggcagagtgccattatgggtcatcctgctgagtgcttttgccggattgttgctgttaatgctgctcattttagcactgtggaagattggattcttcaaaagaccactgaaaaagaaaatggagaaatgaaatattttacgaaagaaaataataacaattattcaataatctatcctcaggtttgcctcaaatatgtgacaagaaatgtataattcatgacatagtcatgtaactatgtaatccatcagggattcattacttggaaaatgacaggtcatgcattatccaaaaacaataccaaaaagacatattttataaaatgacaaaaaatattttacataattactcatttttgttgagtaagcaaaattacaaagtgtttttaaaaaaacctgtacaaatatgtttatgtattaaatcaccatccaaaatatttaaggaatatataaaaagatttttatgatcatagaaacatctattttcaaaacaatataaattaagcttttccccttgattcctgttggatatccatgttcagcatgacagtcagcactcgtaaatgccaagaaaagaattacctgaaaaagatcatttctccctattcaaatgagaatattttccctcggtagaatccatatacaatatggattgaaaattaagtcacgaagaatacatttagcatctttgtgttgggttctatacctaaaaattttccctcccggcccaaggtgattggaaagtactgcaattgggctaaaattttatctaggatggaaaatcaggatagactcgtttaaaaacaagtatattaaatgggttaaattaagcttttacagaacatgcttaattctgatattgagctctaaatgcaaaacccttttatactgaaaaaacacttaaagcagttttgtgtggcatcacagtgatttgtcatgaaaagccatatatgggggacatgctaaaatggcttctgaatgaaatacgacagcagagaaagatgccactgaaatgctgaaattatctttgctgagcagcttttgaatgctaagggttccagtatgtgacccaaagaaggagttgtctcaactccttggtacagggttcattcaaacccccaagctgtgagagtgtgtttatttttaattttttaaaaggtatttaatttccaaccacacttcttatttttttgaaaagacaattttccatttcagtattacattttaccaagaagtcactgctttttaggtgtgttgcatcaatatttaaataaaatcccagaaatgtattttaaagaatttcaggtttgaaaactcaaaccaacagaaagatatcacacctttgtatgtgcttctttgttcttgaagtagtcattatggttcattggaatctactgtagcataagctcctaggttgctccatttcttaggaaaatagcaatgaatgaatgtatagtagttgcttgtgtgaactactgctgtaaagtttgctgacatttctgcaacaacatttctccatctgatttaccagaacctgtaacaagaccagaacatgtatttatccagaaactcctgggctctgctttgttcaaagaggagcaaatccacatagaaattaaatgttataaatttatttttttcaaactaatttccaaagaatttagctgaagactcagagtcagcctacctcttgactctccacatctgcatctaagatcctgaaggccaaaggaatgtgcctgtgggatgccaaagccatcagtagctggaagaaagaatacctctttctagaggtttggtgtcctcttgctggcctgtcattatttggaaatacgcgcttttggaatttccttcattttcgctatttccaggttcagaaatcatacctaccacttgttctttctttgcccagtaaaactcagggtttctcttattcagagttaccatgttgcacacccccagtgctcagcctgcccagaagcccttctctgatctcagcaagatcttagtagtaaagctaacggatccattgaaattcatactcagcatctgtgactactagacaaagcccatttactgaaccataagtgtgcacttttaaactaaattattaactgaaagggaaaaaatagaaatgagggcattttgaagtttttagaaaagagaggaagagctgttggccagatcaaagagatacttataagcccggcacaatttttaacataagtcattcctggctattaagtaaaatatttcatgaaccagaagtcctgtttctctaatattataatttgttgaggtttgtgtgtgtgtgtgtgtgtgtgtgcatgtgcagacacatgtacacatataaattgaatacaaaaatagctctataacaccaaaaaacagagtttacagaaaataaacacaaaagctatatctgcaagacaagtttgattcatctagtttcatatagtttcatatagtttcatttttattaatatttaggtttaacttatagttctgcaattatttaaaaaacaagtacagagcgtttgattaaaaaaagtcaacaaatgtttcaaaacagctttgtacaaatgttataaaacatatttaatgattaagaaatgtactagactctatcatttacttttaaaacatttaattagaaaaacaggtgatatttaagactatttataaacttattggctaaattgccaaaaagtttctttttctctaactttggtattctaaataattgattattgctcccattgtaaactgaaccatgtatgcactctcttttctgaccaaactacaatggtatattggtaaattatttaacaacacactgtccaggaggaaaaaaaaaacagtctctgatttgtatcatttgccaatttccatggtccaaatattctctctccattttcaaactaccaaagtgaccctaatcagcttacaaaattcctggaaatgtatctgccacctcttaccagccagtgtgagctgacttcagcacaccactgagacagattacgcgatagacagatagatagatagatagatagatagatagatagatagatattgatagagaacatgttgtgtctatatacatatccaatgacacacagtataatcatgttttaaattatgccaaaagtactgattatatcaagcccagtaaacataatgctacacagcacccattctttaattttgatttctaaaattataaccttcctttgatattaataaaatgttatgaacttgcaggagaaggaaggagttgaaagaaggaaaatataaagggtgatccacagtgaaaatcagacctacacaagccacaaaaaaattgtctcattttcccaaggaattcaaagtcctgtgatacacattacaaaagatgacactttgtaaatattttgaacttctatgatccaatttcaacttcattggtccaatttgtcaaactattttcctctgagcactagattcatgggcaatttaatctctgaatattttctgtgtcataagtgtgcttgaaaagaggcttgtagtaaacagatatttttacaaaatttgatgcttctgcaaccataataattttatctataaatgcgtatatacatatatatatatatatacacatacactcacatgcagatatttacatatatagatattctcttttccttttataaaatcaaagtctaggctcaattggaaaatggaaatatttgcaccaaaagaaaaaagtgccattgttgtgatcaatggagtaaagctggggtatagtagaggctggggaagccctgcccatgttctctccaaggccacagcttgcacaccgtgaatggtggccccactggctccatggagtgtgccttcacgcgggggaatgtccttgtccaacacgctgtaatctactccatgggaactgactgtcctgcttttcacaacattgagaaacaggcccagagcctgtctcatgtgccaggtgcagtcacattattgttaaaataaagtggcttctgacaaatcagttcttcaaaatagcatcctatgtacttttcatttcttccaacaaccctcaggcccccttttgccagttttctcccccaggggagattttcaagactactggagaaaaatctgttaataaaacatttgctctgaaaaaaaaaaaaaaaaaca

SEQ ID NO: 28560 - DNA, 7182 bp, Homo Sapiens
gtataggatagagaaaaaaaaatcaaaggtatgtagtatgtattgccatctgtgtttaaaaataaaagagcatatggggaaactgtatatgcatgtgctttatctaaacctaatgtatttctgaaaggaggtctaagaaactgctaagatcaaacttccagggagaggaattcaatggctggaaaaggaaggtgggagatgtttgggtctatccttgttttgtacgttttgaatattgaaacatatgactgtattacctattttaaaaattaaagaatacagttacagtttggaaataactgaaatagttcatcacacacagagttggctgaactgacagaagcctgctacatagacttgctgagaactctccctttccctcaccgcagttgataccttgtggattttgtatgttagtcttaagttgtcccttttgtcccttcctgcccatcctatctttgtccaggatcatttccatgggccgcttagcttgcttcccctccttgctgtttgttttctttgtttgtttgtttgtttgtttttgagacagtctctcgctctgtcgcccagggtggagtgcagtggcacgatctcagctcactgcaacctccacctcctgggttcaagcgattctcctgcctcagcctcctgagtagctggaattataggcgcccaccacgacgcccagctaatttttttgtatttttagtagagatggggtttcaccatgttggccaggctggtctcgtactcctgacctcaagtgatccactcgccttggccttccaaagtgctgggattacaggtatgagccacggcgcccggccgctggttttttttcaattatccagcccaaaatgtcagccttgctgttctttttgacccacttcccttcgtcttgtctgtgccctcacagggcttactgttccccaatttttgcctacatcatctgtctctacttctgtcctggaggatccttaaaagtagagactttaaggatactgcctggaatctggggggataaaaagtattttattgtctcttgggaaaaataaaactagttcatgaaactggtaggttttaaattttaccaatattgttgcttaggcaaggctcagtttaaaaaaagagagtgattttttgaaatattcagtagtaattcaaacgaagcaacataatgcaaatggtacatagaaatgtaccttttttaaaatatttttagaatatctctgaaatattcactagtaatacaaatggagcagcataaatggggtggcggagctctggcctccaggagattctggcttacaaggaacagggcctcacaccaaggaggcacttgttaccagccttcacctgcctggagccttctatgtggtcacctaactgcactctgcccaccccaccctccaagtctaaccctgcagagcagccaggctgctgcttgacattcatgattctctactttgattcttgccgttgctcttcatggaatgggacccccctgggggtcctcgcccatcttctccctcaactttctggctcagccccatacttcacctcttctctgaaggctttcctgatgcatttgtttcctcttgctgctttaacacatcacagcaaactgagcagctttaaaaaacacacacttactcttttatagttctggaggtgagaagtccaaagtcagttcacaagattaaagtcaaagtattgacagagctggtccttctggaagttctgaggggagaattcatttccatacctttttcagcttttagcaactgccttggcttgtggccccttctttcatcttcaaggcccgtcattctcttctccatttccatgttcagatcaccttctcttctggctctcactcctcttggtcccacctgagtaatacagggtcctctctccatcacaagatcctcaatttaatcacatcgggcaggtctcatttgccatttaagggaatctgttcacaggttctgaggttaaggtgcagatcctaggatgccatcaccattctcctgctcacagtctgtccattcttcacttacctcataggataattacctggtaattatctattcacctgaccagtacccccagtgtaagccacttgagggctatgatgggctctttctcaccttgcctgcctggtgttcctgccatgtggtagaagtccaggtgtttgaaggagtgaacagattgcccagtacaaatagcactgtagttcagagcacagacttgaggttcgactgcctggctgtggatcctaactgcacctctcaccagccctgtctattctgtgtcccatctgcaaaatggtgatgaagaataaaacccagcctggagcccacagtagagggattcagttgggtcacatgtgaaatcattagaagagtgtctaacaataaagtcaagacagttttgtcattgttgattttgtttttgatgtgaaatggtatatgttatgtaaattattattgacaagtttaggaaaggataagctttttgctatttagttatgtttgtttatttttttttatttttttttgagacggatctcgctcttgtcgcccagactggagtgctatggcgcaatctcagctcgctgcatcctccatctcctgggttcgagtagttctcctgcctcagcctcctgagtggctgggattgcagggacccgccatcacacccggctaatttttgtgtttttagtggagacgaggtttcaccatgttggtcagactggtcttgaactcctgacctcaagtatcagcccgcctcagcctctcaaagtgctgggattacaggcttgagccaccgtgcccagcctgtttaaagaaatcttttccttgattttaaatattttccaaaaagtttttaggctgtatgatgaacatgtagaaggtgataaaggatttgcttaggatgaccatgaacctgtggaacagtccgttgtgcaccactccgctttaagtgggtatcgactgcttgggagagattactatgcagagttaatccttagatctcatttgcctaagagatggtggagattcaagaaaaggttaaaggtgtgtgactatggaatgcacacaatacttcactgaatttatggatacacttgagacttccggcttcttgaagccactctaacataagccaaatgtgcgcttaaattcagctaaccctcactgagaacccatcaagttctttgcaccattctaacagagacaactttgtgaaggtcccttgatacctctgttagaggaacttctagatgtcatgtgcctttggtctttttatgtctcaatcttggtattcagtggtgtttccatcagtgtacataatccagagatccaagggttgtttgcatgagatttctagttttgagaagtgagaatcctttgttaattgtaaaatgtgctggattgttcatcctcgggaggcactatatgccattatggggatgacaccatcccatatgccatgcaaagaacagggtttgcagtaaagagaggtgctggaatgtaatgtcagagcacacctatgttccaggagagctaaacaagtctactgcagttaaagaaaagaaatgtttaaaataccttgcaacaagttttttcattgagagcacgtactctgaccaaagatcatgactacttggtgtgcatgaagaaagtcatatttttagaatgccatgataaatggagaagtatatgaaaagcattctagctttaggaaataatgctagtatggattttagattaaagacataataagatctgcctaagcagagtgaagagagatggtttagtagtgaaaaataaggttatcagacaagtaaatggcaggctggaaaataaaaatgtatcatttgaatggcagggagccattgccagtttttcaaaaagcaagatattaaagttatcataccctctgcatcatttaacttgatcgttaaaggagtgatcctagtgatcctagagttctagtgacaacgggaggggaaaattgtagtagtcccactggaagattagggtccaatttatgaatttatttcagggattgaggttcaagtgtagattaaatataaaatgaagaaccagacagctctacttcaaaattggatgcaagtaacaaaggacaaaggatagttgcagacttcgtttctgttctgtggaaggcagacataacgttctgtgattgagatcttggaatttggggtgatttgtgggggtagagtggaaataacgccctattttcaccatgttgggcaggaagggtgatgaagtatctaaattgtgtagttaaactaaaatcaagcagatttggaaaagtgctgttctcaacaggtgaagacctgaccgtaggaaggaatccattgttgagtcctgctcctgcaggacttctgcctggggctagcccagagctcgggaggcgccacaggcaacctccccctcccatgtctcaccctgaatccaggtgttaccactacggaaaagaatccaatcctaatgctgaggaggaagtggttcttacagatgtgataggccaagattttaacctctcagaaatcaacagaaatgcattgtggggttgaggggagaaaggttggccacttgagctgtgacgtggggttgggaaaaaactcctgattcaaacgtgaatgagcaggaaagagacaccccctccttccaaaaagcgatatgacttcttagcagaattccagagctttgagtgagagagggacacagtgactttgccgtaactcctggattttgctggttgcctgtgggctagaaggagttggagctggtggcttggcagaaggcaggaaggacactgcttgggcgtactcagccttgcactagttgagccacttcccacataccctaaaggccacacaccttgctaaggttgcagagcccaggtctgctctaatctcaacgttttacctgcatttcaatagtacttctcacttcatgcttcaggaagtgcttggccaagacaccctagatctgttggcataacagacagccacttagcttgtaggctacatgataaatgttttgttggagttctaggatagcaaagagatggagagatgaggaagatacccctattacagaggaagagttacagcgaggcccctacactcaaagaacttaaaattctcatgggtaagtcagacattgaacaggcaaactttaaaaagaaaaaaacataaatgaactactcagatgttgtgaaagctgctctaaagacaaagtgcagtggtgagttgggtgggaggctgcctggtggggtagatggcacaggtgtctatggtcattaacatttaagctgagacccaaacgatggggagcatctggccaggggagagccagtgggaaagcatccaaggaagaggagcagtcagtggtccgtgggaaggtggacacagggacaattgaaaagatttgagacttgagaccagtttgatgactgcagtggccaaggcaggatgtgctggggtcatgaaccagggcagcattgacacatgggccaaagaaaagacatctctgactcagcaaaagtcagaaaaatggaagtcacagcaagtatgagtggaaattcgtctgttctctagttgaaagtgttgactggggagctggttgaaagtcttggagcttataacctgttttctctgagaaggctgaaacaagctgttgtcctgaagagacaggtagctggaagtggtagagaactggaaaggaggagagagaatgtgggataattgctgtggaatggaagaaggcctaagacgcatgcccagcagacaaagtgtagaatcttcatggccgtccacatagttttgtaatttttcctccagcgaagccaccacccaaccattgggtagaggaagcaggtggagaggctgttggggcttttctgggtggttgagacaagacaggcaaggaggctagagaactggtggtgtgggcaagtgatgctggtgatcaatggactggaagccaacagcagagacttagacccaagaagggagcttgaggtacaagaaaacttcagggtagacaggaaggaggcgtggtgaaagtgatgaaaggggagagtagaagggtggtccagggtcagacagggagttagatttaatccttcagggcactttcattacatcatagctgccattttgtcttttatctgactcaataataagtcagtaataagtaatgttttaattaaaggtaaatgcttggcaggtaggttaaacttcattgagtcccaatcctgtcataattattgtgtatacctttctcagctttttgtctacttgaaatatatttcttcttcctttgagcagccaaaatggaagtgttggatgtgttggctctgttggtaggctcctgttggatgcctgttgtcactcataaatgtaacaccacaaccataattgatggagagttgagttgcaagcttttaggactaattgcaaagtctaaactaaaacatttcctggagctgcctttaaataataataataataccttgtatagatacagtgctttacaatttacagagcacttccacatacatcatctcatttaatcttcacaataaacaatgctttttgaatgcttagatatttcctaagtgagaaaccatgttgtacatcctgatttaatcatagtgagtcaccaaaagttcttgatacaataaccatttatgagtaccttctgtgtacaaagcactttactaaggataccaaggggtaaattttcagtaaataaatatccaataagtagtacctatcagtaaatatgatcttgcctcctaatttaccttcgcttcctagtcacagtcactgttttggaggctacttgccatggcataaatttatataaatattgccaggaattcattgtatcagagttgaagttttaaaactaaggattctgatacttgtctaagctcatgattcatcagaaagtcatcctgtctattcaacttgcacttttcttgaagattatcacttgaatctcaagaaaaatatttcaaggcctcagcatatctgaaaatgccagccattgagttcaatgtcttgattggagtgatttgggtacaacttggccaaaaaacaagagtacaatttggtaaaaaaaaaaaaaaaaaaca

SEQ ID NO: 28561 - DNA, 4882 bp, Homo Sapiens
ctacgccaggctctgaggcttggatttcatgcagtgggatccatctcttttttatgcaattcactttgatttcattaacatttcttatttgttgttagattcatttggagttaaaacagcagatcgttacagttttttaactcagaggtttagaggctgttatattcatgatcctccacaaggtggcaatgccttccttgattagatttttttcttcccgttccatttcactgcaggtgggtttgcgtgtcattgcgttgccaaaacaccctcacccactgttccttctcgcagtgatctgctctagaatttgggggttgggactggacttctgaatatcatctaggtcattttcccattctctggattggaccatacttaaactatcccaagcagatattctcatttatagtactttttaaaacttgttgaattctttatcttttaaagaagataatttctaagatattatgaaatacctattatgtgaaaacaacagacaaacaataaaccccaattgaaactagtctctgggagtggggctcaggcatctggatggtcttaaagcgtcctactgactttcatctaactagggttgaagccaccgctccagtgcgtagcccctaacctcggacacctttgtgggccatgagctgatgagatagtgaggtcagggtctagacaggtgcacccaagttactgcaggagtcaaaagatggccagattgtatctccttagaacatacagaacatctttccggcaagaatattcattcaagaagattttaaagggtgaataacatttcagtaagatataaaaaagacgtttgaggagatagaaatagcaaaaggaaagttagaatcaggaaagtagcgtcctccctctgtggttttaaaaaaagtcgtataaaggctgtaaaattgatttggtgtttttctctccttgtggtaaaccaaaaagtaggttaaatttgttcaagataaataattgatacaagtgaggtttcagagtgttttctatagtattttggtgagcctactttatttttctccaatagtaccccgagattttccttatgaagaggactcaagacctcgatcacagtcttccaaagcagccattcctcccccagtgtacgaggaacaagacagaccgagatctccaaccggacctagcaactccttcctcgctaacatggggggcacggtggcgcacaagatcatgcagaagtacggcttccgggagggccagggtctggggaagcatgagcagggcctgagcactgccttgtcagtggagaagaccagcaagcgtggcggcaagatcatcgtgggcgacgccacagagaaaggtgtgtccccagggaagcgtgtgactagagggaaaggactggccccatccatatcagacatggccagtcttgatcctcatgtgtcagcagggggacaatgaggcgtgtggccagagggagagggctggccctgccatcactagaacacaggccgtcctgttcatatgatgcactgccacttccgttttgtgaaaccaggaatcctgaggctcatctttattttttcagaacagacgtagagagatgaaggcttgtggaggaaaagatggtgagagacttgggcagaaaatgagtagtcctcaggaagaaatcttggttatgtgtttagagcatgaaggacagagccatatagtgtggcagtgaatatacctgctatctccatctcagaggtcgtctctacttttcccttttgccctttcagtatagatgtgatttctgattctcttacagattgtttgctttgcgagatctgatgttatgttgcagtctcttggtaaatgatgcctagttggtgttttattttcatttaatttttacagtctgttctgtgttgagggaattcaggaaagagacaaacatatgttagcattttaatcagggaattaagtttgagtcagcctagctgaacttcctttgctaaagaaagaagaaaacttttctggcagccccgttcatgcacagcttaggatacatcacgagcctgacaggtgagtgccagaaaccaacagttgtcccgacttgtgtggttatctgaagtaaggcagccggtggctggattagtaactgcatattcccctgggcccgtgaccttgaacgtttgctccaagtcaactcacctataggaattatcactcacatgccctgtcagccctttgggaagtgagatgagcaaaaattgcaagtaatggtggaggctcaaaacatccagatgctattgtaaaaacatgccaaagcaaagcagaggcttttattgcagataaggctgtgttttcgctcagagaccaattgtgtagatgcctaggacataaatggtggggatcgctattgaaattaaattaattattgtaagtaggactcagttctgtaacacatctaatgatatgctgctcagttctgtaacacatctaatggtatgttttgatacagatgcatccaagaagtcagattcaaatccgctgactgaaatacttaagtgtcctactaaagtggtcttactaagggtaagaagctgaggaaagcaagctctctgcctgcctagatttgtgtgtgtcaccccagcctaccctgctccccctaaaagttaaaactgaaaatgatacttttgcaaataatactttgggcagatcccacgtaaggctgattttagatttttcactaatgtgtaagtctctttgctaagtacagtgtttaagactgcagtgagtaattaaatatttgaaattgctagagcttcagatagtttatacattttggtgcttgcatagatgcttttgtaactctttacaggcttaatatatgttttagtgttttaagaaatactaacttctgggtactttggggatgaaatttttcattatgtcgtttgggattgagaacatttaccatcactaagtcatatttatatacctctgctaggtgtttgtaagttatacttggtacttgaatttgtttatttttgtgtttaaagaacatggttggtgcgggagaggtggatgaggacttggaagttgaaaccaaggaagaatgtgaaaaatatggcaaagttggaaaatgtgtgatatttgaagtaagagcgttttcttttgatgtttataacacaagttgtaattggcacattacaaaacattttctacaaacaggacagggtatgctataagtaacattcttactgcagaaggtgacaggcgttggttatttgtacttctcttgctcaattattacagttttaaacataaagacaatgatttcaagttttatttgatgaagaaacaggaatgcttcatgattgaggatcagtatgatgactgaagaccttgattctagcgtgctcagtagtttagttccttagacatgcctttggtttcggtcatttggtgagtatttagtgcctctcacatgcactgcactgtgcggagagcacttggattacagggagcatgctctgtactctcagtggtgtgttcagttgaagaaacacataaaataactgaaagatattcagttactagactaggtagtattgactaagttcaggagttgagaaaaggattagatcagtgaaaaaatagactgccttgtgagcaatagcagatatgggctgcgctttgaaacgaacaggtgggatttgcagggaagggtattctgattgggataatggctcgtaggagacagtgaagatcaggactaccaaaatggaatggatgggcctgttggggattagcagaagtgcttaggtgggtggaattacagagggctaggaaagctagacagagctagtcaaaatgagacctgatgtgaaaggccactagggcaccagcctttttaatctgaaagctctgcttcctctgtttctttatcctgttgctgtttgttgaccacataattatttgtttacgtcatcagctggcacagggcctttatgaggtcagagactgcctagccctgtgttcctggcacctaacaatgcctgtcataaaaacaggcattcagtacgtttttgatgatgaacaaattatacttatttccttggtatttgacaactacttgactgtatatgatgataattagaatatccactctgagaaatcatttaaaagagaaaactcattcaatgcaatctcaaatgcctttactcatcacgctctcattttcttccagattcctggtgcccctgatgatgaagcagtacggatatttttagaatttgagagagttgaatcagcaattaaaggttagtggtacagctaaatattaaagaataaaaaagttgaatttacagccttaatctttacaagtaaagttactgtttaattaaagttaaacctttatcttataggatacctgtattaactgtcttttgtttgcctttcagcggttgttgacttgaatgggaggtattttggtggacgggtggtaaaagcatgtttctacaatttggacaaattcagggtcttggatttggcagaacaagtttgattttaagaactagagcacgagtcatctccggtgatccttaaatgaactgcaggctgagaaaagaaggaaaaaggtcacagcctccatggctgttgcataccaagactcttggaaggacttctaagatatatgttgattgatcccttttttattttgtggttttttaatatagtataaaaatccttttaaaaaaacaacaatctgtgtgcctctctggttgtttctcttttttattattactcctgagttgatgacattttttgttagatttcatggtaattctcaagtgcttcaatgatgcagcatttcttgcactaaaaaaaaaaaaaaaaaaca

SEQ ID NO: 28562 - DNA, 5737 bp, Homo Sapiens
aggagtcaactgggaaaatctcaatgaaatgcatctttaggatgtgccgggaatcttggcagtaactcaggagggcaacagggaatcttgcaattggagtagcggggggtgattctcaagttttggacacattctaagtaactttttgcagtgcttcaactttttacttgagtttataataacaatggcaatattttttatagttgtagagctatatgaaatatttttacacctgttggcttcattgttcatacaatatcttagtgagggggaaggtaggattgttttcgttcctgttttacagacaaggaaattgaggctcagagagcagatgggatttctctggccgcttggctggttgatgtggaagtcaggagtgaggatgccaagtttcacacttcttcctgtgccaatgacctggaggagtgtttttctcaaattcacatttctttatcctccacagtcttgggtgtcactcttggaagtgtaagatggtcatgagtttcaaagatttctgagataagctgttaagattttcaaagatgagctatagagaatttgggacataaaatgtgtttcttccagtaactcttgcttgctatcatgttgttggttcaaattgaacatgttgataagtgccagggaggaaagaaaccagtacctgctacttattgggcaccttttttgccctgaactcagtactgcctgcttttccatttgagtatctagaaacatttatggatggagtgattgtaatattgtacaattctgtcaactagtttattagctaattctcataaaagccttaggaggtagataaacaatattattttccattttacagatgagaaaactgaggtttagagagatgaaataacttgcttataacttgcttgagagaacacaggtcctaaatagattataatcttttttttttttttttttttggcagaatcttgctctgccatccaggctggagtgcaatggtgcaatcttggctcactgcaacctccgccccaccaggttcaagcgattctcctgcttcagcctcccaagtagctgggattacaggtgcacaccaccacacccagctaatttttgtatttttagtagagacggggtttcaccgtgttggccaggctggtcttgaactcctgacctcaagtgatctgcctgcctcggcctcccaaagtgctgggattacaggcctgagccactgcacccagctgtaagtagagtataatgtaagttttctaatttgagacttctttcttccttgctgcaccccatctacgccatgtgttgcccatcccactggtgaaaatgcagagctgcttgttaaggaggtacatgtcagaccttggaatttactggaatcagacctggaaggtactatgaagagctcagaaggctggtggttttcaagctgttctcttctgagcctgagagactccaggagtcatcttgagggatatagcacggagggaggtgaaaagtggtgggaagtggaggaaggaaggggaccgctagagccaacctgagtcgctctgctttttcctattttgtaagctaagcattgtcaaagcatccatttaaaggaaaagttctgctgctacatataaaagttaaaaaaccactgtgtctacccttccttttgctaacactgagaggcagagtggttcagcacaaggggacacaaagtggcttagcacgagtcacgagatgtgacgggtctgagacctctcagcctagagctcccttacccctgggccactttgttagacacacctcctttaattcaaatccccgtctcagtgggacatggctttttcattttttcaaggaaaggtttaatctgtccagatccctgtgaagatcttggctcttggcgcacctgctggaggttcgaggtcctgcaaccacagagtagctgcaggaccttcaggatgtcccgagccacaaggtctttgacctgcattttgcaacctggttgtgtctcccctttggactctgggaaccttgctgagattggtacaatatctgtgctaaaaaggtttgaaattatagctagtattgtgttaccttcctggtccaaccttcacagacattgtctgactaagtatatataactcttgagtgttcactgtgtacaccggctcacaagaaaggcaaggttcctgatcccaaggatctaatggagagacagaaacaaatataaacttttgtcaactatttcagagacagttatttttgttatacaagattgttatgcatgctagttatgtggagaggatttcatctcttagaaatgagacagggagaatctgggcgatgagaaagaagaccagaactggggagtacagtctagaattgcaaggggttgagtttgctatgtgaagcagttagttttggactgttgcacttactatttctgagatttgagcatctgacttttcctttaagcttttgttttctcatttgtaatatgggagtgagagtgcctagttcacagggtcattgctggggttaaatgagataatgtatgtaacctgcttagtataatacctagcacagagtaaacactcattaaattttcattgttatcgttgttatgatttggcagcgaggagtcaaaagagcctattttcttaaactcatcaatggtataatcagagctttgcatctcgaagtaaaggaacactctgcttttattatttatttatttttcactctgcttttagacatagaattcaattgcctcaggctacaacaaactggcttcaatctacctttctgagttaacttctgtttatttctatccatctgcccacttctctcactagtgacctacacattttctttttttttttttcttttctttttttttttttcttgaggtggactcttgccctgttgtccaggcttgagtgcagtggcataatcttagctgactgcaacctcttcctgccgggttcgagccattctcctgcctcagccccctgaatagctgggattacaggcacacaccaccacgcctgtttagtttttgtatttttagtagagatggggtttcaccaggttggccatgctggtcttgaactcctgacctcaggtgatccgcctgcctcggcctcccaaagtgctgggattacaggtgtgagccaccgtgctccacccacattttctaagcttgattttaacttgctggtctttgtcatatcttctcagtcattgctggggttcaaatctttcttttctttttcttctttttttttttttttttaaagatgggaatctcactatgtttcccaggctggtcttgaactcctgggctcaagtaatactgccttggcctcctgagtagctgggaccatagacatatgccactgtgtctggcttaaatatttccttctgtcggaatgccctttgttccttcatctgtgcccccctgctccatcctcttttaattcctagcccaaaagtctaacccacccattgggagggattctgcagaactcatagagtttacaacatcttgtccttcaattgcagtcagtctctgtcttgaactggatttgtgagctccttgaagttgtttgtatctcacagctctttgctgtaacatccctggggattcaagcacgcacacatagtagatgcccacacatctatgcaataaattactttagtgtctttctcaaatgatcagcacaggaagcaaatgataaaatgcaaaccagaaaacagacctcactgggctctgtgcttgtcagccttgggaatggatttctggcgaagatccggcccctctacaaatgacagagatgacttggctcttttcaggaattgaagagaatcctgacaagtggcatgttgggaaaggcctgaaggaagccagaccagcttgctctcagagctccttgggtcccctgcggcccccaggtgatcttcagcaagacctggtatgtaaatgagcctcatctgctagctcagcctgctgcccactgctagggatgctagaattccagggtaagcttctgtgagccgggctgggaggtttagtgggttggagattactagctttttggtatctgcagcttgaaataccttgtgcccttgattaattcatgcttgggagcatcctcagtgctctctggaaaatagctccttactgtatgtttatttccccacgggcttatttcagagagactggagcctgtgtttctaacagcttctccaaggaaaacatcgcaggccacgtttccggaactgagaatctcagggggtctttgaaacgtccatctctattacctccttttggcccagcatttgcttttagctgaaaagggagattttgtcttgagccttcctgtagacatatgtgacttggagtttgaaaatctgacagctgctgctgagctttgaactgcaagagtgagcagcatatagacataaccccgtagaacatcaaatcattttcctttaattcccagagacttaatgtttctttgtcttgcgaatgacctcactgctttttgtatttgtaatggaatgcacagtcatttgtaagtaatcacacaataatcccttacacttttataatgccttacccttttccatagggctttcactctcattatctcatatgatccttataactgctctgagatataagcagagcgcctattttaatctccaattttcaggtgtagaaactgaggttcagaataaagttagccagagttaaaacagttagtatgtagcagaattggaaagggagtctacagaattggaactggagtctcctaaaccagtgtttcttttgctccttattgctggtgtgaccttgggaatatacttaacctctctgaacctcagtcttcctatcactaaattgggtataatactacctcctgggatagttgttggaagggattcaatgagactgggaaatcatttaataaaaggtagaacacactaataatgggaggcatcattgtacttactacatgggccttgacggcgaacagtgccatcagaactgtgaaagaaaataacattttttctctctttttagaaagacacaggttcagaatggtgttgtcagggatcacaagctcccagccccgtgattagcaaattgaccctgctgccctgtctgctggctgctttcttattctgagaattgtgttgacaagaccctcttttcctacagagctctctcttaatgttgcttggaatagccttgtgtcctggagacagttttaggtctggcaggatctgagaacaggagtggggatcttggaatgggatctgcatccctgagcttcatccacaaagggtgggaatgtggcttgggctgtggggtggaggtagatgaacagctggacttgcaggtctatcttctgttgtttctcaataaagtagacaagtccatctgatgggtgtttagtagggtatgacttgtgagtccacaaggccagcagtatatatgctgaatggactgcttagcagtaacacactggaaaaatccaaaaagaatggatttcaagttggcaaaaaatgcattagaagtcagcagtgtgatgtggtcaggagaacaaccagagtgactgtgggatgaggtcttggatagctttgtttctatatacagtcagccctctgtatccatggtttctgcatccatggattcaaccaaccaaggctcgaaaatattaaaaaaaaaaaaaaaaaaaca

SEQ ID NO: 28563 - DNA, 3012 bp, Homo Sapiens
acaaaaagaaaagaaaagaaaagaaaactattgacctagtttagtgtttttcaacttgggggcgtctgtggttgtcttaggagctgaggggtgattctgtgggcagggccagagatattaaataccctgctgttggccggcagtgctgcagctggcaaataccaatggcgtgcaaccattttcttgtctagatggggagacccaggctaagtgggaaatgcgagacagtaccttgactgtctcacaggcctcttgcctcctgattccagtgtgatggggtggggcctggccagacagggcaggcaggcagcagggaagagacccccgggactgttggccaacaagcggtctggcccccttgcaggaacaccagactgttgtctaccagatgatccagcagatccagcagaaacgggagctgcagcgcctgcagatggctgggggctcccagctgcccatggccagcctgctggcaggaagctccaccccgctgctgtctgcgggtacccctggcctgctgcccacagcgtctgctccacccctgctgcccgctggagccctagtggctccctcgcttggcaacaacacaagtctcatggccgcagcagctgcagctgcagcagtagcagcagcaggcggacctccagtcctcactgcccagaccaaccccttcctcagcctgtcgggagcagagggcagtggcggtggccccaaaggaggggtgagtaaggggcccggggccttcctgcctcccctctgagggatgggtagagatggattgtcagaaggcttatcatcaggtacctcagcagggggaaggaagcaacccctaggtcagcaaagtaccctgcctcagaccccagggcctctgcttgcacatgggtgccctcctgcacggccaagaaagatccgatctgagcatgggctcagaggaaaaggaccaattagaaaacagccttcctccgggaggaccaattagaaaaagccattttgtttctcatccgaccaattagaaaaagatgaccctctgggtaggccaatgtcagaaaggccctctccctctcctgagggcacacggccttagcttgcacatgcccacgcagcccggtgctcttctgcagggtggtttcacacccctgcgcatcggccctggtgcacacccctcagagcccaggccagaggcttccattggccccgtttcagtaccccacagcagctttcttggcctaggaagctgttcttatctgggggttaggacctgacactttccacacccccggcctccctccctctctttccagaccgctgacaaaggagcctcagccaaccaggaaaaaggctaaatccacccttacccctcctgacccccccaagtggagggaacagatcctggcctgaggggtcctagcctggagcaggcgcctgcgcccagaccctggagagccttgacccagagcctgtgctgaggtccagggagtgtggagagctcctggtgtcgaggactgagactgagaggggagccccctccatctggcccccttccctttccgcactgtccgctttgtgaggctcagaggaaggacagtctgcaagcccgcctaggaggtccatccccagcaaatgttttggaggtccccccagagagcagagtgggccatggcagaagtagggggttggttggacctgtcacatgaaatggatcagcacttgaatggggagaagtggagggagaggccctgggcctgtccctgcggggaaatcttttatggaagaagggctggacccactttacctgcagtttcttcccagctcgggcagatggcagaagggaccccttggactttttctcgccatccctccccccagcgcaggggcacaagctgagcttgtaaaagcccacagatgttgggggctggagaaggggcaggagagcatcacactcagccccagcctcctcaacctcttggggccccgtgatggggaggagagggcaggtgcggggaggctctggccttccttggtgccccgccctttgtttgcactattggacttaggagtgccgagggtggggagatggagctgcccgactcagtgtgtgagtgtgtgtgtgcgtgcatgtgtgtgtgtgtgtgtgtgtgtgtgtgtgtgtctgtctgcctgtctctctcctcctggacccagggcagccaagggcagggataggcgcagtggtcagatgaagcagcgccagagaggggacctcccagctcttatttgcaccctccccacctcaccaactttggtccctctctgggggcatgaatggttaacaaacaccagagcagtactccaatattggagagtcgctgggggcacagggctttgaatcagggtagtatcctgccttccctcccctgaccccacatggtctcagggcccccttagggccccctaccccactgatagcttcctccttctctggcacaaggggagccccagggcttgggggagggcgtaaggtggggggaaatgccactgcttttagcaaaagcctccctcccagaattagccagcttgcctcctgcaccccacccccaccaaccaggggagccactaagctgactaacaactgtcccctcacccaccagctatttccccagggtagagtgggcaattctcaccttcaaagagtccccgcctgcccaggcctttggcacagaggctgagtggacagtcaggagagaggcgagaggcaaggcgaagcctgtgtccctgtttcagttgcactggggttggagcccagggtaggggtttccagcttccccaggctccggccttgtcagtctctttgcatgtgtggatttttctgtgtgtgtttctgtttgggtttttgttgttgggtttttttttttttttttaataaagaaaagaagatgtgtatatttttggcaacgacaaaaaaaaaaaaaaaaaaaaaaaaaaaaaaaaaaaaaaaaaaaaaaaaaaaaaaaaaaaaaaaaaaaaaaaaaaaca

SEQ ID NO: 28564 - DNA, 6529 bp, Homo Sapiens
ggtgaagatgtagagaaacaaaaaaaagaaccgatgagtatttgtgacaagggtattctggtggagtcatccttcagtggtgaaatgttagaagatttggggtggctacaaaagaagagaagaataaaactctatcagaaaccagaaggaaatcacattatcaaggttggaatttatcttttggaagctggcctagcaaaactagacttcttgagtgatgcaaattcaagaatgaaaaagttcaatcagctcatgaagaaagtaatggaaaagttacacaattctattattccagatgtgttggaagaggatgaagatgatccggagagtgagccagagggacaagacattgacgagctgtatcactttgtgaaacaaacacatcagcaagaaacgcagtccatccaagtggatgtccagcatcctgcattgatccctgtgttgagaccctaccaaagagaggctgtcaattggatgctacaacaagagtgtttcagaagcagtcctgctactgaaagtgccctgcacttcttatggcgagagattgttacatctgagggtctgaaactctactataatccatatacaggctgcatcattcgtgagtacccaaattctgggccgcagttgcttggtggaattttagcagatgagatgggtcttggaaagacagtggaggttttggctctgattctgacacatactcgacaagatgtcaagcaagatgctctcactcttcccgagggaaaagtggtgaattattttattccgtcacattattttggaggaaaactgaaaaagacagaaatccagaatatcgaatttgaaccaaaagaaaaagttcaatgccctcctacacgtgtgatgatactgacagctgtgaaagaaatgaatggaaaaaaaggagtgtccatcctttccatctataagtatgtcagttctatatatagatacgatgttcaacggaacaggagtcttttgaaacggatgctgaaatgtttaatttttgaaggtctcgtgaaacagatcaaaggccatggtttttctgggacttttacattgggaaagaattacaaggaagaggatatatgtgataaaacaaaaaagcaggcagtagggagtccaaggaaaattcagaaagaaactagaaaatcagggaacaaggacacagattctgaatacttgccatcagacacctctgatgatgatgatgatccttactattattattataagtccaggagaaatcgcagtaaattgaggaaaaagcttgttccatccacaaaaaaaggaaaaagtcaaccatttatcaatcccgattcacaaggtcactgtccagctactagcgactctggaataactgatgttgctatgtctaaaagtacatgtatctctgaattcaaccaagaacatgaaacagaggactgtgctgaatctctaaatcatgctgatagtgatgtaccaccttctaataccatgagtccctttaacacctctgattaccgctttgagtgtatatgtggtgaacttgatcagatagatcgtaagcctcgtgttcaatgcctgaagtgtcacctgtggcaacatgcaagtgtgtgaattatgatgagaaaaatctgaagatcaagcctttttactgcccccactgccttgttgcaatggaaccagtgtcaacaagagcaactctgatcatctctccaagttccatctgtcaccagtgggtggatgagatcaacaggcatgtgaggtcgtcatctcttcgagtcttggtatatcaaggagtgaagaaagatggctttttacaacctcattttttggcagaacaggatatagttatcattacctatgatgtactgcgttcagaattaaattatgtcgatatcccacatagcaatagtgaggatgggcgtcgcctacggaaccagaagcgctatatggctatcccgagccccctggtagctgtggagtggtggaggatctgccttgatgaagctcagatggttgagtgtcccacagtaaaagctgcagaaatggcccagcgtttgagtgggattaatcgatggtgtatcagtggcactccagtacagagaggattagaggatctttttgggttagtggtctttcttggtattgaaccttactgtgtcaaacactggtgggttcgacttctctatcggccttactgcaagaagaatcctcagcatctctacagctttattgccaagatactgtggaggtctgcaaagaaagatgtgattgaccaaatccaaataccaccacaaaccgaagaaatacactggctccacttttctccagtggaaaggcatttctatcaccgtcagcatgaggtgtgctgccaggatgtggtggtaaaactcaggaagatttctgactgggctctgaagctcagcagcctagacagaaggactgtcacctctatcctgtatccattgctgaggctcagacaggcctgctgtcacccacaggctgttcgtggagagttcttgccactccaaaaaagcaccatgacaatggaagagctgctgacatctttgcagaagaaatgtggaactgaatgtgaagaagcacatcgacagctagtttgtgctctcaatggcttagcaggcattcatattattaaaggtgagtatgccttggcagcagaattgtacagagaagtgttgcgctcctcggaggaacacaaaggaaaactcaaaactgattcacttcaaagacttcatgctacccataacttgatggaattgttgatagccaggcacccagggataccacctaccttgcgtgatggccgacttgaggaagaggccaaacagctgcgagagcactacatgagcaagtgtaatacagaagttgctgaagcccagcaagctttatatcctgtgcagcagaccatccatgagcttcaaagaaagattcattctaattctccttggtggctaaatgtgatccacagagcaatagaatttactattgatgaggagctagttcagcgagtgcgaaatgaaataaccagcaactacaagcaacaaactggcaagctttctatgtcagagaagttccgtgattgcagaggtcttcagttcttacttacaacacaaatggaagagctaaataaatgccagaagctagtaagagaggctgtaaaaaacctggagggacctccatctcgtaatgttattgagtctgcaacagtctgtcacctccgaccagccagacttcctctcaactgctgtgtcttttgtaaagctgatgaattgttcacagagtatgaatcaaagctattttccaacacagtcaaaggccagactgcaatatttgaggagatgatagaagatgaagaaggactggtggatgatcgagcacctaccaccacccggggtctctgggcaataagtgagacagagcgatctatgaaagcaatactatcatttgcaaaatcacataggtttgatgttgaatttgttgatgaaggaagcacttcaatggatctctttgaagcatggaagaaggaatataagttgcttcatgaatattggatggctctgaggaatcgtgtgtctgctgttgatgaacttgcaatggctacagaacgactaagagtgcgtgatcctagggagccaaagcctaatccgcctgttcttcatatcattgaaccacatgaggtagaacaaaaccgaataaaactactaaatgataaagctgttgctacatcacagcttcagaaaaaacttgggcagcttctttacctaactaatttggagaagtctcaagataaaacatcgggaggtgttaatccagaaccttgtccaatctgtgctcgacagctaggaaaacagtgggcggtactgacctgtggtcactgtttctgtaatgaatgcatttctataattattgaacaatacagcgtgggatctcacagaagctccattaagtgtgcaatctgccgccagaccacatctcacaaagaaatctcgtatgtctttacctcagagaaagcaaaccaggaggaggacatccctgtgaagggcagccattctacaaaagtggaagctgtggtcagaactctgatgagaatacagcttagaaatccaggggccaaagcactcgttttctcaacgtggcaagatgtattagatattatttcaaaagctcttactgacaacaacatggaatttgcacaaatcagtcgtgttaagacatttcaggagaacctttcagcatttaaacgtgatccccaaatcaatattttgctgctgcccctgcacacaggttctaatggattaactatcattgaagcaactcatgttctcttggtggagcccatattgaaccctgcccatgagcttcaggccatagggagggtgcaccgaattggacagacaaaacctactattgtacacagattcttaattaaagcaacaatagaagaaagaatgcaggcaatgctgaaaactgctgagagaagtcacacgaactcatcagcaaagcattcagaggcctctgtcttgactgtggctgacctggcagacctatttaccaaagaaactgaagagcttgaatgaactacacttgattcattccatggactttagtgtattaataaactttcatagctgtagagcaaagttacaagttttaaaaacccagtagataacagtaacactgttcctagttgaatgaatttgtttattgttctggttatacagtggcttagtacttattgagtccttttcaatatactgtttccaaaagatctataaagattcttaattttacactcctaataaaacatttattttttgtcccaaatagtatctatatctgatgatgcaagggaattaagagaggtaatgtgtacttttcttatgataagatcactcataaaacagttggaataagaaagtaaactagtctagttttatatgacctggtatattgaacaaacatagatctcagttttggaagggccttcagtatctttagcacatgattcaccaatatcttgttagtaatattttaagtagatggtgaattatattaacccattttttgagtaggcttataccataactttacacctagtaattttgcagtaatacaactccttacaataagttaatgttagacagttatttgtttcttctgcatcttgctactgaaaacaaaaacaatgaaaatattcatatttctattatgtgtaaagtggtgttagtgtaaacagttaactccaaatagattttttaatgtattaatgattaccttaaaattatctgctttccctactcttaatttttcttattgttaaagtttttatatgttgtaagattgatgtatctgtaaatattgcagtttttatgattttgttttattataacatggaaatatggcagggtttttttttttaatcattattatactgatgtcttggattctttttctttcccatgttcttgtgtaactagacttttcagccagtgatatctgaattcatggtagagttgttatttcactccagttgttcctcccttaagcacgagtctttgaccttttgaacaagagaatgccatgttcacataagcaaatcgttgcaagtgataataacgaagtgtttcttcttctgtgaggaattaatggactttgaaattgctgaataaggagtagcttgttacatcctagccatttgatgtaatacaaatgttcttatttggcttccttttctttgagccttcggagttttaaaggaccctctttgaccctcaggacttattagctcccagttagctgcctggaaaactcatagaaccattccctagatcccatttgtccgagaggctttggtgcttagttaaggtgcattttcttactctaggtttatagagtgatgtaattcaactgaagaaaacacacacatgcttttggtgcttattcttcagttaaaaggaggtatccattgattcttttatatgaaattaaatcaaactgttatttttatagctcttcacatattaaaaagagctttcatgtacatttacgtgtttaatttacccaacaatcttgtgaagttgatataattaatatctttactgttttaaaggtagagaactgaagttcagatatattgaaactttcttaggacatgtagcaagtaaacagtggagcccaggtcccctgactccatatcttacattcttttactaataacatgtcatgctgagattcagaaggcccatgcttataatttaaaaatgagactatttcagtatttctttgtgtttgttttctactattcctttctgagctatgttttagagaaaacaatttgatatgcttcaattttgtaaaatcaaattacatatatataaaaaaacctatctgtattagacaaaaactgtttttatttatttctgtaagatatccattaaataaatattttagtggaaatgaaaaaaaaaaaaaaaaaaaaaaaaaaaaaaaaaaaaaaaaaaaaaaaaaaaaaaaaaaaaaaaaa

SEQ ID NO: 28565 - DNA, 5106 bp, Homo Sapiens
caagggcactgatcattagataagactcctgcttcctcgttgcttacatcgggggtactgacccactaaggccccttgtactgttaatgtgaatatttgcaattatatatgtctccttctggtagagtgggatattatgccctagtatcccctttgcattactgcaggggctgctgactactcaaaacttctcctgggactgttaataggcacaatggcagttatcaatggttttctccctccctgaccttgttaagcaagcgccccaccccacccttagtttcccatggcataataaagtataagcattggagtattccatgcacttgtctatcaaacagtggtccatactcccaacccttttgcattgcgccagtgtgtaaaatcacaggtagccatggtgtcatgctttatatacgaagtcttccctctctctgccccttgtgtgcccttggcccctttttacagactattgctcacaatctcaggtgtccatatttgcagctattaggtaagattgtgctgtctccctcttcccttccctctgccctgccccttttgcctctttgctgggtaatgttgaccagacaaggccctttctcttggacttaaacaattctcagttgcactttccttggtcccacccattatacatgaacccctctacttcctttcgcattgcttctgagtatgctgactacccaaagccccttctgtgttattaataaacacagtactgattgtcccatttttcagcccatcagtccaagatctccctaccactttggtgtgttggtgcagtgttgactatgaaaagcaggcctgaactaggtggataagccttcactcattttctttcatttattaatgatcctagtttcaattattgtcagattctggggacaagaaccattcttgcccacctgtgttactgctttactgtgcaaaatactgaaggcaagtcagacccagggagctggattgccatcctttattttgtgtttccagtgtacactataaaattgtctccccaggaaggaaggttggcactttctctgcattcttctttccagagcagattgcctggttaagaatctcttgttgtcccctttgtatattgttattgtaaagtgccaaatgccaggatacagccagaaaaattgcttattattattaaaaaaatttttttaagaaagacatctggattgtagggtggactcgataacctggtcattatttttttgaagccaaaatatccatttatactatgtacctggtgaccagtgtctctcattttaactgagggtggtgggtctgtggatagaacactgactcttgctattttaatatcaaagatattctagagtggaactcttaagaccagtatctttgtgtgggctttaccagcattcacttttagaaaaactacctaaattttataatcctttaatttcttcatctggagcacctgcccctacttatttcaagaagattgcagtaaaacgattaaatgagggaacatatgcagaggtgcttttaaaaagcatatgccaccttttttattaattattatataaaatgaagcatttaattatagtaataatttgaagtagtttgaagtaccacactgaggtgaggacttaaaaatgataagacgagttccctattttataagaaaaataagccaaaattaaatattcttttggatataaatttcaacagtgagatagctgcctagtggaaatgaataatatcccagccactagtgtacagggtgttttgtggcacaggattatgtaatatggaactgctcaagcaaataactagtcatcacaacagcagttctttgtaataactgaaaaagaatattgtttctcggagaaggatgtcaaaagatcggcccagctcagggagcagtttgccctactagctcctcggacagctgtaaagaagagtctctggctctttagaatactgatcccattgaagataccacgctgcatgtgtccttagtagtcatgtctccttaggctcctcttggacattctgagcatgtgagacctgaggactgcaaacagctataagaggctccaaattaatcatatctttccctttgagaatctggccaagctccagctaatctacttggatgggttgccagctatctggagaaaaagatcttcctcagaagaataggcttgttgttttacagtgttagtgatccattccctttgacgatccctaggtggagatggggcatgaggatcctccaggggaaaagctcactaccactgggcaacaaccctaggtcaggaggttctgtcaagatactttcctggtcccagataggaagataaagtctcaaaaacaaccaccacacgtcaagctcttcattgttcctatctgccaaatcattatacttcctacaagcagtgcagagagctgagtcttcagcaggtccaagaaatttgaacacactgaaggaagtcagccttcccacctgaagatcaacatgcctggcactctagcacttgaggatagctgaatgaatgtgtatttctttgtctctttctttcttgtctttgctctttgttctctatctaaagtgtgtcttacccatttccatgtttctcttgctaatttctttcgtgtgtgcctttgcctcattttctctttttgttcacaagagtggtctgtgtcttgtcttagacatatctctcatttttcattttgttgctatttctctttgctctcctagatgtggctcttctttcacgctttatttcatgtctcctttttgggtcacatgctgtgtgctttttgtccttttcttgttctgtctacctctcctttctctgcctacctctcttttctctttgtgaactgtgattatttgttaccccttccccttctcgttcgttttaaatttcaccttttttctgagtctggcctcctttctgctgtttccactttttatctcacatttctcatttctgcatttcctttctgcctctcttgggctattctctctctcctcccctgcgtgcctcagcatctcttgctgtttgtgattttctatttcagtattaatctctgttggcttgtatttgttctctgcttcttccctttctactcacctttgagtatttcagcctcttcatgaatctatctccctctctttgatttcatgtaatctctccttaaatatttctttgcatatgtgggcaagtgtacgtgtgtgtgtgtcatgtgtggcagaggggcttcctaacccctgcctgataggtgcagaacgtcggctatcagagcaagcattgtggagcggttccttatgccaggctgccatgtgagatgatccaagaccaaaacaaggccctagactgcagtaaaacccagaactcaagtagggcagaaggtggaaggctcatatggatagaaggcccaaagtataagacagatggtttgagacttgagacccgaggactaagatggaaagcccatgttccaagatagatagaagcctcaggcctgaaaccaacaaaagcctcaagagccaagaaaacagagggtggcctgaattggaccgaaggcctgagttggatggaagtctcaaggcttgagttagaagtcttaagacctgggacaggacacatggaaggcctaagaactgagacttgtgacacaaggccaacgacctaagattagcccagggttgtagctggaagacctacaacccaaggatggaaggcccctgtcacaaagcctacctagatggatagaggacccaagcgaaaaaggtatctcaagactaacggccggaatctggaggcccatgacccagaacccaggaaggatagaagcttgaagacctggggaaatcccaagatgagaaccctaaaccctacctcttttctattgtttacacttcttactcttagatatttccagttctcctgtttatctttaagcctgattcttttgagatgtactttttgatgttgccggttacctttagattgacagtattatgcctgggccagtcttgagccagctttaaatcacagcttttacctatttgttaggctatagtgttttgtaaacttctgtttctattcacatcttctccacttgagagagacaccaaaatccagtcagtatctaatctggcttttgttaacttccctcaggagcagacattcatataggtgatactgtatttcagtcctttcttttgaccccagaagccctagactgagaagataaaatggtcaggttgttggggaaaaaaaaagtgccaggctctctagagaaaaatgtgaagagatgctccaggccaatgagaagaattagacaagaaatacacagatgtgccagacttctgagaagcacctgccagcaacagcttccttctttgagcttaggtgagcaggattctggggtttgggatttctagtgatggttatggaaagggtgactgtgcctgggacaaagcgaggtcccaaggggacagcctgaactccctgctcatagtagtggccaaataatttggtggactgtgccaacgctactcctgggtttaatacccatctctaggcttaaagatgagagaacctgggactgttgagcatgtttaatactttccttgatttttttcttcctgtttatgtgggaagttgatttaaatgactgataatgtgtatgaaagcactgtaaaacataagagaaaaaccaattagtgtattggcaatcatgcagttaacatttgaaagtgcagtgtaaattgtgaagcattatgtaaatcaggggtccacagtttttctgtaaggggtcaaatcataaatactttagactgtgggccatatggtttctgttacatatttgttttttaaacaacgtttttataaggtcaaaatcattcttagtttttgagccaattggatttggcctgctgttcatagcttaccaccccctgatgtattatttgttattcagagaaaatttctgaatactactagtttccttttctgtgcctgtccctgtgctaggcactaaaaatgcaatgattattgatatctaggtgacctgaaaaaaaaaaaaaaaaaaaca

SEQ ID NO: 28566 - DNA, 6566 bp, Homo Sapiens
gagacgagtggaagagctcggggatctggctcaggcccacatacagcaacttagcgaagctgccggtgaagatgatcactttttaattcgggcctctgcagcattagaaaaattgaaactcctgtgtggagaagagaaagaatgttcaaatccatcaaatcttctagaactttacacacaggctattttggacatgacatattttgaggagaacaagctagtagatgaagattttcctgaagactcttcttcacagaaagtaaaagagctgattagttttctttcagaaccagaaattttagtaaaggaaaataatatgcatccaaaacactgcaatttgcttggggatgagctactggaatgtctctcttggagacgaggagccctgctgtatatgtattgtcattctcttaccaaaagaagagagtggctcttaagaaaatccagtttgcttaaaaagtaccttcttgatggaatcagctacttgctacagatgctaaattatcgatgtcctatccagttaaatgaaggagtttctttccaagatctagacacagctaaattactgagtgcaggaatatttagtgacattcatctgctggctatgatgtacagtggagaaatgtgttactggggatcgaagtattgtgctgatcagcaaccagaaaatcatgaagtggatactagtgtgtctggagcgggctgcactacatacaaggaacccttggatttccgagaagtaggagaaaaaatcttgaaaaagtatgtatctgtgtgtgaaggacccctgaaagaacaagaatggaatacaacgaatgcaaaacaaattttaaacttctttcatcatcgctgtaactagtaagttcatctagtccttttcaaatagaaaaacaacaaaacccatgaaatggaaaagagagttccaaaaaagaagacctgttgatactgaatatgagaacattacactgcataaagatatccagcttgggtaccctactaaaacaacatcaccatctttttcattatatattagtaaacctatgaagggatgattctttaatttctaaagtgttgttcaaactcaccttaaaatacagatgttatgtcactaataatgagtagtaacccaatttagctttacaaagattttttctattactttattttttttattgtggtatatgtaacacaagtttaccatttttatcatctttagattatttttaaatctcactaccttgaagtttgccatgcttcagaaattaaagtcaagttacttcactgctttgaatacatactatggatataaatgtaggcaaaatgaaagattatgactaatattcagattccattttcaataaggtaaataatgaaagatctcacaaaggaatcattgtgtttaattattttgccatgtattactaattgtatttaaaatttctacttcccttaggcattttataaaaatttaaaaattatttttctattttgtttaaaagacaatgcatggcttttcaagtgagtaatgaagataaaaaccaagctaggttagtctaccattagttcatatgtttttgtagcacatcttttcataacatactgaaattttaatgttttttgcctttaataataggggtgagtgttaaaggccagagagcctaacttgatatcttgctcatggtctttctgtctacctcaactcctgttgtcatctttggatgatctttctgataccttgctgataccttggacttctgcccagtgactttattacattccagcagcttactcccgtggccgcactttgaatgtcaccaccttgagtttctctttctggtaaaatttcagtaactgataactgccctcttttcagttttttcacttccttattttattgacttttctctcctttatgctcattccacattcttcagttccttcttacccccttttcttgactgctccccttcctcctaaactgtcagcccctttcaggctttcttccctatccaccctcagctttatgggatactatatgaactaatctcaccagttattcttctttccctggtcttttagtctagtcctttggcaagccctcaacctcagattaatcctatttattatctaccttttcggggatgctgagttctttgtgatgggtagtccttcaaagtagaatcactacaagtgtctcacttcagccttagaaaagccctcaatgtaaaccttatgtttgttactagggtggcctctctcccatttcccgctgtggctgagccaaacttcattactttccttaggccctctgcccctcccctagcatatggctctttctcctattgaacagaaaattgagactatgaagaggtcaacttgtatttaccaactttactcattttcccattttagaggaaaagaggttgcctgcttcctatcaaaggcgactctgtgctacatgttggtttcatcttcgctgtctctctcatttccccacaaagtgttgtctcactttctgcctaccttttaggtattgatcttcactatatttttttctctctctctcttttttttttttactttacatattttatacaatgtcattcataactatggcttcttttaccaccagtaataacagactgagtctcaaacctgtaacttgtatcctgacttatctcttgctttctaaaccttgtttctaactgtctatcaaatatcttcattagacatcccacagtaattttaagctcagtgctgatgaatcccctaatgattttggtaaaaatcattaagttaaggtggatacacatcttgtcatatgatcaaatggtttcgcgaaaaatcaataatcagacaacaagatgtgcgaactcgatattttacacgactctctttaccaattctgccccgaattacacttaaaacgactcaacagcttaacgttggcttgccacgcattacttgactgtaaaactctcactcttaccgaacttggccgtaacctgccaaccaaagcgagaacaaaacataacatcaaacgaatcgaccgattgttaggtaatcgtcacctccacaaagagcgactcgctgtataccgttggcatgctagctttatctgttcgggcaatacgatgcccattgtacttgttgactggtctgatattcgtgagcaaaaacgacttatggtattgcgagcttcagtcgcactacacggtcgttctgttactctttatgagaaagcgttcccgctttcagagcaatgttcaaagaaagctcatgaccaatttctagccgaccttgcgagcattctaccgagtaacaccacaccgctcattgtcagtgatgctggctttaaagtgccatggtataaatccgttgagaagctgggttggtactggttaagtcgagtaagaggaaaagtacaatatgcagacctaggagcggaaaactggaaacctatcagcaacttacatgatatgtcatctagtcactcaaagactttaggctataagaggctgactaaaagcaatccaatctcatgccaaattctattgtataaatctcgctctaaaggccgaaaaaatcagcgctcgacacggactcattgtcaccacccgtcacctaaaatctactcagcgtcggcaaaggagccatgggttctagcaactaacttacctgttgaaattcgaacacccaaacaacttgttaatatctattcgaagcgaatgcagattgaagaaaccttccgagacttgaaaagtcctgcctacggactaggcctacgccatagccgaacgagcagctcagagcgttttgatatcatgctgctaatcgccctgatgcttcaactaacatgttggcttgcgggcgttcatgctcagaaacaaggttgggacaagcacttccaggctaacacagtcagaaatcgaaacgtactctcaacagttcgcttaggcatggaagttttgcggcattctggctacacaataacaagggaagacttactcgtggctgcaaccctactagctcaaaatttattcacacatggttacgctttggggaaattatgaggggatctctcagagctcagtgtttccaaacgtcaagtcctcatctgttatataaaatcctttctgctttgtaagttttctctttttgggattttccgcagatcagggcaacacagaatgactaccttcccagccatgtctctgcagtcatcctgtgtaatcatgttctagtccagtgttgctcaaacagttaaaatccaggctgcttttggtaaacatacaaattctgatatagagcctctgtggcaaagggaatttctcagttcctgccccagcccccttgtttatcattacacagctaagatttttatttaacttagcattttagcaagttttcttatgaaaatacctttgtgctttctaagtataaagatttaaattatttttaatacggtttttagaaccacagactatccctctttttagagcatcctgatcaattgcaagtacttccacttcttccctaaatgcgctttgtgtgttttccacctcagtagccttgcacacatcattacttctgcatccttctttgtgaccaagtgaatacctacctacctcttaggactcagcttcagtgattctgttttcataggctttttaaagcccttttcagtcaaattagatgctcctttgttctggtcctttactcttcccctcccatgttgtcgcactgatcacactgctttgtaattattttctttattgttggtaaactccatattttaaaaatttacctgtatacatagtgcttaatgcatggtaggcccttagtaatgtttttgaattaatgaggcatgattctaaatgccaaactttgcacaaaaagttgttgctattggattccaaactgctatgccctctataccagtggctgacaaggcatatagggatatatgccatcctgagaggagtaaagtgtttagattctgaacctgagaaaagagaactttctcttaagaagttggaaacttcattttaccttcgtgaccctggtagaccacttggtctcactggttggtacaattatgagggtagtactgggtgctttttatacaactttccatcccccacacagttggagaataatttgtagaccatggcagttaaaatgctttttactctggtgtattatagaataatgaacacatttttatatatgttaaagcctgctaaatcattcacttagaatgaagtaacctcaaggtaccaaataccccacataaggaaagtactacactaaattcactcaactattgtatgcctaccatatgccagattttatcctagaccctgaggatatagctttttaaaaccccctcctgtttcagagcttatattctagtggaggaagttagacaagcattttaagtaataaatgtatagagagtgtcaagtgatgagtaccatgaagaagaataaatgagggtaaggggctagtgtgatagggagaggggtgggatgccatcatatttaggggtggttgggaactgtctactgctttagcatttgtgtcttcaaatttctctcctttggttatataccttgcgtattccgcacattgataaagtttctttcttacagaagttctgatattgaattaaggaatgggtcactacttaagactttatcatttcagctacacataaaaggtttctctcccctatggattttgctaatggttgagtgatacctaaaggccttgttgcattttttacacttggggtttctcttcggtttgaattctctcatggttaccaaaactctgttaaaggacttttcacagtcgttaaatgtgtatggctctttcccaatatgaatttttttgatgttaactaggcttttagacttagttaaagacctgtgtgctctgctgcatttatagggttttgggctgctgagaataattgatgctgattaaggtgcaaatcatgactaaagacttttctttcttcttttgcatatagtagagtgaggtgagggtcgtggctaaaaccccacaataactttacattcctagctttacagtcttgctgtgaattctctggtgttcattaaagtgtgagctgtgttaaaaggcattcttagattcattttaaccacatttttaaaaactcacagttggttaacatgatggtttcagattgcttgcctcttttctctttctaccttacagggctccttttctagcttaaataagggtactccatctgccacagaatccaggattctatagttttttagtttcacttccctatgttcttttttttttttaatttttaacaatgagatgataccatgttacagcggtattacattaagatacatttaatatagccacaattaaagtatgtattatgtatttatgctggtgttctttcatgttatttcttctagtgaaaatttccaagtaaactgttattgagcatatacatttttaaaaaaataaaaccatacacccctaaaaaaaaaaagaaaaaaaaaaaaaaaaaaaca

SEQ ID NO: 28567 - DNA, 4065 bp, Homo Sapiens
ggttacttccctttttccggtccgccggattatgaatgacggccggcgcgagtattttccacataagctggctgtcgtttttctcctggcctctgtggaggcgagtggtctgcgggcagcagctcccagaggcagccttggaattccagctcggactgggcgggaaggcgcaggcggcccaggtcgccgacacgctcacgcaccctccctgcctggccgcgcctctgcgaccaggtgacccaatgaaagaagaaaatgaaagccataaagaaaagtcttacagaagaagaatacctgtacctggacttttctcaccaaacagaaggatgcatctttcctcttcatacatctgtaactttatttctgttatcttactgtgactgtaaaatctttaaaatttgcttagttgtcaccaaagaggttagtcagtggaccaggctatgtgaactcaccatccctttggctattgagaattttctcagagaatcttctgaccagcccccaactatacctgtagaaatactacagctagagaaaaagcttagtgagcctgttagagtgcataatgatgataaactccgcaggcagaagctcaagcaacagaaggctgatggagttgggcctccccttactaagggaaaggcaaagagcaaggtccacacacaggaaacatctgaagggttggattcttcatccaagagtctggaactgaaagtggcattctcaaagctcacagtacaggaagaaccagctactaccaacagagagccttctcacatcagaaaagcaaaagcctccgaccttccacctctggagcatgtgtttgcagaagggctttacttcactctggcagatattgtgctcttgccctgtatccatcatttcttggtaattatcagcaggaaattttctgagaagctggtagaatttccattgctagcctcttggtaccagaggattcaggaagtgccaggagtaaaaacagcagcttctaagtgtgggatccaatttctccatttaccaaagttgttgacaacctcaactgaacagcatccaaacttatgtgaagtcccaggtgtagaagagcaaagcgatcctttatttataggaggaccaagaccaaccatggccaagttaatggaaaagggcattgaagtgatgttttctccccacccttgccctacttggactcttgattggaatgttctccctgcagcagtcagcccaaaggaaggtaaaatgtccagtgatcgagctttgaggaagcagcaacagttgaacaaccttgtctatgtggtaacaaatcaggccaaacctggtgacagaattgtggatttctgcagcggtgggggccatgttggaattgtccttgctcacatgctgccatcatgtcaggttacattaatagaaaacagggaattatcattaattcgtgctaagaagagaagtgatgaactgggtttaagcaacatttggttcattcaagcaaatatggaatattttactgggatgtttaatattggagtagcattgcatgcttgtggagtggcaacagacatggtgattgagcactgtatcaaaacacgggcttccttcgtcacatgcccttgctgttatggtttcattcagaacacctcaaagttcaattttccaaaaagtgaacaattcaagaaaacttttatcatacaaggaacacatgattctgtgcagatttgcagaccagacagctgtccagctcccaccccaacgaaggctcataggaaaacagtgcatgtgcttggtggatctggatcgagcaagagctgcagaagaatgtggatactccgttcaagtgatatccatggagccagagagctgctctcccaaaaataacatgattgtgggagtccccatttaaaatgagatattcacatttgatattttgccatccgtcttcacgttggatgcccagtggcattcaggaggttcttggcataactaggaaacagcattagccatcttgaacctattgtgctcaggaaggaaagcaacagggaaatcttggaagtaaaggctccctgcaaagcatcacaaatgctttacaatgtgtgattaaaggactgctggtttttatagtgagaatcccctgaagtctcagctgccaaaagaataatactagtggaggttccatcacaggaataacaatttccttctcacttcacaagctcctctgatcttgccaatgtgatgtttaattcaaaacagcgcacttacagcctttattttatacttatttagatattcacatgggaactgaaagtagactcagtggagttttttgttttttatatttttaacaattgtactttttctatcactttaaaaaaatctagtcaggtaattatagtacagttatttttaagctggggttagttgaacttgtatagcatttaatatactccttttaaatatatttctgtcaggcatggtggctcatgcctataatcccagcactttgagaggccaaggtgggaggatcatttgagcccaggatatcgagaccagcctgcactacaaaaaaatccaaaaaatgaggtgggaggatcacttgagcccaggaagtcaaggctgcagtgagccttgatagcgccactgcactcctgcctgggaaaacgagacccagactcaaaataaatcaatgaatgaattaataaacaaataaataaataaataaatttcccataaattaccaaatgagattgtcactggttcaaattattaaataattgccataaatttcctattacgggaatgtggaatttggacatacattttaacaataagtacattgattaatacatttaagtttataagtaattattgaggatccagtattttcaagaccttggcctagtttcttttcaattcaaagatgagttgcaaaagacataatgttttgcctatggaagtagatcatctagaagaaaaagattaaagaattagttaagcttttttttttttttttttttgagacagagtttcactcttgttgcccaggcaggaattcagtggctcgatcttggctcaccacaacctctgcattctcctgcctcagcctcccgagtagctaggattataggcacctgccaccatgcccggctaattttgtttgtaatttcagtagagatggggtttctccatgttggccaggctggtttcgaactcctgacctcaggtgatctacccgcctcagcctcccaaagtgctgaaattacaggcgtgagccacctcacctggccatgttctttatggaatactacaatgtgttgtcacaggatttgttattcagatgtcaatcatttttatttatatatttctgggtaaaacttattagtggtgtgaggagtgcagaatatggaagcttacctaaattctttttctgccagccaacattttaaaagacaaatgatgcatcctttctcaatgctgctaattctttaaattttacatgccccaatttattccatttgagatttattttaatgttttcaacccctgtgtaacatgtatcatgaggagaaagcactatcattgatcatcactatggattaaaatataggaatattttacagggcagtatgggtgggggtgggagacatattggaatcgtgttttctgggataaaatttttaaaaagaattaatcattagccctgagtattttagtcatttgtgcctatagaaaacaacatgctcttttattgtggactttcttcttttaagtgaggtttaatttatatacaatacaataacagatttttaagtattcatttgagatgttttgacaactgtatatatacatgtaaccatcactggaatcagatatagaatattccccttaaatattgtcaggtaaacacattgagaatattttttccagtctgtggcttacctacttattttcataatgaatgttttacttgtgatgaagatttaacttacccttttactttaatgattaatattttctgtgttctttctaataaattttacgaactctgaggttaaaaaaaaaaaaaaaaaaaca

SEQ ID NO: 28568 - DNA, 2237 bp, Homo Sapiens
ggagaaggaaacgagtgttgtggggggcgtgggtgcggggggtaggccactgcgcacacccccggctcgcaggggacgctccgggtttgtgcggcggctctcggggcctgtggcaccagcttttgagtatttttggcggtgtcaagtcttcggcagcgagaggagcaaagtccgaagaatgaatggatggtgaacgccaggacttggttttgttagagtgggagatgagccgtggttgttagtggaaggtgttcacgtgattgtgaagcggcattttggattttgtcaaaagttaacagtcctctccagttaaagttttaagagtttattgtgcatgcagaggaacagctggcaaattgttccaatggcagcttggaaagctaaatgaggaagtgcagtgatcttgattgtaattggccattatcaacttgcattccttctagggtaagtcgagctggatcagcctcgcatctgtagctgattggttcagtttatcatgcggacgagaaaaaagcttctttcctggtcagcgcacacttttcagggaaaaaaaaaaaaaaaaaaaaataaacaattgaatacaaggatttttaatatctgcctaatacttatgccttcatcgcattaatgtgctacgcttgatttaattgttcccttttgatattcagtttatttccagtttgatgctgcaataccactgtgctgaacgtctctggcacattcatcttggttgcaattgtactttaggctatatttctaagagtgaaatgaccacagccaaaggtatgaacattgttcaggctttcaataaagactgccagatatttacaaagattgtgccaatctctattctcaccaccgcttttgattattgtccttatctctgcttgccactgagccccgggccatgtctctgtaactcactaacggccacatcccatttacttccccatgagtaggatttcagtttcccaaacctgagatggtctgtcagctggagaactgggacgagcagtggatcctggatctaccgagagctgggaataggaaggcttccggtagtgcttgcccaggttctgaagccagacacaagatgaaaaagctaactccaaaacagaaattttctgaagatttagagtcgtataagatatcagtggtaatgcaggaatcagctgagaaactttcagaaaagttacataagtgtaaagaatttgtggacagttgcaggcttactttccctactagtggtgatgaatacagcaggggcttccttcaaaaccttaaccttattcaagatcagaatgcgcaaacaaggtggaagcagggcagatatgatgaggatggcaaacccttcaatcaaagatctttgcttttggggcatgagcgaattctcacaagagcaaagtcttatgaatgcagtgaatgtggaaaagtcattaggcgtaaggcatggtttgatcaacatcaaagaattcactttttagagaatccttttgagtgtaggtctgtgggcaagccttcagacagcggtcagctcttacggtccataaacagtgtcacctgcaaaacaagccatacagatgtcatgactgtggaaagtgttttcggcagctcgcgtatcttgttgaacataagaggattcacaccaaagaaaaaccttataaatgtagcaaatgtgaaaaaacgtttagtcagaattcaacccttattcgacatcaggtgatccatagtggagaaaaacgccataaatgccttgagtgtggaaaagcctttggccggcattcaacccttctatgtcatcaacagattcacagtaaaccgaacacccataaatgcagtgaatgtggacagtcctttggtaggaatgtggatctcattcagcatcaaagaatccatacaaaggaggaattctttcaatgtggagaatgtgggaaaacgtttagttttaagaggaatctttttcgacatcaggtcattcacactggaagccaaccctaccaatgtgtcatatgtggaaaatctttcaagtggcacacaagctttattaagcaccagggcactcacaaaggacagatatccacatgatgttaattggaaagcagtcattggagaactaggacttataaacctctacttcaagtgtgtatcacgtaattgtttccatgaaaagcaataaatgtaacaaagggttaaaaaaaaaaaaaaaaaaaaaaaaaagaaaaaaaaaaaaaaaaaca

SEQ ID NO: 28569 - DNA, 3326 bp, Homo Sapiens
ggatgtcaaatcgtctctagtcaatgaatcagaaacgaatcaaaacagctcctccgattccgaggcggaaagacggcctccgcctcgctccgaaagtttccgagacaaatcccgggaaagtttggaagaagcggccaagaggcaagatggagggctctttaaggggccaccgtatcccggctaccccttcatcatgatccccgacctgacgagcccctacctccccaacggatcgctctcgcccaccgcccgaaccctccattttcagtccggcagcacacattactctgcgtacaaaacgattgaacaccagattgcagttcagtatctccagatgaaatggtcactgcttgatgtccaggcagggagcctccagagtagacaagccctcaaggatgcccggtccccatcaccggcacacattgtctctaacaaagtgccagtggtgcagcaccctcaccatgtccaccccctcacgcctcttatcacgtacagcaatgaacacttcacgccgggaaacccacctccacacttaccagccgacgtagaccccaaaacaggaatcccacggcctccgcaccctccagatatatccccgtattacccactatcgcctggcaccgtaggacaaatcccccatccgctaggatggttagtaccacagcaaggtcaaccagtgtacccaatcacgacaggaggattcagacacccctaccccacagctctgaccgtcaatgcttccatgtccaggttccctccccatatggtcccaccacatcatacgctacacacgacgggcattccgcatccggccatagtcacaccaacagtcaaacaggaatcgtcccagagtgatgtcggctcactccatagttcaaagcatcaggactccaaaaaggaagaagaaaagaagtagccccacataaagaaacctcttaatgcattcatgttgtatatgaaggaaatgagagcaaaggtcgtagctgagtgcacgttgaaagaaagcgcggccatcaaccagatccttgggcggaggtggcatgcactgtccagagaagagcaagcgaaatactacgagctggcccggaaggagcgacagcttcatatgcaactgtaccccggctggtccgcgcgggataactatggaaagaagaagaagaggaaaagggacaagcagccgggagagaccaatgatgcaaatactccaaagaagtgtcgggcactgttcgggcttgaccgacagactttatggtgcaaaccgtgcaggagaaaaaaaaagtgcgttcgctacatacaaggtgaaggcagctgcctcagcccaacctcttcagatggaagcttactagattcgcctcccccctccccgaacctgctaggctcccctccccgagacgccaagtcacagactgagcagacccagcctctgtcgctgtccctgaagcccgaccccctggcccacctgtccatgatgcctccgccacccgccctcctgctcgctgaggccacccacaaggcctccgccctctgtcccaacggggccctggacctgcccccagccgctttgcagcctgccgccccctcctcatcaattgcacagccgtcgacttcttccttacattcccacagctccctggccgggacccagccccagccgctgtcgctcgtcaccaagtctttagaatagctttagcgtcgtgaaccccgctgctttgtttatggttttgtttcacttttcttaatttgccccccacccccaccttgaaaggttttgttttgtactctcttaattttgtgccatgtggctacattagttgatgtttatcgagttcattggtcaatatttgacccattcttatttcaatttctccttttaaatatgtagatgagagaagaacctcatgattctaccaaaatttttatcaacagctgtttaaagtctttgtagcgtttaaaaaatatatatatatacataactgttatgtagttcggatagcttagttttaaaagactgattaaaaaacaaaaagaaaaaaaaagcaattttgaagcagccctccagaaggagttggttctgtattatttgtattaaatacgagcttgcgaaccaatcattttacatctggtttttaaaccgtaagggcaccatgaatgcagtgccgttactttttttttttttctgtgtgaaacaactcttattgtgatgttacttgttattgtttaaatgtacagaaacaaagggtaaaaatgtgttaatataccttgttccatggtgttgttcttttggggggaggggacgctactcaacacttaatagaatcacaacgctgttgggccagtagtatttattgctttagagattgcttgtcgtacctgtatgtcgtccctttttaaatatgttttcctttttcttgaaactgtataaagtttttttcccccttagcataagcatcttatatataacaactcatttgtacaaggtttttaagtttatatataaaatgtgtatatatatttttgtttcccctttttgacttttttttttctgtatgaaacccagatgtcaccaaatggacattaatagttgcattaaggatcagtagcattaacaaaagttgctttaaaagccattatgtaaaacaagacttgaaaatgagtgagggaattttagcgacactgtctgagcagcagtgggaaccatcttcgtttcccctttgaactcccagtgggatgccctaccctgcgcccttaggacccggactgaccgtgtacaaaactttacgtgccaaaattctcagtgaatttagctttctccctctttttgatgctgtaatttttgttcatcatgttttgctgtgatgttacataggtagatttgtatgtagttttaatgtcacctataacaaaatgtgtttggtagcagattgtccagaaagcattttaaatgaagaggtataaacccttaagggccaaaattctgtatattagattactcttaaacgaaaaaccagctgccgcttttatgtacacatattacatacgagtaggcagcagactttaaaaataaaaaaaacctaggcatgttgatgttgcaaaatgctgtataaagctgaaacctgttcattcagtgccattgtagttgacatgaagcgattgtaaaactgtctccgatttttctctggtttattaaaatgctaactataacaaaaaaaaaaaaaaaaaaaaaaaaaaaaaaaaaaaaaaaaaaaaaaaaaaaaaaaaaaaaaaaaaaaaaaaaaaaaaaaaaaaaaaaaaaaaaaaaaaaaaaaaaaaaaaaaaaaaaaaaaaaa

SEQ ID NO: 28570 - DNA, 3636 bp, Homo Sapiens
gtagggtgtatgaaacagaagacttgcagcatgggggtcaggagctctgtcttgctctagagccgactccaggctctgttatcacagaactgtgtgccctgggtgggcttcgtcttccaacagagaccttgaacttcaaatataggcagcaccttctagctgagcagggtggtggcgggacagaggaaggcaagggctgagcatcctgtagacatgggcactttgtgggaatatggccaggcctggcagcaactggaacgcagtcacctctttgtgatgaggatttctacaacaccagcgcttcagacccatcgctctcctggttccttttctcaaaggattggacccttgaggatccaggatcagggcagagggcagatgtactgagccacccattcaggaccagctgctacatgggagccatcccaattactgaactcttttctctagcacttggggtggttggggacagagaccactgtgaagtttgcacacctggtcctactcacaaccacttccgggctcaatgttcaagttgaaacagcattgggcattgggacctttcaggctcagaggagcaaacatagtggccagtcagacctcaccctccagctcctccttcaggcaccatccaggcttcaccagctacaggctgcctttctcactaaaagccagtgcctgactccgacctaagaccttagcatgggacgtcccccaggctgactgtgacctgactgttgcaaatttacagaaggcaggggaggccagtgggcacagcaggcctgtttgaccataaatatgtatttaagaagtatatgtttaaagatgggattgaagacatatttagctctattccatcctgcagccccactaaggctgtggctaaaggtcatgaggtaagaaagacagtggaagaggaggcaactacaaggctttggaagccccaggtaccttagtagaccatagaaagcctagaagcagttctgtgtagattgtggaattctcaaaaggcacctctagaaatgagggactaaagacagaattctgttactaagcagttagagctgcattaccctccctcccccatcccagaaggctggaggctcgactccagtaggtctctagactactatctctgaagtgaaggccacagtcagaaagctttccattccagcatctaaataatagaggatttgtgggaagaacagccacagaaaccaaaggagcagaaatcatcagggaaatagtttccccaaagatgggcacaattttgcagatttgaagggctcactgagttccagcaaaatgaatgaaaatagccccactttgaggcaaagaaagatcctaaagcttctagagagagaacagaggtatcaccatgcattaaggacatcatcagccaagcgccatggctcacacctgtaatcccaacactttgggaggctgatgcgggaagatcatctgagcccaggagtttgagaccagcctgggcaatatagggagaccctgtctctacagaaaattttaaaaattagccaagcatggtggcacgcacctatagtcccagctactttaatgctgagttgggagcatcacttgagcctgggaggtggaggctgctgtgagctgagatcacaccactgcactccagcctgggtaacagtaagtccctgtctcccaaaaaaagggacatcatcttagcaggacacagaggaaactagaagatagtggagcaatatactcaaaattctgaggggaaattttttccaacctaaaattctgtaccaactcttatgagctggattgtgtccctccagtgtttctgtgttgaagccctaacccccagtaactcagatagggccatttaaagaagcaattaagttaaaataagaccattagagttggccataattcaatctggtgcccttttaagaagaggaaatttggacataggaagggccatgtgaggacacagcaagaaggcagccatctgcaagccaaggaaaagggtgtcagaggaaaccaaacctgctgacaccttgatcctgcacttctagcctccaaaactatgaagaataaatttctgttgtttgagccaccctatctttggcattttatatggcagccctagcagactaacataccaaccagcctatcaatgaaatatgagattagaaaaaaggaactcacaagaagataatcctcatgcatcttttctcaggaagctcctaggaggtgttcctcactaaaatgaaggaataaggtagaataagaaagtcatagaatccaggaaataaggagcccccactaacatgtacggcacctagagaaaggccagtccaggtacggcagggcgaaggcccaggagacacaggtttgtcaaaacagatgaactccatgcaatgcaggctgtgattgaatagaggaagaagccaaacacagctattgacaccaggatgaatggaaggctgtgcggcaaaggaagactaaatgcagctgtgactcaaatttacatgaatgtgaccacataaatactaaacagtgctctattgcaggtataacatgctacagttagtggggagccaggtgcagggatgtgtgttgaacattccagaatcctcttcttcctagggaaaagttgagataatgcctcagactgactagcaataaaagcatgtgaaaaaaaatatgtgcagttttcaaaggtttgggaaaaaacaatccctctttctgctgatggaaggatagcttagtggaatgtttctgagggctggttggtctctatatgttaaaagcattaaaagtgtgtacacactttgacccaggaatttgagctctaaaaaaaatcagagttgtgtgcaaatacattaagctgcttaccacaacaatgtccactggtagaaaactggccctcctacatcatggaattcttttttacagaattcagttctgtagccttgggagtatactagacaggaagtttattggcatgagatttcagaattaagtgggaaaacaattctttaagcatgtacagaaaagtgacctgaaatgtttttgggtgatgagcttacagacttttttttttttttttttttgaggcagggtcttgctctgttgctctgccatccaggctggagcagtggcacaatcacagctcactatggccctggctcaaaccatcctcccgtctcagcctcccaagtagctgggatcataggcacataccacactgagctatttttggtagagatgggatctcactatgttgcccaggctggtcttgaactcctgggctcaagtgatcctcccacctaggcctcctaaagtgctgggattacaggtgtcagctatcgtgtccagcctgagatatttcttatgagtaatgtggatggtacgtgagtccatagagtaaggcatttattgtaaacctccagggagtttctgaaaatagtatcttctcttcaaacctaggatgaagctggaggcagattcgtcgctttctctggagaaggacagtcattgcgtaaaaagggaagaaagccctaagtgaggactgttggctgattggaaaataataaaagaatcatttgcaacatcaaaaaaaaaaaaaagaaaaaaaaaaaaaaaaaaaca

SEQ ID NO: 28571 - DNA, 3618 bp, Homo Sapiens
cattcaatcaggcgccaattaatttggactctttttcataatgtgtctcctttctttctcactgctatcctggtgcttgtttaaattattcgggaatttcctaatgggccttctaatttctagttccctttcctttcttcccactcgcctgccatcaccggaggatttatcctcaaggacatctcttgacactgtcatactgatgttgagaaatcttcagttccatcagagtaaaatgtaaattaatgcctcagtttgactgtgaagccttcatagtgccacacctgagtcacagtcaccctttctagcttcctctcccactagccactttgttcccagtccaggttccagccttgggtataatggccactcctcataccagctcctcggcttcctgcctttgtgctgtgtttcggctctgtttctggcatgccttccctatgctccctatcaaattcttatctttccttcagcactaagctcatgtttcacctcttttgagaacccctcctatatccttccttcttttcctgtgctttgtacctctacagcaccacttatccctgaatcacttctccacaaagtcattgatacctgtaacaaaatgccataaactggaggctggggagtctgagaccagggtgccaacacggtcacgctttgatgagggccctcatttgggttacagactgccgacttctcaccgtgtcctcacagggcggaataacaactctctttagcccctcatgaaggcactcatcccatttggagggctctacctcatgacctcatcccttctcagaggtcccaccttctatgcatagtatccgcacattagggattaggtttttatatggatttggggggcacagacattcacatcacaatggtgcctcttacatttctcaagcacttatttttgctctgtattatggggataaaaatgattctgatttaagttgtacctttaaacagcttatattatagtctagtgtgaaagaaaatacaggcgcatcgtaactaaaataacaagtaggcaggggtaagtgccatgtgggagaaacacataatagttaataataggtaccatatattagagtgcatagtatgtgtaagtacatcattatcacatttatacttcacatagcaaattatccctatttttacagcagaggaattgaggaattaaatggttctctaatatagggaagttaagtaatggacccaaattgtccatttatgtggctgagctggacttgcacatagggctgtacaaagcttatgatcttaaaaaattgagcaggcgtgtcttcttgaggattatatacaaagaaagtgttttggacaagtagttttatcttggctgtcagcataaattctatatataataccagcacatagcaatttctttttccctttctttttaagacactggaagaagagtttgccaggaaactacaggaacaggaagtattctttaaaatgactggggagtctgaatgccttaacccatcaacacagagccggatttccaaattttatcctattcccagcttgcattccaccggatcataacaaagggaagcattccgtgcgtgggtttggctctttcagtatgtcatcctgttctcatcttctgccacagtctctcagatagctcatgaagacaatcacctgcctcaccttctaggtgttttccttttttgttttttttgttttgttttgtttttaagcaaagatgaagggaaaacgaactaagacagacgctaggccatgttggcaaagtagcatcttggtgactaaggtgactttgtatattcatcttaaaaattatgttctttagacactgctacctgaaaactgttggagaaataatgtttaaagttatttaagaaaaactgttacatcactaagtattaataaattcttcttacctgacgtaacttctcaatgcctaaattctgtagttgaagctctgctgcagagagttgggataattttcttttggtggatcagctctcataaaaaagctatgatttgctcaaatatgctgttgactcagtaaatgaatatatttttttctttaaataggaacaacctcttttaaaagagaaattatttcagtgatttgtcaaaacgaattacctcttttggcatgagctaataatcgagggtgctaattttcttaagatagtgcctaaaacactaaatttcagtcaagtcgtaagtaggattttctttttgatcaacagggacaaaaacatctttagaattaaaaacatggttgttttggaatttttgcttctcttaccgtttgatagaaattttcatcctaaaatacatgtacaaagtttggaaagatgaaaaaaagaggtagcttttagattgcaaattggaaatgtaaaactcatgaaatttaagcaatataggcttagctatctgtgtttattttctaaaataatacctgagctggttaaatgatttctctccatcttagctaattctgtttaaaactctgtcagaggcctgcaggctgtgagttatatttataaatatatcttcagaaattaatcttaaaagaggcattagttcagaatacttttttaaaagtttaaattaaatatttaggcacgtcagaaattacttttccttattttgaaatgaggctacttatgtcttggttttattttgttccatgtttaaatcattcactttgatttgagtgggaaaagcctgaagcctttatcatgtggttgctggtgtgtgtaattattaatgaaatgttcactcctagtcccttatgaggcttagaatttcaaccacgtgtcaggtcagacagtattataaactgtactttgctgtctgagacagcacatttgtgaatgatgcttgctgcctgccattttcaacctattctctcttaagagtgctaggtaccaaattgtgaaagtttgttttcagttatattacttttgaggctggtgaaaaatttaaatgtaactttgtgggaacactgattcatatttagaaaatgtaaatgtctgtagcactttcttgcagttaatttgaaaactttggatgctgaaccttgtttgtcagtgatttagatgatttaaaaatgcatgtgtgatttgaattttataattgttttgacaagcataatttacttggacaacttcgtaggtagccttaacttctggccaagtttgttttttatataaatatatatacatatatacatattatgtatggttgtaaattcatacacttatcacatgaatgtgttactgtatacaaaactcttaatgctttattctcaaatgctgggttgaaaaatgttttgaaagccttttaaaatatatatctttataaagtaatattcaggatgatgataaaaattgtttatattgttatgataaaaatgacagtataatgttgcccagtgtatttaatgatttatttgaagagggattgggaaggaacgtcttcataccactttctcctttgaaattttcagtttattgacttttaaaaaatgaatacctcaggcagtagacattttttttctagtatcatttaattgataccctgtgcgccaaaaaaaaaaaaaaaaaaaca

SEQ ID NO: 28572 - DNA, 2497 bp, Homo Sapiens
ggacttccattgctgttgctgttgtccctagacaagcccgttagcaagaagcaccggcaggggagccatgcactccataggcttgggatcacccccgggaaagcgatcttccccgggctaccacccccagctgcagttctgagttagtgcatccttcaaagctaggagaattctagggtgaccagtgagctaatgttgagtgagcaggtattgacttgaacacactgcaggcctttggctgtctcatgctgtccttactcttcttgggaacagtgagtcactcagctggccagggtggggatgcatcctggtgaagagacagctttccctgaagatgctacagaaagttactgtcagatttcatttgtttctgtttcctgagatcaactaacagaagaatctaatggtgagagtgtcttcattcatgttttacgttttatcaaggcacactggaaagggaattatgtggctgacttcccttggccttcccaagagaagattctcttcttatgtcagtgtggcttctggaagtgtctcctatcctcccatcctccaggcctgtggtgtgacttctgccccgaagttcctactatagtgagtcatctggggagaggccactgaaaagaggccttcccttcccatttcctcccctgcctccttagaacacactctaagtcagaacttaatctaagaagaaggaagctggaccaggaaccttggaagtcagccagccctagaacagtcagcctaaattttggccgtaatggcttttttggttttttgttttgtttctgagatggagtctcactccgttgccaggctggagtgctgtggcgctatctcagcttaccgaatcctccgactccctggttcaagcgattgtcctgcctcagcctccggagtagctgggattacaggcatgcaccaccacacccagctaatttttgtatttttagtagagacggggtttcaccgtgttgtccaggatggtctccatctcctgacctcatgatgtgtccacttcggccttccaaagtggccgcaaagtggcccacttcggccaaagtgcacttcggccttccaaagtgcattacaggcgtgagccaccacgcccggcctggcctttttttttttttttttttgagacacagtttcactcgttgcccaggctggagtgcagtggcgcaatctcggctcactgcaacttctgcctcctaggttcaagcagttctcctgcctcagcctcccaagtagttgggattacgggcatgcaccaccatgcctggataattttttcttatttttagtagagacaggatttcatcatgttggccatgctggtttcgaactcctgaccacatgtggtccacccaccttggcctcaattatgtgcattttggtatatttacttgtatttcaacatcttgtgagtttgaaaaacctgaaaggccagaatgcttccttttatttctcaccatttgggcagcacctaggtggttttgtaaaatgcagcatctggtgctgtgggtctctctcaggccttgagggacacttccttcctccccactcgcctcctctccactagactttggttcctagagggcgtggggccgggtctgaggttcttgcctgccttccctcccattggtctttggttgctcatccctctaactgcaccccttcttggtccttcctccacagacttcagataatagataagtcattagcaaaccagactgaatctttagggtgaagagctccccaaagccatctggtgaggtcattgtggggaccagggactgattatttgtcacctggatcacaaagatgggactgtctgctcaggctggtggtgacaggatcctgacccgtggtcctctcccgctccctctgctccaccaggacacatgtataggacactgtgctgtgtgcagtggagaaatctccctgggccaggggaaagttcagacagtgcctctagattgtgttttgcctcctccaatgtagagttgacatctggaccccagagcccagcagggctttctgtcagacatgctagggtggtagaaatgggccctccaggtccccctgcagtgcactgggcagagacctccggaaagccggcagcgggagcgcttcctgggcagcttcccccagcacagtgttcccaaaccagtccatccggaaaacagtctgtacagcaaatgctgtgtgagatcttaggcttttcactttttttgttttgttttgtttttgaaagaaagaaaaaaatacaattaacaagcctcttttgtaaatgggtttcctttctatgtataaaatcgtggtggtcccttgtttttacatgttcatgctgtgtaattttgaggtgttactgagatatgttctgaacataatgtgcatttttttctgtacagatgaaatgggagaatttaataaagagtttgcaggtttttacttgttaaaaaaaaaaaagaaaaaaaaaaaaaaaaaaaca

SEQ ID NO: 28573 - DNA, 4568 bp, Homo Sapiens
ggccacggccgacatgttttttttttttttttttctttttttttttttttttttttttttttttttttttttttttttttttttttttttttttaacacaatggccctgcctcccaccgctttatttctttcggtttcggatgcaaaacaaaaaattttaaaagaaaatgtgacttcaaaggaaaagaacaaatttccaaagacttgggggagtgaaggcagagcctggtgcagatggacgaggtctgcagacggagggcagaggtggtggaaggggccaggggcctgcaggcctccccctggaactgggactggtctcggtctgctgacgtcagggtcagctcccccgcggagctgacttcagcagcccacagctgtggggcttcagcagccacaccagcccagcccagcccagctctcgatacgtttggtctttcatgctgaaaaataaataataaagcctgtcccgtgtctactgcctcccccaactgcacagacgccagcctctaggcctgactgccagggaggtggaaacactggccaccagcccggcagcccctacaggccccccagatgggctgcctcagtcgtcctctgagagctgcagatcctccagctcgtcctccggcccctgggccagctgctgcagctccccaggggccagccccgcctctgcgtctgggtctccatcccaagaccattcaccctccgagttgctgctgtcctcctcgccctcctcctcgtcctcttcatcgtcttccaccccatgccgagtgctcaggggcctcagtatccctctctccgagaatccctcggtgtcgtcctcttcagagctgttcaggtcaaagaggtctttaaattgcttcctgtcctcatccttcctgtcagccatcttccttcgtttgatctcagggaagttcaggtcttccagccgctctttgccactgatctccagctggatctcccggtcacgcagcttgcgccagtggctgtagtacaaggtcaagggtgtcccctcttcccgggtcagcttctcccaggcttccactgcctgctgcccagagacgccgaaggaaaccctctggcggcggctgcagatgtatgccgagttctcctgaaccttcccaagcagctgctgcacctgccggcagtagttggccaccttgcactcccggaggaacgacttcagctgcaggaccacaggcagcaccagctccgggaagccgatgcagtgtgcctggctgtgcaggtactccagggtgaggtcgtacagctgctccaccaggccgtcccggtatgccttctcctgcaggttgacattggacagcttcaggatcacggagaagttgatgggcttggagctcatgcgccctggcttcctgttgaagtcgacctgctggaacatctccaggatgaaaggcagcaccgggatgaaggcccccgagctccccgagagcagcgtcagggcacggatgcagtgcattcgcagcgggtagaagcgggcagtggggatgagcttgatacagccaatgatgacttgggcaagggggtagaccaagggctggagggcttcgctggggcccgcagtgctcaggacccggcaccacaggaagaggcagtgcacatactgccagttgtacacagactggtatgtttccttcttgcgggtggtcatggcgttgcgcaggtgtatggcgagctggcggatgtagaggaaggcgtgctggtaggccacacccggctccagggccagcagctccgtcaaggtccactgcatgaaactgatgaaggggagggcaccaggcgaggtgaacttgcagttcctcacatacgtgatgtacatttgcttgaggacggggccaaggaaagtgtccttcttgtgccggcagactctgctgaggaccaggaaagccagcacccgcagagactcctccccagtgctccatacgaccaccattctcttgagcagcatgcggcactgcttggggaaggtcaggaagcagggcaccagcacgctgatgtgccgcagcacggccgccaacaccgtcgtctccgacagacaggacaccagctgtatggccgagcccaggtaagccttgatgtccacacgaagcttcccccagagcgggctgctggacggctgcagcatcctgcagagagaccacccacccctggctgggaggccccacggctcggacgcgaggctgctcagcatgttggcgcgtgccctggccagcatagcctctacgactctgcagagaccccccgtctctccactcaaaaaagctcagggccccttacagctggacagacacaggggcttagcaggaccctctcaagtgcattagctcctccttcagtggccttgaactcctgtctgccctgcccagggttggccacagccctaagagtccccggaagtcccagcctccaactccctctcagacataaaccttttctaggtccccttgatcacatccccaccgtgagaccacacgaggtccctaagcccagcagctggtactcagcacctctggggtcgcccaggcaccaccaactgccgcagactggtttcctttggcccacatttgctgctgctatcctttgccacctttccaaacagcagcttctggagacagccaatgaggtctctgatgcagaaggtaaccagagcattgaatgcagcactgtccgtgacctggaatttgttggcctcagcactttcctggtcccctcgggtggtggccacagctgctcggaacgcctgtaccacttcatggaacagctttggagtgaggcgttgctttgctgcctgcttccatctctcaaccatggcgacggtcacaggaacagaattcttcttccccttcagccctctggggactctgtccccatcttctccttcctccgctccatcctcctcctcactggcttcctccagcacatctggcagggagtggaacggcccctcttcctcctcagagctgtccgagtcgctgaagtttagcaggctctggtcattctcctgcaggaacttgtagaactcggggtctctgtccttcagccgagagagctggtctttgtgctcagaggcacggcctttacgccggctgaggaggcagaagtcagcgaccccagtgggaagtggaagtagagggggcggggagtggcctacagggtcagtctactcccttcacaaggattaccaactagcaagacaggattgccaggaggtacgtttttggcagactcacgtctcctacccaacaacctctacaacataccctcaaacacactacacaggccccccagccgcggtcttccctggacttgctgtgcctgcgccctgcgctacacaggcccccagccgcggtcttccctggacttgctgtgcctgtgccctgcgctacttttgcctgatggtggcttcacccttccagaggctcagactaaaggcaaatctctgtctctaatacccagcacgcaacttgtcatcagatctcatcagcaacaccttcaaaaccgttcgtgcctcctctcaaaccaccacatagttcaattctcagttaacctaaaggtctctctgtttccacccttgtcacctacaaggcactccaccgctcaaacccagaagtaactccctgttttacgaggcaatcttatgacggtctacggcacctggctcttcatcacccttctgggctcatctacccctattcaccccctcactcctgccatagccacgtttacctctgtactctccccaaatgctcccactgcaaggcttttgctgttttctgctgcctgaaatcctaagacacgtttcccctactgtctgtgtggcctccttgttcgaggtctttattcagacgtcatcttctcaaacaaccacctccgctttttttttttttttttttttttttctgaggcggaatctcactctgtcgcccaggctggagtgcagtggcgcaatctccactcaccgcaacctccgcctcccgggttcaagcgattctcctgcctcagcctcccgagtagctgggacgacaggtgtgtgtcaccacgccaggctaatttttgtatcttttggtttctttctttttctttttgagatggagtctcactctctcacccaggctggaatgcaatggtgccatctcggctcactgcagcctccgcctcccgggttcaggtgattctcccgcctcagcctcctgagaagctgggattacaggcacacgccaccacacccagctaatttttgtattttcagtagagacgggttttgccatgttggtcaagctggtctcgaattcctgaccttgtgatccgcctgcctcggcctctcaaagtgttgggattacaggcgtgagccactgcgcccggctaaaatacagtttttaaaaagttagttccaaaaaaaaaaaaaaagagttcaaggccgggtactgtggctcacacctgtaagtccagcactttgtgaggcaggaggatcacttgagcccaggagttcgagaccagtctgggcaacatagatgctgtcgctacaaaaaaaaaaaaaaaaaaca

SEQ ID NO: 28574 - DNA, 2396 bp, Homo Sapiens
ggctcccgcggccacgttgcagcccaggcggaggcgcgggatctcgagctgggatcgccctcttgggcttcggtgcgatcggcggcgggaggttccctgggaaccaggtggtcgaagggctgagctgtgtggccagacaagaggtccctgccctcccccagtgagccctgctgttcccgtgggagccatgaagctgaacgagaggagtgtagcccactatgcactcagcgactccccagcggaccacatgggcttcctgcgcacctgggggggcccagggaccccaccgacccccagtggcactggccgaagatgctggtttgtcctcaagggcaacctgctattctcctttgagagtcgcgagggccgggccccactgagcctggtggtgctggaaggctgcacagtggaactggccgaggctcccgtgcccgaggagtttgcctttgccatctgctttgatgcccctggagtgcgcccacacctgctggccgcagaagggccggcggcccaggaggcctgggtgaaggtgctgtcccgggcaagctttggctacatgcgcctggtggtacgcgagttggagagccagttgcaggacgcacgccagagcctggctttgcaacgccgctcatcctggaagtctgttgccagccgctgtaagccccaggctcctaaccaccgagctgcgggcctggagaatggccactgcctctccaaggacagcagccctgtgggcttggttgaagaagggggcagcaggtctgcagggtgggggttggctgagtgggagctgcagggccctgccagcctcctcctaggcaaggggcagagccctgtgtcccctgagacctcctgcttctctaccctgcatgactggtatggccaggagatcgtggagctgcggcagtgttggcagaagagggcccaggggagccactcaaaatgtgaggaacaggataggccctaagtctgggccctttgagtcaggaaaccagggccagttctttttcaggagttaaatgtttacgcatttccaaggttgcgttttgggaggggacatgggttctctccttcctgctatttaggcattctccaggttcgagatccacccgtgtgtctggaagggactgcgggaccattccttccatcctctttatttcctgaggtccagagaaggaaggagacttagcagccacagagcaagaccccaatctcctgactgcactggcctgactgccccctcccaggggatgttaatgaaatgaaggaagtggggaatgtcacccgagactgtcacaggcttgccatacctttggcctacacaccgggctctagagccataatttccaacctggggagtctcctgtgcacttaaatccgaggtaggctgcagtatcggcttgaagctctgacactgtcagagaaagtggatttattgtgtcataggagtttctgggacccagctcttcctgagaggggtgggaagattggggatgggatcctcactcagcagtctgggtagggccctttgaggcagagggtcttcggccagtgaagagagatttattctgcttctgctcagagtgctggggtcccatcctttctccctggctgccctgttaacagatggtgctggaccttgccccggaaggggcttgtagcttttttacgtcaacgaaatgccctcctgtactctgtcttcagcagccaactcctggagctgccaagtgaggggttaaagaagaggtggggaggcagtgtggctccctgggaaaagtctgttgctttggttctcagtcctgggtattctaggagcttggacacgggattgcgtttcctgtgctaaaattctctctcctggctgggctccggtaaactgaagctgctcgagaaatcacctgggaactctcatagccgtttgtcacccagggtgtacttgccaggacctctccttgctactcttcccaaagtcgggaggcaaagcggctgggtcaccagagcctgaccatactgacgctccagggggaagacgcagaggccgggaagagacaccccctcccaaacacataaaacttgccccttcctagcctcggctcccctcactggggccttgggcaggaccgacccgcatccaactaggcctaaggggtaggctctgagcctcttacccctaagaggcggagatgcgcccaaggcgggcgcccggcctgttccccagccctgcctggaagccccgcagccactgcattttgtttaaacacagatagcacgggcctttctcttattgctacagtgttttgtacacggttaaaacactagtaaagctttttcgttattaaaaaaaaaaaaaaaaaaaaaaaaaaaaaaaaaaaaaagaaaaaaaaaaaaaaaaaaca

SEQ ID NO: 28575 - DNA, 2057 bp, Homo Sapiens
gagagtgtgggaggagagagcaagcagggaaagagagcgccaggtgcttagcaggatttgcctcaaagggcactgcaaaaattgaacagaggaatcccaaggaagctgcctgaatttgcctgtatactctcgttctgcgacttataaaggaccagacaaatcaaattagtggttttggtttccgccagctgtggatgcctttgacattatgaccgcagaggattccaccgcagccgctgtcattcccactgtgtcgacgccaccacctttccagggccgcccaataactccagtatacacggtggctccaaacgttcagagaattcctactgccgggatctacggggccagttacgtgccatttgctgctccagctacagccacgatcgccacactacagaagaacgcggcagccgcggccgccgtgtatggaggatacgcaggctacatacctcaggccttccctgctgctgccattcaggtccccatccccgacgtctaccagacatactgaggctggtgaccagcacgaagacagaccacacaaacaccactgaaggaacgcttgactatttatgaagaaggaacatgttggattcacacatgcaacctgaaagtgaagaatgttagcagatttatttctgaattattttatatacatgaagttttcactagttttttaagactattttcaacttagcatgcctacgttcatacatttccaaaagacttgcaatggttcgtgccttcattccatcttttaaaaatttgtatgctgtactacatttgtatagaggtttttgttgttgtttttttaaggatatattttcagtatgaaggttattttcttaacttctgcactccagagatttctattttgtagtaccttcaataatatatcaactatatattaaaaaagcacacttgaggagctagggaactattttgaaaaatatatacaatatttaaagatacaaacagtagtgcttaaaaatactacataaagcattattttaaaggttatactggaaagtgcaattttaaaatgagtaaaacctctgtatttctgctggcattaagggttgatggtgttaccatgtatcatcatggcggtactattttttaaaagaaattaaacactggatctctccttaagccaacattgaaaagacttgccgcacttctgagtccaaacactggaaagctctcctttgccaccgttagccggggctcattctccatgtgccttagccttaaacatgcccccactcccacatctctcaccctgtcccctcctccccagattcccaatcccaccgcaatgtttggcaagcctaggactgataagtagctctgatagaggagctggtggcttttatacttcttcctgggtctttgttggggtttgttgtttcgttgttttttgtttttttttttgtttggttggggaagtattgtcttctacgtgtgctattttcagtagcagagtaagcacaaggttttaatcgagttgcataagacacctttgcatagctatttaattgcccaatgtaaaactttaatgccatttctaatgcttttattcatttttgaagtatgagtttgtagggacaaagaatgtatgttatcgtagacaagacccccagagactcttttcagcagaaagttatgcttctagttgccttaccatgtttcttgcaaaactgtccatggtcctcaagggtgttggaaacattatgtttattaaatgggcctcttttcctttgctgtgcacttgatgggtgaactggattggggtgtgcacatccaggaggaggaggagagacctgtagaagtttaaagatagtttgtaaatatcttctaatgcttgtttttagtccttttatgttggagaagttcatggtatgtagtttaatgcaaaatgaaaccattttatttcaatgttattaaaaaggtttgttttattaggaagttaaaaaaaaaaaaaaaaaaaaaaaaaaaaaaaaaaaaaaaaaaaaaaaaaaaaaaaaaaaaaaaaaaaaaaaaaaaaaaaaaaa

SEQ ID NO: 28576 - DNA, 1897 bp, Homo Sapiens
gggcgcgagccgttgcaggtacctgggggtggttaagttggtgacatggctcagaagtttatttctttaaatttttaagttttttttctttttagtcttcagaaaggcaacagtagtcttttaacgtcactgttaaaagtttctctttgggtgatcgctccttccctcttcaacggatccctccccgcctccatcctcgttctgtgggagagaccagccttctggtgctgcagtcaggaatggagcttgacagcgctctggaagccccatcgcaggaagactctaatttgtccgaggagttgtctcactccgcctttggacaggccttctccaagattttacactgtcttgcccgcccggaggcacgacgaggcaacgtaaaagatgcagttcttaaagacctcggtgatctaatagaagccacagaatttgataggttatttgaggggactggtgcacggctccgcggaatgccggagacactggggcaggtagcaaaagccctggagaagtatgcagccccctccaaggaggaggaaggtggaggtgatgggcactccgaagcggccgagaaagcagcccaagttgggttactgtttcttaaactgttagggaaagttgagactgctaagaattccctggtcggccctgcatggcagacgggcctgcatcacttggcaggacccgtttatatttttgccatcacacacagcttggagcaaccatggaccactccgagatctcgggaagttgctagggaggtgctcacctcactgcttcaagttactgaatgcggttctgtggcaggattcctacatggagaaaatgaagatgagaaagggagactttcggtgatactagggcttctcaaacccgacttgtataaggaatcctggaagaataaccctgccatcaaacatgttttctcatggactctgcaacaggtcactcggccctggctgagccagcatctggaaagggtacttcccgcatcattggtcatttcagatgactatcagactgagaacaaaatcctgggtgtacactgtctccatcacattgtgcttaatgtgccagctgctgatttgctccagtataacagagcccaggtcctataccatgccatttccaaccacctgtacacaccagagcaccacctcattcaggctgtgctcctgtgtctgctggatttattccccatcctggagaaaaccctgcactggaaaggagatggagctcgacccaccacccattgtgatgaggtcctgcggctgatcctgacccacatggagccagagcaccgccttcttttacgcaggacctacgcaagaaacctgccggctttcgtgaacaggttggggatcctaactgtccggcacttaggttatctggaggtttatgatggacctgaggaggaagctagactgaagatattggaaaccctaaaacttctcatgcaacatacttggcccagagtttcctgcagacttgtggtcttactgaaggccctcttgaaactgatttgtgatgtagcaagggatccaaaccttacacctgagtctgttaagagcgccctgctacaggaggccacagactgcctgattctcctggaccgctgttctcaaggacgggtaaagggtctcctggccaaaattccccaaagctgtgaagacagaaaagtggtgaactatatcagaaaagtgcagcaggtttctgaaggcgcaccctacaatggaacttaagacttgtattactttcccaagaggaaaggattttcttcccatcccaatttgtatgaatggagttatttaagaaaaaaagatatttttacacgaaaaaaaaaaaaaaaaaaaaaaaaaaaaaaaaaaaaaaaaaaaaaaaaaaaaaaaaaaaaaca

SEQ ID NO: 28577 - DNA, 2148 bp, Homo Sapiens
ggagtgggaagtaagtggagacacgtgctttggcctgttggaggggaaacccgctctcgcctcctggtggtcgccgactcgcagtccgcaggatgactcagggcagccctgaccacagttccgccgccatcggccctagcctgctcgccccgggacgataacagagctctgccgggggctggaggcactgaccgggtgaccagagacccagagaccagaccccctccacggcgcccgggatttcggggacggcttctcccatcgcaagtttcaacagaaaatgagaaatatcccccgacgattggctgaaaacatgcagcaaccactattttcttcctgcccctcgttgatgagagcattcgaagtgacctcagcagggcatccaggtcagtttctggaagacttgtgtgtgtgatgaatgaatatctggttttgtctctgctgggcctgtgtgcctggaaaggaattgttttggcctagggtcatccaggtttgtttggtttagttcttgaccacatattttttgaatggtgactgcttaagaccctgttgtatatggctataaatagatacacgccaaggtgaccacatactctgtggttcctgtgcccaccggccatgtgtctgagtgtgtagcctctcatcatctaaaggaactttggctgcagaggggaggcctggtcccatgggaagttttgggagcgcagcagcaggtgggttcaaacgacccagcaagtgcctccttagcacttagaggcggaggccaccatgttgtccacgtggggtttctgatcccagctccccaccagcctgctggacctcgggcaggtccctccctgtttgtacctccattacttcttcagtaagatggggacactgaagatgaccatgcctcccaccagattggtgctttttttgttttaataagggacagagtctcactatgttgcctataggctggtctcaagctcttggcctcagttttcctgcctcagccttcaaatatgctggggtgacaggcatgagccactgcactggcccagattggtacatttgagggttaaatgagcaaatcctataaagcactcaggagagggctgtggggtttgggctggggcctgggagcactttagacgtggtagctatgttgttgtcacctttctcctctttcaaagcattttttgtttgtttgtttttgtttttgagacagagtttcgctcttgtggcccaggctggagtgcggtggtgtgacctcggctcactgcatcctctgcctcccgggttcaagtgatgggattacaggtgcctgccacaacacccagctaattgtttgtatttttagtagagacgaggtttcaccatgttggccaggctggtctcgaactcctgacctcaggtgatccacctgccttggcctcccaaaatgctgggattacaggtatgagctaccgcgcccggcacaaagcattttcagctgtgaaattccctggggtgctgcagtagaggaaggtttggggtcttgacgggtgctatttgccacggaaagatgccttcctgctcccagggcaggagagccgaggtaagacttactgtaggctgtcgtttttttgtttgttttttgtctttgcgatggagtctcactctgtcgccaggctggagtgcagtggcatgatcttggctcactgcagaacctccacctcccaggttcaagcgattctcctgcctcagcctcccaagtaactgggattacaggcacatgcccccacaaccagctaattttttatttttagtagagacagggtttcacatgttggccaggctggtcttgaactcctgacctcaggtgatccgcccgcctcggcctcccaaagtgctgggattacaggcatgagccactgcgcccagccaggctgttgtttttttacctccttgtttgcacaatttgggccactcacaagagtgtataccctgtgataaacagttacctacattctcctctgcatgcttgtctttagaggaaggaaatgtattaattgcccaaagtaatatattgtgttaagatgtgatatatactggggaaaaaaaaagtgtatattgacatttctggaataaaccactttgattcccaaaaaaaaaaaaaaaaaaaca

SEQ ID NO: 28578 - DNA, 5041 bp, Homo Sapiens
ctgtagctttaagatcaaatgtttcttcaaggaagccctctctgactcccagagtacatcaagtcctctctgttctacactctcatgataccctatactttgcttccagagaagccattccattttatgagtgtatttttgcactattctttgttcagtcaatttcctccaattacagtacaagctccaaagggtaaggatcaagtctgttttgctcagcactgtatgctattccttgtgtttagcccagttactggcatatattaagagctcgttaaatattgagtttggttatagttttatattttaggtctgtgacatttgtgtagtctatagagaacatgtctgagatatttatacagtccatagagaatgatgtgataagaagatgtaaatcacacaaactgcaaatacacacttgttctatgcctctatgtcttagggagtctaagagattccaaggtcagaatgtttttcctgttctctctgaattgaaatataccctcacaaagattttcactttctttaggtgtttttccttttctcactttttgagtgataattttttgtttaaattgagagccatacagtcaggggatatatcacatttaacataaatggcagtaaaactgcccaagcagtgagtgtattatataggcatagttaataaacaagctgtgtgatattaagctatgtttctctctagctttctggagatagtactgaattcccaaaacacagcgtgatttattttttgtgatagtgtgcatcagcaaaagggcatatattagatgcttggaaaatgctttgctatagatttatgtctttttactatttgtcttcatatataattattgggggcaactttagttttttctgtttctcttttcagaaagaataacaatttttttcgccttcttatctatatgtttcattgtggactatcagtactgttcttcatttaaaatgcaaatgttctaataatctacaatcataaccttatggtagaactgatacagacattgtaatctctaagcctctgaaaatagtgttctgcatttttattgtaatctctaagcctctgaaaatagtgttctgcatttttattctagaagagagctactgctcctcatcaatgagagagtgggattaaaaggaacatgagtaaggattatatttgcagagcctatctatttattcaacagtattgttgaataataacatttcttaagtatcatcttccctcaatatatgtgggggattggttccagaatcgccctccccccgccactgcatattccaaaattcatgcatactgaagtcccacagttgcttctaggacatcagccattccggtacttgggttttgtggcgggcaaatactatattttttatctgtggttggttcaaaaaaaattcacacataagtggaccccccacagttcaaactcatgttcaaggtttagctgtatctattttgtagcagaatctagggaaacttagaaagagaatgaccttttctatgaaacttaattttgtttcagacaataacattctgataagagctgagttttactcttttgttagcactgtcagttttctcaaccatagaatgagaatgataaaataaccatctcggctgggcacggtagctcactcctctaatcccagcactttgggaggccgaggtgggcggatcacctgaggttgagagttcgagaccagcctgaccaacaggaagaaaccctgtcgctactaaaaatacaaaattagccgggtgtggtggtgcacgcctgtaatcccaggtactcgggaggctgaggcaggagaatcacttgaacccaggaggtggaggttgcggtgagccgagatcgcgccattgcactccggcctgggcaacaagagcaaaactccatctcagaaacaaacaaaacaaaaaacaaaataaccatctcataaagttcttgtgaagagtaaataagatagtacatttaaagtacttaacccagcacctggcatacaacaaacacttcgttattttagatttactgtgagacttcgtccaaagttacctcttaggtatttattttcctctgttcctcccttcttatttttctccaaattgtcatcaaagataaatttctaaaacaaaaatctgattgtataactacctctttgataccatcttttcagctttgaaaacctttagtggtttcctgttgtctgaagaggaatgcctcaaatacatggatggtattcagcatcttcccacgtggccctagccttccttcccaaaccatcttctgccttgaccacccactgggttgcagcccaagtaggccacacagttttattttgctaccttggcttgttgtcttccttctgtctagaattcctgctgtgggcctcacctcctcatcaccccacaacctgaagaaacaactgtctatgggaaactcaaagatttctcttctttctaggcagaatttttggttcctgttcattcatctctttttagcatttattatgatatcaaaggtaattctatatgtcttgctctcttactagctcatgagttccttcagagcagaggccatagtttattcatcattgtgataacattgatgagtgccactagaactcagtaggcactctgtaaaaatttgttgaagtaatgtattaatatttggtttaattttattttgatttcagtgtgtttttattctaggtccttggccttgtccaaaacatgagtgttttccagtgtccaaaatgtaaacacaaaactcatatttttggtgctgatggtgcaaggaaactagcacagacccttggtcttgaagttctaggagacattcccttacaccttaatataagggaagcttcagatacaggccagccaattgtgttttcacagcctgaaagtgatgaggccaaagcttacttgaggattgctgtggaagtggtaagaagattgccatcaccttcagaatgattccccaagtgtcctggaaatttgcctggtactgacattaagaggacctttggaaatcagcaatgtggtgatggaacctacagaaataatagaaatcataactgttttatttctaaggaaagaatgtcttcatatttgacttgctaagctaaggttcacaaaactttgatgtatcaatgttaactgctatatttaggaattttttgaaagctggtgtgtaccacctgcaaagaactgcattttattttattgaattacccctttagaaatcacgagtttatgatgttacaagtccattttgggagagaactgtacactttttgcaggaccacagaattagtaatttaaatgatatactaaatttgtgtatgggcataagtattacgccttcccaccaggcaatttggactgtctttgaatcctgtctttggtactgtcttggacatgttcttaatatgaacctctgcttcttcatctggatcacactataccccagacttaatgaatttcagtctccaggagtggagcctgaacatatgtatttttagtaagaccatgatgatgttgatgatgattctggtaatcatggcagtaagaataatagctaacatttaacaagttaattataattgttcttccatttgtgtgagtgggtactattatctccattttacagataagtaatttgagatataatttgaaggcactcaaccttgagtgtcttgctgagggttactgtatctagcaggtgatggagcttggatttgaacttgagtaattcgatattagattcatctttttgtacaccaatgtgcttttgttaattaaaaaaagtcggtggtggctaggcgtggtggctcacgcctgtaatcccagcactttgggaggttgaggtgggtggatcatgaggtcaggagttcaagaccagcctgaccaacatggtgaaaccccgtctctactaaaaatacaaaaattagctgggtgtggtggcatacgcctgtaatcccagctactcgggaggctgaggcaggagaatcatttcaacccgggaggctgaggttgcagtgagtggagattgtaccactgcactccagcctggtcaatggagtgcgactccatctcaaaaaaaaaaaaaaaaaaaaagtcgggggagatgcaatatttagcatttcctcaaactttttttggccatgaaatccaccacccccctcctttttcagagcatttcatgaagttcacatttcaaataatacattttgaaaaacatttatcttgtctaattgaagctcaaagagatagagtcaatgacttttcaaagtcaggtagcagatagttttaaagctgcaagtactgataagtgtgagccattagttaattcgcatttataaagaagtggtctgtcacttttggcaaatgtcttgacatctgttgctctacagttgtcaactagaaaattaggcatagagtttcacattattataagcatgttttcacacaaaaacatgtacattgatgtttattgcaattttatgtgtaataaccaaaaacaacccagattttcttcattgggtaaatgattaaacaaaccatagtacattcataccgtgagtgctactcagcaataaaaaagaacaaactatgggtacaggcagcaacttataattccagagaattatgctggatgaaaaaagccaatttaaaaaggttttgtaccaaaagattccatttatataacgttcttgaagtgacataattatagaaatggagaacagattagtggtggctgtgttaaggagggggtgaggatgggagagaattgggcgtggctgtgagaaacatgagggatccttgtgatgatggaaatgttctgtatcacagctatcgatgtcagtatcccagttgtgatattgtgctatagttttgcaagatgttaccactgggggaaattgggtgaagggcacatggaatctctgtattatttcaactgcatgtaaatctacaattatctcaaaataaaaataaaagttaaaaaaaaaaaaaaaaaca

SEQ ID NO: 28579 - DNA, 3249 bp, Homo Sapiens
ggacgatgaggcggcgagggtgagtcggcgccggccgctaccgcacttcgggcgctcgtccctcatttctctgtggtgaatggcgacgggatggagcgcgaggggagcggcggcagcggcgggtcggccgggctcctgcagcagatcctgagcctgaaggttgtgccgcgggtgggcaacgggaccctgtgccccaactctacttccctctgctccttcccagagatgtggtatggtgtattcctgtgggcactggtgtcttctctcttctttcatgtccctgctggattactggccctcttcaccctcagacatcacaaatatggtgcagctattgctggagtttaccgagcagcagggaaggaaatgataccatttgaagccctcacactgggcactggacagacattttgcgtcttggtggtctcctttttacggattttagctactctatagcatacatccttatgctgagatgttgaacttaaactttatggaatcctccaaaagaatacattatggagtgtagtgttttcttagttcttcaaagggaagcaacttggatgaacaggaacatgaaggacaacacatctcagccttttcttcattttgaagctcctagaattgaagacttatgtggactcctattgttctcaaccaaaacaagtcttttggctttcttttttgtagatatttaatttaagcagttttcatgtgtacctttacccaagccaagtcaacagtgtctctggggtggcatcctttgcactgaaatttacagtattctgtgagatgtcgcatattttgaagaaaccgtggaagatactggtttatttcaaatgagcagagtatgttgtattaaaatcttatctaatcttgattaaaatttggcaaactcttttctttgctacatcttagtgacaataaatgccaaataggttttggttgagtatagttttgaaaacaaatttggtgaaataaagcaggaaaaaaaatttaagtataactcaagtagtggctttggttccactgtttataaataaaaagtagataacaatgaataatgtgacattttctggacaactgtcttgacttctgattaagatattttaagagatgtgaatttgttattttgtatgttttatcaaaataagctagctaatttagactttttagattttctgtaccacctttccctatcacttttaattctcttaattttatttcatttaattggaaacatacataccctattaaatggcttgagttggaaattttaagccagatttgtttggacattgaggcacacataagatactttaggcattctgtcatagtttttcttagtgactttggtatactaatgacccttgagaaactatagaagtgcatctgaaactagagttagtggttattgattttttagcttaatgtgtttacctagtggtaactcttcagcccacttttacagtattgggtatcaactcccagaaagtgcctaaagtttaatgttcagatatgtacccactctcccctttacatttttattcaaaagaatttatatctttaaagagatttaaatatcaagagtttttttaaaacttaattttagctatttaaatttttattctactgcctaactttctttttcattaaaaggcctgaaaactgtgactctttgagagggaaagaatcgcagaaattaagtatttaatgtgatcctttccacctaaactgttttgtatggaatacaatcagtgtggtggtagtggtggtggttatctgcaaaatagtttctggtgattaaatctgactttttttttttttttcttttaaatgagacggagcctcactgtgttgcccaggctggagtgcagtggtgcaatctcagctcactccagcctctgccacccgggttcaagcgattctcctgcctcagtttcctgagtagctgggattacaggcacctgccaccgtgcccggctaatttttgtatttttagtggagataggtttcaccgtcttgcccaggctggtcttgaactcctgaccttgtgatccacccgcctcggcctcccaaggtgctgggatcacaggcgtgagccaccgcgcctggccataaatctgacatctttaaaggaaagttttcattgtgagattaaggcttaacagcccatgaggtcatatacacatgaacgtatctattccatttaaagcaatacacactctggcttctgattaaaaatagccaggaggagagtctctgaatctactgtgattctggagtctgcccaatttggaaaaaaaaaaagaaatgcaagagagggagggaggcagcctcctgaccataaaagctgatttcttgatttttttttcttttttttttgaaatggagtcttgctctgtctccaaggctggagtgcagtggcatggtctcagctcactgcagcctccgtttcctgggttcaagtgattgtcctgccttggccgctgagtagctaggattactggcacccgccacaaggcccagctaatttttgtatttttagtagagacagggtttgattatgttggacaggctggtctcaaactcctgacttcaagtgatccacccgcctcggcctcccaacgtgatgggactatagacatgagccatcgtgcttggccttcttgattcttgaatacggggttttgaggtgaaagcatttcatgaaaacttaagttcatacacaagagcatcatgaatattctaaaagaggtatctgtgctttttttgtgaccacaaaatattacttcttatgaaatgtttacactaggtgaggaaaagttcattaattacctttaaaccgttccttattttttttaagattttaaattgtattttggcttttgcctccagtatcctttctggttgctctggtttgaattaagttcctattatgctgcagcacatatcaaccttccctaagtaaccatttcctggaatgtgaagcatcggtgccattagcagaccatatgcagaaatgtcgtgtacttgcatttcttttttgtgcactctataaggctggttgtgactcagatcagcttaactttttatattatgttatttcactaactgctacagtcaaaatgatcaaatctttgtacaatagaaaattatttaaattttatttttctactgacatttctaattctagtgtaaatgtttatcaataaaaaattactttctaaaaaaaaaaaaaaaaaaaca

SEQ ID NO: 28580 - DNA, 3355 bp, Homo Sapiens
gttgtttgcttagttgtgacccacatcccttcctaccaccacccaccaagtagatccagagatttagcaaacgaaacaagccaggccactgaggcaggccaccctctgccctcatgcttctctttctgtctggcagctggttaaaggtgactgattacatcgcagagaagaatctacctgtgttccagccgggagtcaaggtgggctcaagacctgggctgggaaggggtgtctggcagacgggatactttttgtcgtgtctctgggaaaaagtggacaagcatccctctgggatcagagagcaaaggatgcatgtggccatcaggacacaggagacaggcccagaccaagggtgtttggggaagagtgggggaaggctgctctgctctgaagtgagctttctctgctatctctcctggcttcccagctccgggacaaggagcggcagattatcaaggagcgttttaagggcttcaatgatggcctcgaagaactgtgcaaaatccagaaggcctgggctattccagacacagagcagagggacaggattcgccaggcccagaagaccattgtcaaggagacctacggggcctttctacagaagtttggcagcgtgcccttcaccaagaacccggagaagtacatcaagtacggggtggagcaggtgggcgacatgatcgatcgccttttcgacacctctgcctgagcctgctgctagccctgcctggttccaccagactggcgtgtcattggacagataaaccagtgttagcttgcctctgggctgggtgagcttgaagtcctctgggacagagacctgtctccacgcctccgggagctgtgtccctgagccccctagtcctggctcctgctttttccccacagcccgtgttcccagccgaaccagcactctcccggaagcctggggtccctccacaccttggcttttatgaccctgatggcttctgaaacaggaaaagagagaaggaagacagaggcctgtgcccactgctgctccatgtgtaccaagagcagcagggcagaagggccctccctccagcctaggtcagaggtggggacagagaactcccctacagcccagagatgtggcagggctcagagaagcagccagagctcctggaggaaaggcagtcgggactgaccccctctcttaaaacacattcccgcccgcccacaggcctgaggtctgggacctttccctcccaggagtcccctaggtggctgggggaggcaggctcactggccattttccctagagtccagcacactgcaggaggcgttcggaggaggagttccgccccaccctctacagccttcctcaggcccctgtctctggtccccagcctcagtgcctcttggcccagggccaggcagtcgtggttgcagaaggagcaattaggctgcctgcctgtgggctgggagacagggacaatggggaaaagttaaggagcaaaatgggggttggaagcaaaaaatagggccccacctatttaggacgagattgaagactgacccttgaggcacacttgcactggagatgggtttatttcacgctctgtgcttgtgtgctagcggagggagagctcagggtggcttaatccagaggccctgtcatggcccgcccccagccatgggaaagcaaacttcatcctaaggtgtgcagcccaggccctgcccctttacagtctaggccgcctgccatggggtgcagcctctccaggggctgcgtcagacttgcacgctgcccacatccagattcctgcaaagacgaattgggtgcacagcaccccaaccacatacacgaggaagaagatgcggtcagcagtctcaggccagcttctctgtgacccctttactcctctggagggctctgtggggagagatacagggaaaggagctgttcttcaaggtcccctcaacatgagcggaagagcgaaccccaggggtcatcagcctgtatcgcttcctttcttagattctcagctgatgaaaatttgggtctggcccatttcaggccatcttcagttgaagaaacaccctcttaggctgtgcaaggcatgggttatcaggggattgaggtcacctgggacttcagggaggctcagcttgctccctgccccagacctgtttcttctaagggaggaggacatggtggagaccagggacaggagagccagcagggtggatgcaaggggcctctacccacacctggacctccgtgccctcaccccagccctaggtgtgcacctaggcctcattccttaccccccagcccctgcccaccttcagcaggatgaggccctgggttgccgtgctctcgctgttcccctctcggggctgggctggggccgctcttggccccaaggttgccccgggccagcagcccagccagcagcacagtctctatggtgctgaggaagagcagcagcagcaggatggtgaagtagtaaactgggggaggcagggcacagggagatgctcaggggccagtccctgtgtctctggtgcccagcgagctgagcaccagtgggtgaccggggagaaacagggcagactgggtaagggagcagggcttactgagcagtgggttgcaggaggaggagctgggcagggcctgcaccagggaggagtggaggacgaggtaactcagcagcaatgtcaccttgtagcctatgcgctcaatggcccggaggggcagcaaccccccgcacacgtcagccaacagcagtgcctctgcatgcaccaagagagcgatgatggacttgagcgccgtgttcttcagcctcagctggaaggggaaaagtcagggccttcccggcgggggggaaggaggtgggcatcgggggcatggggcctggcctctggccgtgcatcctcactcccacccgcctccagcagccctctgtcggcctcctcgcgacttgactcaccgtcacctggaagcagggcaccagctgctggggtgggacttgggtcttcagatcataaactacgtattccctcttgacactcacaatctcgttcaccacgtgggcctggaactctaactccatcgctgaggggtgggaatgagaactatgaaccaggaaggagagatcccagctgccaagtctgggggtagcagactggagcccaggggtgatggagacttttgatggcttttggcagggacagacttggacacaaaaccgatccatagaagggcttcccaaaccttgttttgcaacatcccaaattgtctccagttgaaggaaggcctttatcagattcatagatgagctttcattgtaaaaataaatgtactttgcaccacttaaaaaaaaaaaaaaaaaca

SEQ ID NO: 28581 - DNA, 3119 bp, Homo Sapiens
gagcataaagttgggagtgacaccagagccttctgcaagatgcttctgattctgctgtcagtggccctgctggccttcagctcagctcaggacttagatgaagatgtcagccaagaagacgttcccttggtaatatcagatggaggagactctgagcagttcatagatgaggagcgtcagggaccacctttgggaggacagcaatctcaaccctctgctggtgatgggaaccagaatgatggccctcagcagggaccaccccaacaaggaggccagcagcaacaaggtccaccacctcctcagggaaagccacaaggaccaccccaacagggaggccatccccctccccctcaaggaaggccatcagcaaggtcctcccccacctcctcctggaaagccccagggaccacctccccaagggggccgcccacaaggacctccacaggggcagtctcctcagtaatctaggattcaatgacaggaagtgaataagaagatgacagtgtttcaaatgccttgaaacataatgtgatcatgctctaacttcaatataccaataaaataatcagcttgcaatttctgattatagcatctccttctgagtgtttgggactctggaatctgagacccatgttcacattgtaagaacatccaggaccccttctccttgatgtttccagcaagcttctttcctcctttatccttattaagtcatctgcctggggaaggagttccactgtttctttccttctctgtcttcttagctcgaatttaaattgcacaattattttcaggtcatttcctgatagtctagccagcttatgaatgtaagcaaaacaggaccaatgaaagaaagtcccagaagctgagagaaactttaacaagtttgagagtaacttattttgttttctaggaaagtgagtatggttctatgcctgtattccccagaagccactagacctattttcccctattttatcactgatcagttctgtccctgcctatgattcttaccattcttaagaaaacctgaatggatttcatcaaggcggcagcataatttgaagggcaattgcgtgtgaaaattgatgtgacttgatttacacaatagtcagaaaacattttagaaattgatgactttataatgcaaccaggagtattgaaaaaaaagtaagcaatgagctcaaataattaaaaaagagagacaaaatacacttgggagaacagaaataagaattaatgaaaatttaaaagattaaatgaatgagaagaaatgattcataaattttgaactaacagtaataacttcttgaaaatccaataaaattggcaaaagattgtgaaaattctggaagaataagggaaacagataatcttcagagtaatcaggtaaagcttaaacaagtgttttaaaagatgagtttttcctacattctgaaaagcaaacatgaaaaactgaacacagtttttacagatatacaatatggagtgacttatatacaaaatgaccttaaaaatatattaaactcattatagtagttaatatctaagtaaaatatgatgaaatttaatagagaattcactcctcccaaaagcaccttcatggaagattcctcattaacaggcagtcctttagtatgctgatttatacaaaatgctgaaaagaagagaaataccccaagttcttgaaaaaaattttttgatatgactactctaacagtaataactataaatctcactttaaataatttaaaacaaattaaagtgatatatgagttaaatgaccaagcagacttgattctaggaatgttaaggaatgttcattatttgttttggataatgaagtcagcagaggaaaaaaaatatgaccatctcaaaagatgccaacgttgtctttgataatatttaatatattttttaaaaaacaattcttgtaaaatacttttttgattagccttctgaccatgattaaaatggtgtacctcaaagtagctgctaaccttatgtgtatctgcaacaccctgaaaaattatctaataaaaaggcacaaagaaaaagcttgtcaatgttgtggataattagaaagtgaataattttatttaatattagataaacaagcacataacagagatacatatattcaaatggaaggagtaaaattaccaccacatgcagatctgtttttctgtccagaaaataacaagagattctactcaggtaaaaaaggaaaggaaggaaaaccattgtaattaaaataaaatttaatacaatagccgtttattaattcaacttctaaagaatctttgtgattacacaatgaccagctagtaaatataataagaaaatgattattcacaaaggaaccaaaaggcctagtcttcgaatttttaatgccattatgatagcaagcatctgattattttactctaagttatttccacttctgattttaagaacagcttctttcccagggatgggttccccctagtgatgtattctcttcaccacaagagtttgcagctctggctttctttctgctcatctgtaaagataactacagctcctctataaaccatctcaccattattaccgaaatcagacaaattctggagatagtcaaagctgtgaggattcgaagatctctttcacatcttgacccagtcaattccgttcaccagtgttatgaatccattccccaaaattccaattaggaattatatatttattattataatgaggatactatacaaggcatttagcatggctgcaaagagagagctccaatgtctaaatgcaacgctgacaatttcttcatctatcacatgtacctgttatacatacttattaattggatgtgcagttaatttcttcctttaaaaaaaaaaactataggctcaatatgaaagtagaaagcactaaggtgtactaatgaatgggcacatagcttttttcacaaaaagattattttgccccagacagctatctgcattctgatccagatactgtatgttcttaacataaagtgaaatttctcatacttcatgatgaaagaaaaaactgaattctcattgttaataaacaaataaagacaattctctgcaaaaaaaaaaaaaaaaaca

SEQ ID NO: 28582 - DNA, 3097 bp, Homo Sapiens
gtcacgtctgaggcatacgtcagtgggatgctcttttgcctgggtatatttctctccttttacctgctgaccgtcctcctggcctgctgggagaactggaggcagaagaagaagaccctgctggtggccattgaccgagcctgcccagaaagcggtcaccctcgagtcctggctgattcttttcctggcagttccccttatgagggttacaactatggctcctttgagaatgtttctggatctaccgatggtctggttgacagcgctggcactggggacctctcttacggttaccagggccgctcctttgaacctgtaggtactcggccccgagtggactccatgagctctgtggaggaggatgactacgacacattgaccgacatcgattccgacaagaatgtcattcgcaccaagcaatacctctatgtggctgacctggcacggaaggacaagcgtgttctgcggaaaaagtaccagatctacttctgggacattgccaccattgctgtcttctatgcccttcctgtggtgcagctggtgatcacctaccagacggtggtgaatgtcacagggaatcaggacatctgctactacaacttcctctgcgcccacccactgggcaatctcagcgccttcaacaacatcctcagcaacctggggtacatcctgctggggctgcttttcctgctcatcatcctgcaacgggagatcaaccacaaccgggccctgctgcgcaatgacctctgtgccctggaatgtgggatccccaaacgctttgggcttttctacgccatgggcacagccctgatgatggaggggctgctcagtgcttgctatcatgtgtgccccaactataccaatttccagtttgacacatcgttcatgtacatgatcgccggactctgcatgctgaagctctaccagaagcggcacccggacatcaacgccagcgcctacagtgcctacgcctgcctggccattgtcatcttcttctctgtgctgggcgtggtctttggcaaagggaacacggcgttctggatcgtcttctccatcattcacatcatcgccaccctgctcctcagcacgcagctctattacatgggccggtggaaactggactcggggatcttccgccgcatcctccacgtgctctacacagactgcatccggcagtgcagcgggccgctctacgtggaccgcatggtgctgctggtcatgggcaacgtcatcaactggtcgctggctgcctatgggcttatcatgcgccccaatgatttcgcttcctacttgttggccattggcatctgcaacctgctcctttacttcgccttctacatcatcatgaagctccggagtggggagaggatcaagctcatccccctgctctgcatcgtttgcacctccgtggtctggggcttcgcgctcttcttcttcttccagggactcagcacctggcagaaaacccctgcagagtcgagggagcacaaccgggactgcatcctcctcgacttctttgacgaccacgacatctggcacttcctctcctccatcgccatgttcgggtccttcctggtgttgctgacactggatgacgacctggatactgtgcagcgggacaagatctatgtcttctagcaggagctgggcccttcgcttcacctcaaggggccctgagctcctttgtgtcatagaccggtcactctgtcgtgctgtggggatgagtcccagcaccgctgcccagtactggatggcagcaggacagccaggtctagcttaggcttggcctgggacagccatggggtggcatggaaccttgcagctgccctctgccgaggagcaggcctgctcccctggaacccccagatgttggccaaattgctgctttcttctcagtgttggggccttccatgggcccctgtcctttggctctccatttgtccctttgcaagaggaaggatggaagggacaccctccccatttcatgccttgcattttgcccgtcctcctccccacaatgccccagcctgggacctaaggcctctttttcctcccatactcccactccagggcctagtctggggcctgaatctctgtcctgtatcagggccccagttctctttgggctgtccctggctgccatcactgcccattccagtcagccaggatggatgggggtatgagattttgggggttggccagctggtgccagacttttggtgctaaggcctgcaaggggcctggggcagtgcgtattctcttccctctgacctgtgctcagggctggctctttagcaatgcgctcagcccaatttgagaaccgccttctgattcaagaggctgaattcagaggtcacctcttcatcccatcagctcccagactgatgccagcaccaggactggagggagaagcgcctcaccccttcccttccttctttccaggcccttagtcttgccaaaccccagctggtggcctttcagtgccattgacactgcccaagaatgtccaggggcaaaggagggatgatacagagttcagcccgttctgcctccatagctgtgggcaccccagtgcctaccttagaaaggggcttcaggaagggatgtgctgtttccctctacgtgcccagtcctagcctcgctctaggacccagggctggcttctaagtttccgtccagtcttcaggcaagttctgtgttagtcatgcacacacatacctatgaaaccttggagtttacaaagaattgccccagctctgggcaccctggccaccctggtccttggatccccttcgtcccacctggtccaccccagatgctgaggatgggggagctcaggcggggcctctgctttggggatgggaatgtgtttttctcccaaacttgtttttatagctctgcttgaagggctgggagatgaggtgggtctggatcttttctcagagcgtctccatgctatggttgcatttccgttttctatgaatgaatttgcattcaataaacaaccagactcagttaaaaaaaaaaaaaaaaaaaaaaaaaaaaaaaaaaaaaaaaaaaaaaaaaaaaaaaaaagaaaaaaaaaaaaaaaaaaaca

SEQ ID NO: 28583 - DNA, 2165 bp, Homo Sapiens
cggccgacatgtttttttttttttttttttagcgatgctactgtttaattgcaggaggtgggggggtgtggtaatgggcctttgtgggataaatttggtttccctcctcaggtcagaacctgctgtcttcttttgctgctttacatttctttgcattggcaacagctaccaaagctctgctcagaggaaggggagaagtacaggcagggagaggcacttgacacctgcaaacagggcaaggctcacagctccctttctgcttacacaaaaaggggcctggggatgctggctccactactgtctatttgtgattgttatggtgggagatggggacttcagctgcctcagcaacaacgtggcaagagttccagagatcagggctctctagggtcctgagctccaggatcaggtctggtctgacacacagcagtgtgagcaggacaggtccccataccccctagctgctagctgctttcttgacatctctaagatgtctgatttctaatgaaaatgggatggcaacaagttgttctcaatttacttccttttaatgttctaacaagttattgctgaggtggctgaagactatggtctgcagcagattaaatcatggaagtgttaggaccatgcatgagaaagctggcaaaggaacaaggaacagagtctatgggagacatcatgattgcagaggtcatcctcattcataactcaagcatcaggaaaaaaaataataataaaataaaaaaaaagatgctgcccgaaatagcatgcacgatgaagtgccaggatgattctcccacccaaccccaccccaccctctgcccctgtagcagctcagcccccagagacctcctgggagaaaactgattcagatttcagaggccatgaggattcaaaggccatgaagattcaaaaggctgtgaactagaatcttctagctccttatggtatattttctcttggatttgacaaaaaggaaaacaatggaattggttgctgccccaaacctacaggtccacacagttgactatgtcttaaaagaaaaccaggaacccgatgacacaaacaaaaaaataaatgctggagacacagattaaaggtaggcaggacaaatccagagtacaaaggtgatggtgactagaggaacaaggcaagatggtttgccctgatttttaaggtctgactcgggtctgtgtgtcaaagcaggctcccatggcacctgacgtgacagccagcaccacggccacaggagaaaactctcagccatggggagctccaggcaaagcaggagggaaggaaaaaaaaaacacataaaaatagcctttatgaatctttctcaatcagtgaacataatggctcaggaactccaataagtaagaaactgccacaagcaaaacaaaaatggagtaagctatgaagagaaggcaaccaaacaatcacgattctcttcccgcaataaggtctagaaacaaaaataacaaaaagcctgggaagagcatcccaaataacaggcatgaggggttatttgggaaggaggagagggggaaagcagtaaatagaaataagacaacacagttgaaagagagataacatttaaaagaaatcaaacaagggaaggctggatttaaaatcagaagcatacccccatttaaacatatggccagaatatcaaatcaaaaggtcacaaatgttcacttcctcctccaccctcttacatattggatcttcaattgcaatagggagtgtaagatggacattttagagacgtagttgcatcagcagaagcaaacccatcttatacaaatgggttttggggataggaaaaggctgctaaaaattcacaagtcaccattccccagaagcaatgaatagccgtagaagaccaaggaagatcaacaagtttccaaagtgctaaagccagagatttggcccttccaaaataccaccaggacgcctggacccgtgggctctccgcatgtcaccactgactgccaggatgctgctgcacctcccttccttgagacacaacagagagacagtgagtcacccaagactgggatcatcagaggctcctcatgcttgctacagagaagcaacgggctgattcctaaagccctgggtgcaggaagagagcaagttctaaaaaaaaaaaaaaaaaaaaaaga

SEQ ID NO: 28584 - DNA, 2330 bp, Homo Sapiens
ggatgataccagagagcaagagagaggaactggggtttgcgaaccttgtggctttgtctgtttcctgtttcagcaaggctgctgtgcaaaaagaaagacggtaccaagaagggacgtgttaatggggcccagacctatggattgaaagcgtgtgctttacccatctgctgtcttgctccatctgagaccagagccaagatctgcccaggactggaatgctttcccgagtggcttgagttggagcctgggactaggagcagccttattgaggtacaattcatgtgcttgtgggtttggatggcacaatctgtgtctgggctaaggaaagcagacttggcaccaacattaaccctgacagatccaggcatctattccaggaactggaagccaagcgcaacaggtgcttggaggtcatcatgatcagcccagaccccaggccctcccctggcttggcccggtgggctgagagctatggggccaagtgtgagcgcaggcaagagatccgtgaaagccgccgctgccgtcccaatgtgaccacttgccgccaggtggggaagacgctgaggatccaacagagagagcagctccagagagctcgactgcagcagttcttcaggaggaggaacctggagctagaggagaagggcaaagcgcagcatccccaggccagggagcaagggccctccaggcggccaggacaggtgactgtcctcaaggaacccttgtcttgtgccagaaggatttcttctcccagagagcaggtgacaggcaccagctctgaagtctttccagcccagcatcctcctccctcaggcatctgcagggatctgtctgaccacctctcctcacaggctgggggccttcctccacaggacactcccatcaagaagccacccaaacaccaccgtggtactcagacaaaggcagaaggaccaacaattaagaacgatgccagtcagcaaaccaattacggagttgcagttctggataaggaaatcatccagctttctgattacctcaaagaggccctacaaagggagctggtcctaaaacagaaaatggtgattctccaagacctactgtccactctgattcaggcctctgacagctcttggaagggacagcttaatgaagacaaactgaaggggaaactgagatccttagaaaaccagctatacacctgtacccagaaatactccccttggggaatgaaaaaagtactactggagatggaagaccagaaaaacagctatgagcagaaggccaaggagtcactgcagaaagtgctggaggagaaaatgaatgcagagcagcaactacagagcacacagcgatccctggccctggcagagcagaagtgtgaagagtggaggagccagtatgaggctctgaaggaggactggaggacccttgggacccagcacagggagctggagagccaactccacgtgcttcagtccaaactgcagggagcagatagcagggacttacagatgaaccaggccctgcgatttttggaaaatgagcaccagcaactgcaggccaagattgaatgcctgcaaggggacagagacctgtgcagcttggatacccaggacctacaagatcaactaaaaaggtcagaggcagagaaactcaccctggtgaccagagtacagcagttgcagggtttgcttcaaaatcaatccttacagcttcaagaacaggagaaactcttaacaaagaaagatcaggctttgcccgtgtggagtccaaagtccttccctaacgaagtggagcctgagggtacagggaaggagaaagactgggatctcagagaccagctgcaaaagaagactttgcagctccaggccaaggaaaaggagtgcagagaactgcattcagaattagacaacctcagtgacgagtatctctcctgcctgcgtaagctgcagcactgtcgagaagagctgaaccagagccagcagctgcctcccagaaggcaatgtgggcgatggctcccagtgctgatggtggtgattgctgcagcactggcagtgttcctggccaataaagacaacctgatgatctgaataatttgtgacaactgccttgggtgaaaatcagaagcaagcaactcagcgaaaaactcagaaggtttgggtacattacagcttgggttttccaactgacttaggatttctgactttttattaatttcttaacctactgtaaataaacttcacctgaccagattgttcctcaaaaaaaaaaaaaaaaaaaaaagaaaaaaaaaaaaaaaaaaaaaaaaaaaaaaaaaaaaaaaaaaaaaaaaaaaaaaaaaaaaaaac

SEQ ID NO: 28585 - DNA, 4501 bp, Homo Sapiens
ggccattatggtcctgaacttctagccaccaggcaagatcttaagtctgtagaagagaagctttctctagcacaggaggacttgatttcaaacagaaatcaaattggaaatcaaaataaattgattcaagaactgaagactgccaaggctacattggagcaggattcagcaaagaaagaacagcaattgcaggagcgatgtaaagcactacaagacattcagaaagaaaagtcactgaaagaaaaagaactggtaaatgagaagtctaaattggcagagatagaagaaattaaatgtagacaagaagagaaatcagcagatactaaaagaccaggtgaaaaaggaagaagaggagctgaagaaagaatttattgagaaagaagctaagttgcattccgaaataaaagaaaaggaagtaggaatgaagaagcatgaagaaaatgaggctaaacttaccatgcagattacagcattaaatgaaaacttaggcactgtgaagaaggagtggcaatctagtcaacggagagttagtgagcttgagaaacaaacggatgacttacggggtgaaattgcagtattagaagcaacggttcagaataatcaagatgaaaggagagcactactggaaagatgtcttaaaggagaaggtgaaatagaaaagcttcaaaccaaagtattagaattgcaaagaaagctggataatacaactgcagcagtgcaggagctgggcagagaaaaccaatcacttcagatcaaacatacacaagcgttgaatagaaagtgggccgaagacaatgaagtacaaaactgtatggcctgtgggaaaggcttttcagtaacagtgagacggcatcactgccgacagtgtggaaatatcttctgtgctgaatgttcagccaaaaatgccttaactccttcctccaagaagcctgttcgtgtctgtgatgcatgtttcaatgacttgcaaggataatgggttatcacaacttcagagtaatattacactaacattagatttttaataaatgtacttaatagaggtcttggactactatttggtttggacactggttgcaatactagaccaaataggaattagtatattttggaatgttatggatatcaagtaaaactcttctatttttgtgagacttgggcttatcatctttcattacttttttcccatttagcccctggaatagctttcatgccaagtttagaattagccaatgaaatgtaaataaactttggacagaaaatagcaatgtatttttttaatataatttcattattcacaaatgaagaatgcaattccatagcttacttctttctcctaaatttaatgtacaaaaatgtacatggatgatattatcacttgttgctgtttttgttgcacaatagcacattaattatattaaatattctctttgtgaagttatgcacagaactgtaacactttcctctgcctttttctcttatatgtgggttcatggttcagttgcattgttatgttatgaatttactacttgggtgttctaaacacagtttatcttaaaatatgtagtaatatgaattcaaaaatggtttttgttttaacaatattaattaaattttcttgggtggattttataaaaacctctgtaaaatcaatttgtttacttatagttatctggggttgtattgcaaagaatagggttaatttttctttttgtctttttctgtctctttcttaaactcccacgcattgtccatttagaatcttagaaagcttcttaccctcgctgtcagttggaggatgaataataaacattgtataatgttcttattctcggtttcttgtaagtgggaagtcttttgagatcagccttcatatcatacccttattttgtctctctagcatcttcaggaacctgagtttgctttttacatagatctgattttttcctttatttggtttaacattttcaagcatagatcagcttcatgtatttgttttataattttgcatcttaaagctagtaactaatattgctgtggtcttattggtgaaaacaaaatataaaatgataagaagacattaaatattttactttctatttcttaccctattgggaagaatttttaaaagttgtaaaattgacttaaagttaaaatggttctgaatttggtgttccatgtcaactgttcccagttttaattttaactttgcaaaaataatgttgtgaaattccctttaagtaactaacacctagaaatagagtatcaccaaaaacaaatgtatttaggaatcccagttacaataaaaactgaaacagcatggctaagcatcttaaggataattaagaaattagcttatttgtatgctgaacaatggaatcgaactttaatttagcatagtcttattaatttgaaaaattgtaaaacatctcaagagagaagttattaatattggtttattaatctttctagagaagaagtgtagttatacattcattcagtgcaatcattttataacagtagttaatatttcatttataatagttcttaatatacatttgctttcaaatattctgaaatgaaattatattcatgctatacctacagtgtatgtaaactaaagagatcactacatatttgtttaattatttaaaaaaaaaatttaagtaaaccctgttgtcattagctattaagaacattgattaagtccctggacttggataaacatatatccttgaacatatataatgaagaaatacagtggctctttattaaaaataatagttggataatataaactgaactatttatgcatttttatatacttataaatccttccaaatagttttaattctatccttttacatataaataacttaataagtgtgctggaaaaacacagatgttcacagcaccactgtttttttttttttttttttgagataataaattccatgagaaatctgggtttgaatatttgtttactttgtctcctaattgaacaccactccaggccttctgtctgtctcccctttacccccaaaatattcacaaaaaaaattttaagacaacaagtaaccatatataggtgtttgaatgattttctcatttttatctaatttcatttcataagtcccgagtaatttacctaccataggctactatattgataatataaatgaaaccgaacattttttgctactaactctccccaatttaatgtgttttcgaaataaaaatttaaatttttttccttttaattaaaaagtcatctttgaagtccttattggctgtacattttacatgtttgctggtactattattttgtcagtgagttaaagctggcatgtacagctcttggctttaatgaaaagcacattgacataatgttagtaaattccaaaccccggcacagaatgtgagttaaaattaagtcttgctgggttagtgtacaataaactatacctacagacttttttttaatagaaagaagacaaagctgctggtataggatttgttcctttgaagaaaaaatgagggaaacaaacacaaaaacctcaatgcagtgtataaataacattttgttcaactacctcttaatgtggaattatctactttaatagtttcctgacagtaatgttaaatagtaactgccaaatttgttattttcccatctctcttaaaaaagtctttatgattattttatatagttttgagaactttaaagccacttttttttaaccttacatttgcataaaaatgtttagcttttaagtagagagcaaattatgatcatatattttgatattcatgacctgtttgactataggagtttttttaaaaaaatgcactttggctataaaaccatggatgatttgatccataagatttaaatgtgccaccattatagtattcctagacatgagcttgatgaatggtattctgtaattataacgtgccacacattattgtgtcttaattgcccttagcctgaattttaatgatcaatttgttattgttgcagatgtgaatattgtgcataaacttactaaatttatgtaaaattgtataaaatagaattagaagtcactaagttctttctgtgtagaagtaataaatttattgtaacacaatgcagttgtgtatatgacattctgtaattccttgaaccggatcatatattcataagttctgtagatacttatgcatgaacattttctcatttagtttttgggttcattatttgtattgtgtttactacttgtgatcatgtagttgtgccttactttgtgagaaaggttagctcagtaaatactgcaatttctaaactcagtgattggaaggttattaattataaatgtaactgataaagtacgtgacagcatttaaatctgtataaagaacaatggaaggatccttattgaattgttgctttttttttaatatgtttaaatattatattaaaaacatttctttctaaaccaaaaaaaaaaaaaaaaaaaca

SEQ ID NO: 28586 - DNA, 3869 bp, Homo Sapiens
ggttgtgagctgcggcagagactggtggctggaggagacgccggcgctggagagtgcgctgcgccgcccgccgctgagggaccgcggggttagccactgctggctgcttccagtgttcgccgagaggtaccgggggtgacagctccgggaccggccgaaaggcgaggaaccggaagcccgggggagtgcgaccgcctcaaatccagccttcttgtttggtgggacgaccgtcggttctgtccgggaggaatgacggggtcaaggtgtggaaattaaaagaacacacatattttgactggggctttgatcaaccaaatgctaaaaagccacataaagaagatccctaatagtcatttctcaacaattatatagtcaactgatgtaacaatggtactaatattgggacgcagactaaacagagaggatcttggggtgcgtgattccccagcaactaagcgaaaagtttttgaaatggaccccaaatctctgacaggtcatgagttttttgacttctcttccggatcatcccatgccgaaaacatactccagatatttaatgaatttcgtgatagccgcttattcacagatgttatcatttgtgtggaaggaaaagaatttccttgccatagagctgtgctctcagcctgtagcagctacttcagagctatgttttgtaatgaccacagggaaagccgagaaatgttggttgagatcaatggtattttagctgaagctatggaatgttttttgcagtatgtttatactggaaaggtgaagatcactacagagaatgtacagtatctctttgagacatcaagcctctttcagattagtgttctccgtgatgcatgtgccaagttcttggaggagcaacttgatccttgtaattgcttaggaatccagcgctttgctgatacccattcactcaaaacactcttcacaaaatgcaaaaattttgcgttacagacttttgaggatgtatcccagcacgaagaatttcttgagcttgacaaagatgaacttattgattatatttgtagtgatgaacttgttattggtaaagaggagatggtttttgaagccgtcatgcgttgggtctatcgtgccgttgatctgagaagaccactgttacacgagctcctgacacatgtgagactccctctgttgcatcccaactactttgttcaaacagttgaagtggaccaattgatccagaattctcctgagtgttatcagttgttgcatgaagcaagacggtaccacatacttgggaatgaaatgatgtccccaaggactaggccacgcaggtccactggctattctgaggtgatagttgtcgttggaggatgtgagcgagttggaggatttaatcttccatacactgagtgctacgatcctgtaacaggagaatggaagtctttggctaagcttccagaatttaccaaatcagagtatgcagtctgtgctctaaggaatgacattcttgtttcaggtggaagaatcaacagccgtgatgtctggatttataactcacagttaaatatttggatcagagttgcctctctcaataaaggcagatggcgtcacaaaatggctgtcctccttggtaaagtatatgttgtcggtggctatgatgggcaaaacagacttagcagcgtagaatgttatgattccttttcaaatcgatggactgaagttgctccccttaaggaagccgtgagttctcctgcagtgactagctgtgtaggcaaactgtttgtgattggtggaggacctgatgataatacttgttctgataaggttcaatcttatgatccagaaaccaattcttggctacttcgtgcagctatcccaattgccaaaaggtgtataacagctgtatccctaaacaacctgatctatgttgccggtggactgaccaaggcaatatactgttacgatccagttgaagattactggatgcacgtacagaatacattcagccgtcaggaaaactgtggtatgtctgtgtgtaatggtaaaatatatatcctgggcggaagacgggaaaatggagaagccacagacactattctctgttatgatcctgcaacaagtatcatcacaggggtagctgcaatgcccaggccagtgtcctatcatggctgtgtgactattcatagatacaatgagaaatgctttaaactctgaagacaggatacctcaccgaagaagccacactgatccaagatgggaggttttaaaaactctacagtgggaacttcacatatctcctttgtgccatatgcaaaaaatagtaaaaataataatttggtgcctttctcctcaaaatatcaatctttcaaactataataaagcctttcctataattgaaaaaaaaaacttttttgttaaaggtaatggtggttgttacttggcctttgaagagtgtacctttgtaagtatttgtaagaagtctatgtgaattaggaaatgtctgtctgcataccttttaggagcgtgtgaatggtgtcttcacttattatgtatgtttatctgtatgtatattccttattttgtcatatatgtagagaaaattgcatgacttgaggcatcatttaggttgaagaagttaatgcttaggatgcattctaggagaaaaaatcagttttaaaaacctttgttgttaacaaagtatatccagattggttaattttattgaagggtttttttctgtaattgataaaaatgtaatgacaacaattcaggcatcataaaatactgaactattgtgactttattcttagaattgctgtcttacattaaacatgtttttagggggaagttaggtaggagatagaaaaataagtgcccctacaagggggattaaaattacaagttaattcctaagagaaaaatggaatggcctttgaaggaaaaatgacccactatggctctcaaagtttttatgcatcatctcttcaatcctctaagaaagcctcttttcttaacttgataaagcagtggaaacccattttgcaatattgttttgtgaaaaacagggacagacagccaggtacagagactcacacctgtactcccaactactcagcaggctggggcaggaggattgcttgagcccaggagtctgaggctacagtgagctatgaacgcacacggcaccctagcctgggcaacaggttgcgacactgtctcaagagaaaagaaaaagaaaaatagggataggttttccttcctagcccagtagagtttgacctcattagtatggtgctttgggtgaggacctcttccttgattatcccactttctagtgaacagctaaaattcctgagagtctctactgttaaggtacctttaataggataaagcagggaccacctatctcagtgggtccatttttcttttaaaattagttatctgaaaaaacttagcagtagttcccatctttaaggtaagtctttcatttggtccccattgtgtaaaatactaatcaacattttcaagcttctgtacaacagactgcttttgtctagatttctcaactccactttataaagcttatcagttttcagagaggaatgtgaattttttttctaatgcaaataaatggatatggcaggaactacagcataagtgattattgtgattctgggtggacggatataatttacaacatttagggatgttctaggtagcctgctgtagtttgacttccagtcactgttgtctttcacattataatttgtatatttcttgtgatagaagggatgatgcaaatatgtaattaaagtgtcaccagatttctgttaaaaccaaggttgaaataaaaagcctaacattggtaagctaaaaaaaaaaaaaaaaaaaca

SEQ ID NO: 28587 - DNA, 4340 bp, Homo Sapiens
gaggtgcgggaagtctgaagccggtaaacatggccgtcaccgacagcctcagccgggctgcgactgtcttggcaactgtgttgctcttgtccttcggcagcgtggccgctagtcatatcgaggtaactgtggagaattttttacgggtattaactgggaggatcccacctagtactcctcggtcaaaacgtcttctttctgatgacagaagcaatattctaatttatatgacagggcatggtggaaatggtttcttaaaatttcaagattctgaagaaattaccaacatagaactcgcggatgcttttgaacaaatgtggcagaaaagacgctacaatgagctactgtttattattgatacttgccaaggagcatccatgtatgaacgattttattctcctaacataatggctctagctagtagtcaagtgggagaagattcactctcgcatcaacctgatcctgcaattggagtccatcttatggatagatacacattttatgtcttggaatttttggaagaaattaacccagctagccaaactaatatgaatgacctttttcaggtatgtcccaaaagtctgtgtgtgtctactcctggacatcgcactgatctttttcagagggatcctaaaaatgtactgataactgatttctttggaagtgtacggaaagtggaaattacaacagagactattaaattgcaacaggattcagaaatcatggaaagcagctataaggaagaccagatggatgagaaactaatggaacctctgaaatatgctgaacaacttcctgtagctcagataatacaccagaaaccgaagctgaaagactggcatcctcctgggggctttattctgggattatgggcacttattatcatggttttcttcaaaacttatggaattaagcatatgaagttcattttttagacttgatgatgaatgaagaatgcatggaggactgcaaacttggataataatttatgtcattatatatttttaaaaatgtgtttctcttgtatgaattggaaatatgtataaggaaactaaatttgaatcaactattaattttataacttaaagaaaaataattgttaatgcaactgcttaatggcactaaatatattccagttttgtattttgtgtattataaaagcgaatgagacagagatcagaatacattgactgtttttgaaaatagtaatttccccttatccccttttcatttggaaaagaaacaattgtgaagacattaaattctcactaacagaagcaactttggttaattattttttgtatatcctcccaatcttttgacttatgcacatattttttcccaatatggagatcatatggaatgtactattttgtaatgtcttttttcattttacaatgtattatcaaccttttccctctcaaaaatacattgtgaatgactgcatagtattcactttatgaatatttaattcatttcacagtcttctattgttggaccacttacattgtaccaaatgttttcctttggtttattctttaatgtattaatattttactgctggtcactcatggaatcctgcagctttaattaaaagcaaagatgaaaaattggttttttaatctatggcactgacaatctccaggaccttatatgtttgttgtcagtttatttgggaaattttagacctttgataatttcacgtactgactgctcaagagaaacataccccattgtttttcatttgtaagcgttctgtgatcttctacaattggtcacgtcctcttcattttccatcttgaaagagagagccaacaaggactttatttcattctgttttaggtaaacctccttgcccactggctgtatctatactttccttgagaaaaatcccataaagtggatggacctgtgaagaaaatgtatgcttatggcctagccttcatgtctggctgatgtatcctataaggcagtaagccccttttctagtctctggtaagatgcaagagctcatatccccatcactgacattttagtttggaaataatattgagactgtgctatgaccaacccctgatgttgttttttcttttcaaacttttgcatatgagtagaggaaaagcctaaaagttaagtatttatgtctggggggataccttcaggtgtcttatctgttttatgcaagaatttatgtgttcatctttattcagtgcaaagattttttttttaattttgtttataattgtaggtaacattaagacaactcttcctccacaagaaaacctcctaaaattaatattccttaagatttgtttttccttttgcacttataatattaccttttaattgcatgcaagattgtcatacttttcaaaaggcaaaggattgactgtgttatctccctagttagaacaaatgatattgaggctttttgccagctctgaatctttattttaattgatctttttattgatgtgttatataaatgaggaagaaaaattttgtctgattatgtgaaggatctttctgtacatgaaaagaagggaaaataaacttgcaattgaatagactgattatagtagcactgagacacaaaaagattgaccatgttgccctccagacactcatacaaggtcgtggacaccacggtgaggcggagctatttagggtggtaaaggaattatgattgttcttgagccaaagtaatttagtttgaatataatgaaacataccctgtaaagactgctagaaagtaaaaggattcgtcttcagaggttgtagaaggtgcccttcttagttaaaaccaaactgggaaaagtaatactggataaaatattcaggataaattttgcctcagcagaatttcaaagggcagttgttcctctgtttcattattgaatcttcagaatatagttaaagccaaaagcttaaaatatgttaaatgtttcacttataaccataatctttttacatagagcatactctgccttcataataactaaatcctctgcatgtggtagatgagtacgtttaggaaatattgtcagtgcaattaaatggcctacactttaaacagtatcataaaaacaaatccttaaatatattctacttgagtcacaaaagctgaacaacagaaaggtgttttgtttttgcctttctcacagtgttgtggtgagaatcagatgagatagtattttgactaaacacttctgaaattgtaaatatatggtggcattattgttcttatgtcggcttaggaggataccaaaggggaagttaatggtcacagtgcacttatgtagctttctaagctactcaatgtgattcttgttctctttgctgttctttttctcctcccccatggtgtccttcagagagaaaaggaatgtagataaatgaatccctgcagatgtgtcctgacatttcagggagggacagggtataatgatgccatcctgcaaaggcagcctgtgtgagaaaaagaaatcaaataatgtggattttaaaattacaaaagacattcatttgcagtttatgaaaggaaaatgtagtttggatacaaagctgattaaattggatcaagaaatattagaattaaatgcaaaaaataatccatgcatttatggttttgatttttatatattcccagctagttgaaaatgatgattcccacaagaagcataactcagcttgtttctgcttactgagtattttctactatggtatatattgataacatttcttccattatgtatgttgtataccagagttacagttactgtgggaatcataatttgaaattttgactcctgtgtttctggaatctttacaacaaatgttgcattaacatataacttttttcagttgactttaccaaaattaagcccatctttagtagatactgttttaacatgtgaaagaaatacgttataaacataccacaagatatggctataaaacaatgagatcagtatccatttttgctttaaagaattggccttattgcttcagtgtcacatctcatactcaagggcatttactacaaagaaagagttctccaatattgctgttctgttgctgcctgcccaatttacacatgtacctgctacttaaataggaaagcctttcaattcatggacaatacaccttggtggtaaccaggcttttatttttattttttttcttagtgtaaaaactgtactgttttggaaatgtgctgtgaaatattaggtttaactgtgtagatcctagaataaggggatttatatagatgaagttgtaaccaagaaactggttattaaaaatttatttactccaagaaaaaaaaaaaaaaaaaagca

SEQ ID NO: 28588 - DNA, 5375 bp, Homo Sapiens
gccggaagtggtcccgcagaggcggggtgggagtggggctcccgaggcagtgcagttggctgtagctgggcgcctcggttaggtgcgctgtcagtcctttccgagtgcctggcccagtctctcccgcctcggcccaacatggacttcagagaaattctcatgatagcttccaagggacaaggtgtcaacaatgtgccgaaaaggtatagtttggcagtggggcctccaaaaaaagacccaaaagttaaaggtgtccaatcagcagctgtacaagcttttcttaaaaggaaagaagaggagctgagacgaaaagccttagaggagaaaaggagaaaagaggaactagtgaaaaagcgaattgagctcaaacatgacaagaaagcaagagctatggccaagaggacaaaggataatttccatggttacaatgggattcctattgaggaaaagtcaaagaagaggcaggcaacagaaagccataccagccaaggaaccgaccgagagtatgaaatggaagaagagaatgaattcctcgagtacaatcacgcagagtcagagcaggagtatgaggaagagcaagaacctcccaaagttgaaagcaaaccaaaggtcccccttaaaagtgccccaccacccatgaacttcactgatttactcaggctggctgagaaaaagcagtttgaaccagtggaaatcaaggtagtgaagaaatcagaagagcgacctatgaccgcagaagaacttagggagcgagaattccttgaacgaaagcataggagaaaaaaacttgagacagatggaaaactacctccaactgtgtccaaaaaggcaccctctcagaaagaaagtgtgggcacaaaacttagcaaaggttctggagacaggcatccttcttccaaaggaatgccccttcctcatgctgagaagaaatcaagacccagcatggccaatgagaaacacctcgctttgtcttcatccaaatccatgccaggagagaggatcaaggcaggatctggcaatagctcccaaccctcacttcgtgagggccacgacaaacctgtttttaatggagctggaaagcctcattccagcacctcttcaccaagtgtcccaaagacttctgctagcaggactcagaaatctgctgttgagcacaaagccaaaaaatctctgtcccatcctagccattccaggcctgggcccatggtcaccccacacaataaggctaagagtccaggtgtcaggcagccaggcagcagttctagctcagcccctgggcagcccagcacaggggttgctcgacccacagttagttctggccctgtgcctaggcgccagaatggcagctccagctcaggacctgagcgatcaatcagtgggtccaagaagccaaccaatgactcaaatccctctaggcggacagtcagtggtacatgtggccctggacaacctgcgagcagctcaggtggccctgggcgacccatcagtggttcagttagttctgcaagacccttgggcagctctcgtggccctggccggcctgtgagcagtccacatgaacttcgacgaccagtgagtggcttgggccccccggggcggtctgtcagtggccctgggagatccataagtggctcaattccagctggacggactgtcagtaattcagtcccaggaagaccagtgagcagcttgggacctgggcaaacagttagtagctcaggtcccactataaagcctaagtgcactgttgtctccgaaacaatttcttccaagaatatcattagccggtccagcaatggacagatgaatggaatgaagtctcccctatctggctacagagctgcccaaggtcctcaaaggcttcccttccctactggttacaaaaggcagcgagaatatgaagaggaagatgacgatgatgatgaatacgactctgaaatggaagattttattgaagatgaaggagagcctcaggaagaaatatccaagcacattagagaaatctttggttatgaccgaaaaaaatacaaagatgaaagtgattatgccttacgttacatggaaagtagttggaaagagcagcagaaggaagaagcaaagagctaagactgggtatgcaagaggacttagaggaaatgagacgtgaagaagaagaaatgcaacgtcgaagggccaagaagctgaagaggcgttagctgctgcttttatttttgtgaaattctagagctgctctgctgcaaggatttcctgccttcagactgaagaagcccccttatcattttagatttatacttgggtactcaaggagaaggaatgcatactgtcatttgcaggctgtcatttgagcataaaatattttcagatattttccagggtgaaatctgtaatgcagatgatataatgcccacttgtgctcttatgaagttaactgttcacagatgccagccttgatcctgatgagctatgcactctaatgtggggccactcaccagtcagccaatcttttattgttcctttgctactttgaaaggaaaaaaaaggttgtctcttgatttctgtaattcttctgctgatctgtgagtagggcactgccctgctcccaatcaaacttagtctttttatgagaaacctggaccttccatgaatgttgccagcaataaagtgacttgtcctaatctatggattgagaacttgaaaatgtagagtagaatttataactatcatatggatgtcatcctgtgactttgaagtacaaagtagaataaattctgtattcatggattggatgctgagcattcttactcattaatttaggtggctaggaattaatgaaaaaattttcaagttaaaatacaggttataacagtataatattcttttctaagttttcctttcagatttactgttatgttggctttagtgtaagacaaggtcactgtgctgattgatttttatctaaaaaaattcatttttatatcgaagaaaaaatattttattcaaacattagatttgaaagagtaatagtttataaaataaggaagtaacatgtgaggctctcccctcctcccctcccccatcataaagatattttgaaatcccaaggtgccctcatacctcttgacattaatgacttcattttttagcttgaatttgttagcaaatattaatggcagaaaaccaaaaactaaatttatggtatcgagagcaccaccttctctttttgcccatattgcactttgatttcaaactatgcactgtgaagagatttttttccccaggtaggaagggatgttccctgttatcgttattttactgagctgtggaaactcatttttaccctttttaaagtcataaatatggacttaatagctcttaaccttcaagtccaagcagttccaatcaggctgacttaggatcatgctggaaggaagccaagtctcaagaactgtcagcaacagaaaatgagatatgatgctagagagcatttgtccttgactgtaagtacagaggcttaggggaagtgagacataagcttgtaggaataataaacgttctacaataaacgttttggctatcttaagccattgtatgggggggattaggaagtaggagggattgtcctacaacaggcccttatacttcaacagcccaaatattttggtttattcctttttatccataaagtctttattcttcaagtttgggtattatagattaccattgttagcctcccttaatgggaccatatgagccaggcttttaagacggactcattttgaattgagtttcaaactttgaaagtgcaaggatttaatttttaagttgaatcccatgaaaggtgtcatcatcactaggaataacaccctttgtaactacatatagaactgttacaatggtagcagaaaatcctattgatttcatctcacccatttcagataccttcagtgaaattaagggtagtgtgatgtcccatgtaataaaacaggcttagaacatcaattcctctgctgccatttatgtgcttttattcccccttcaaaaattttttattggatatatatatttttcagtattcagactctgaaatctgtcattacaatcaagtgcttgtcacagctgaaagatttctggtggcttaaagtttactagcagtaaatttatgatatggtacagttctttgtacagaaaggcaccattatgttagaataaatttccagaacttagtgggaagaatcaggttttaaccttgtgtgtctgttacttctgagtgcatttctataatataaatgttgatttgcgtcaacattataaaagagcacttctgtggctcatttaaaagaaaaaaaaggttaagtcttttaaattttggccttgtttccaaatccttccaggttgtttttctgcacttcctgaccactcttataaaaagctcacaaacctttgaagaaactggagtaggctgttatttcattaaggtttacaaattaagtgcttgatttttaatgtattctctactgttttgatttttggattttcttaattcaacatttgaagatgtgccttttgggtaatgttaatcacgaatgtagtaatatttcatgattgtaataatgttacatgatcatgggtgtggcattctctaacaaatgatgtgaaaggaaagtagttttcataaaactcatggctctgattgcacagtcccacttgcttttgatattgctatgtcaaagcaaagggcacttcttttaaggctactttcagaactttgtattttcgctaaactataaatgcagttgtgtccagttggaggccagggtaccacatgtcacaggcggccttacatgtgtgccgtgaaaaggttcaaagaccgttaacaaaaaagtaagtctggccgggcatggtggctcaagcctgtaatcccagcactttgggaggccgaggcgggcggatcacttgagaccaggagttcgagaccagcctggccaacatggtgtgagaccccgtctctactaaaaataaaaaaattagccgggtgcggtggcacacacctgtaatcccagctaccggggaggctgaggcaggagaatcgctagaacctgggaggcggaggttgcagtcagccaagatagcaccactgcactccaggctgggtgacagagcgagactccatgtcaaaaaaaaaaaaaagaatgtgggaactcaaattttcatttttaatgtaatccccaagattttctccaagaaataaattgttgttttgtattttgtaacttaaaagcagctattggtaaatttctgagatatagcaggaggccaaaacatgtttggaaagagaataaatatatgaagagagaaaaaaaaaaaaaaaaaaaaca

SEQ ID NO: 28589 - DNA, 3424 bp, Homo Sapiens
ggaaacaggtctgggctacaaaagtatggccgcttctgaggcggcggtggtgtcttcgccgtctttgaaaacagacacatcccctgtccttgaaactgcaggaacggtcgcagcaatggctgcgaccccgtcagcaagggctgcagccgcggtggttgcggccgcggccaggaccggatccgaagccagggtctccaaggccgctttggctaccaagctgctgtccttgagcggcgtgttcgccgtgcacaagcccaaagggcccacttcagccgagctgctgaatcggttgaaggagaagctgctggcagaagctggaatgccttctccagaatggaccaagaggaaaaagcagactttgaaaattgggcatggagggactctagacagcgcagcccgaggagttctggttgttggaattggaagcggaacaaaaatgttgaccagtatgttgtcagggtccaagagatatactgccattggagaactggggaaagctactgatacactagattctacggggagggtaacagaagaaaaaccttacgataaaataacacaagaagatattgaaggcattctacagaaatttactggaaatataatgcaagtgccccccctctattctgcattaaagaaagatggacaaagactttcgactttgatgaagagaggtgaagtcgtagaagcaaaacctgccaggccagtgactgtatacagtatctcccttcaaaaattccagccaccatttttcacattagatgttgaatgtggaggaggtttttatatcagaagcttggtcagtgacattggaaaagaactatcttcctgtgccaatgtgctagagctgacccgaaccaaacagggaccatttacgctagaagaacatgcccttcctgaagacaaatggacaattgatgacattgcacagtctcttgagcattgctcatctcttttcccagcagagttggcacttaaaaaatcaaaacctgagtctaatgaacaggttttgagctgtgaatatataactctaaatgagccaaagagagaagatgatgtaattaagacgtgttgagattggcctgggaatatcatcattttctagttgacatttgaatcctgtgtgcagatgcagaatgacaagctgcattcaaaagacaaacaatatgtctttttttttttgcatgaagaaaaatgtctatcatttacagtttcaatagcacataatttattttctatgcattataaatggccttgcagttggctcagttgtttgttgtgttgtgaaatgttttaggattttttgtattgtgaaaatatgaatatgattggattcagaaaaattaactttctgaatttgatctgtcttcagtcttgtgaaaaagttgaacaaatttcctaatcaaagaaaaaagtatgagctccatgtttctttagtttcacaaaaatgaccataatttagtgttatttttactttatttaggcttcctggtggcttcattttattgaaattctttaaattgtttaaagtggccattattgatctctttcttctgttttggagagtttattattaaaaacatttctttgataaaatggccatcatctagtaatacctgtgtttgtttagatcttggaaatgaataagctttgataatatttgtaaatgaaccaaattattactgctaccactaacaggttgtaaatagaagactaatacttaattaaagtcaccttcctaccattagagcagaagacagctcctatagttttgtattttggcagctatgagatattttcatggtaatgtcaacatggtcaagcactttgtaccaagttattaagtaacataatttttaaaatttaaagaatgtgtcttcaactaaaaactttattctttagcatttatttatatttctctgtagggtgttccctgtgacattgtctctttagtttgctctttcaagagatacttacagatgttgagatggctgccctgcatttccagctaatctcttctgctctaaatatttaaaaacagttcttctcaaacattttcattcagatagctttctgaaagttccctatccctctttaccataattttttaaatgtagccacattgtaatagtaaacttcatatataatgagtgcttcatatttttgttatgggaaagcaatatattatgcagccagtctgtagaaacattcagatccctcttcctttactcaaatacagtttcaaaaggaagactcatgagaaatttcataaaatacaagtttttagatgtttatgctttgcctttctttttaaaggtgttttcctgctttgtagtctctaactctgaaatttaaaatatgtaaactaaagtggttttatttgtgcttaacccaatttaaactcaatgtaaaatgttatatatgcatcagtacagcattttcaacatattggcaacatattttaaatgaaaacactaaaacaattcttagtatgagacaaaactgtaaggaaaaagagtgttaataccatgatgcattaacataaaatatcaaacacacaaagtcataaaatgaaaatttacagttttacctgttcatatctagtgccccacagtgtgtgtcaaccaaaggtggcagtggctacatctgcctgttggactggtacaggttacaatatgtcctcttccattgcaaattaaagtccaaatagagaaatacttaggttttagaacacatcagaggtatttctgctgtatttttcaccttaaaaattgacacagagtttactaatagaggagtagagattgttgaccatttttaaaaaacgatagccactctttttcttttatgtttaaaactgaagttttgccaaatgggaaaattactgttacctctaccatcttaatgtagtaactttagaatttaaatttttatattactattttcctttttgttgttcacatagtcttaaggcacctatacttttaaattgactttttcatttgatattatctatatgtatgtagttgtgataatgattattttaattatattactttatactcttaatttatttagagtatttctctattgctgaatacttaagtagttttaaattttattatgataaattcctgggagggggattatttagtgaaataatatgaagaactttatgacttatgtttgccttattgcattcccaaagagttgtaacattttacagtgttaccatttgagtaggggttttatatgttgttgctaatttagtaaacataggagagaaatcaaagtttttctgatttgcttttatgtgatttatctgtatactttgttcatttatataaataaatgtcttaatggtttctataaaaaaaaaaaaaaaaaaaaaaaaaaaaaaaaagaaaaaaaaaaaaaaaaaaca

SEQ ID NO: 28590 - DNA, 2294 bp, Homo Sapiens
ggcggcgaccaccgtgagcgtcccggaaggggcggcaaagacgcctccgtcgcgcacgaggtggcctcgttggctttaccttggttcgcggtcgtccttggttatcgtgagcgtccgcgagtctctgggaggccaagcctaggggcgccacagcgcctgcgcgcgtacggcggccggaaggggctagaggcggctccctgggtgacaaccgcgcgccccacctttccccacgtggccgcgaagaccggctcaggagcatctatcggctgcacgccaacatcaacacaggcgaagatggtctccaagcgcattgcccaggagacctttgatgcagctgtgcgcgagaacatcgaggagtttgcgatggggccagaggaggcagtgaaagaggccgtggagcagtttgaatcgcaaggggttgatctgagcaacattgtaaagacggcacctaaagtctctgcagacggatcccaggagcccacacatgacatcctgcagatgctcagtgacctccaggagtctgtggccagctctcgcccccaggaggtgtcagcatacctcacccgcttctgcgaccagtgcaaacaggacaaggcctgccgcttcctcgcggcccagaagggggcctaccccatcatcttcactgcctggaagctggccactgcaggtgaccagggccttctgctccagtccctcaatgccctgtcggtgctgactgatggacagccagacctcctggatgcccagggcctgcagctcctagtggccacgctgacccagaatgctgatgaggctgacctgacctgctctgggatccgctgtgtgcgtcacgcttgcctgaaacatgaacagaatcggcaagacctggtgaaagctggcgtgctgcctctgctgactggtgccatcacccatcatggccaccacactgacgtggtcagggaagcctgctgggccctgcgtgtcatgaccttcgatgacgacatccgtgtgccctttggccatgcccacaaccatgccaagatgattgtgcaggagaacaaaggcttgaaggtgctcatcgaagccaccaaagcgttcctggataaccctggcatcctgagcgagctctgtggaaccctgtcccgcctggccattcgcaacgagttctgccaggaggtcgtcgacctcgggggcctgagcattctggtgtccctgctagccgactgcaatgaccaccagatgagggaccagagcggcgttcaggagctcgtgaagcaagtgctgagcaccctgcgagccatcgcaggcaacgacgacgtgaaagatgctattgtccgtgctggtgggacggagtccatcgtggctgctatgacccagcatctgaccagcccccaggtgcgtgagcagagctgcgcggccctgtgcttcctggccctgcgtaagcccgacaacagccgcatcatcgtggagggtggcggggctgtggcagcactgcaggccatgaaggcacacccgcagaaggccggcgtgcagaaacaggcttgcatgctgatccgaaacctggtggcccacggccaggccttctcgaagcccatcctggacctgggggctgaggcactcatcatgcaggcccgatctgcccaccgtgactgtgaggacgtggccaaggccgccctgggggacctgggttgtcatgtcgagctccgagagctgtggacaggccagaggggcaacctggcgccatgaccccaggcccagtctgggccgtgactctgggtgagtcgtgtgactcaggaatgggggtagatccatgtcctccactgtcccccattagttctgtccccttcacaatgagaagtgttttctggcaggccctaggtaaagggtcgggggaggggggagccttgtagggaggcctctacacagaagaaagcagcccccatgtcccagccacttctgggtcccagccagcagcacggatgttactgtcctgctccttcccccagccccacgccctaccagagggggcaaagggcacgtcccatcactcactgccctgtctgaaatgtggcagccactgtgggccaggctcagggcagggcaggcgattccagtggggttgggccccctggcgcctgctgcttactgcagtttcatgcaggcctctgctccttgtctttcttacctgtaaaatgggtctcagatgctccgccctgcttggccccagcttgtctgtctctgggtcctgggccagccaggatacctgataataaaagatcattgggtgaacagcgaaaaaaaaaaaaaaaaaaaca

SEQ ID NO: 28591 - DNA, 4080 bp, Homo Sapiens
ggggcggtgagcagtgacaattgctaggcggagacagtgcagggaagagagaccttagaaaggatcaggactggcgggaggtatttaactgaaaggaatatctgcttcactgttgcaaccaaaccagatgccttcttccacttcaccagaccaaggagatgacctggagaactgcattttaagattttctgacctggatttaaaagatatgagtcttattaatcccagcagcagtcttaaagcagaattagatggcagtacaaaaaagaaatactcgtttgcaaagaaaaaggcctttgccctttttgtcaaaaccaaagaagttccaacaaaaaggagtgttgaatgtaaagaaaaattgtggaaatgctgtcggcagctattcacagaccaaaccagcatccatagacatgtggcaacacaacatgctgatgaaatttatcaccagacagattctattttaaagcaactggctgtgacattgagcacctcaaagagtctttcgtctgcagatgaaaagaaccctttaaaagagtgccttccacatagccatgacgtgtctgcttggctccctgatataagctgctttaaccctgatgagctgataagtggccagggcagtgaagaaggggaggtgctcctttattactgctaccatgacctggaggatccccaatggatctgtgcctggcagacagctctgtgtcagcacctgcacctcacaggcaagattcgaattgctgcagaaggaatcaatgggacagttggtggaagcaaattggctaccagactttatgtggaagtcatgctttccttcccattgtttaaggatgacctgtgtaaagatgattttaagaccagcaaaggaggagctcactgttttccagaattgcgtgttggtgtatttgaagaaatcgtgcccatggggatcagccccaaaaagatctcctacaagaagcctggaatccatttatccccaggtgaatttcataaagaagtagaaaagtttttatctcaggcaaatcaagaacaaagtgatactatccttcttgattgcagaaacttctatgaaagcaaaataggacgattccaaggctgcttagccccagacatcaggaaattcagttacttccctagctacgttgacaaaaatctagaacttttcagagagaagagagtgctgatgtactgtaccgggggcatccgctgtgagcggggttcagcctacctcaaagccaagggagtgtgcaaggaggtgttccagctcaagggtggcatccacaagtacctggaagagtttcctgatggcttttacaaagggaagttgtttgtttttgatgaacgctatgctctgtcctacaacagtgatgtggtgtcagagtgttcatactgtggagcccgctgggaccagtataaactcagctctactccccagtgccgccagctcgttttgacctgccctgcctgtcaaggacaaggattcacagcctgttgtgtcacatgtcaagacaaggggagcaggaaagtttcaggccctatgcaagacagctttaaagaggaatgcgagtgcacagcccgacggccacgcatacctagggaactcttgcagcatgtgcgacagcctgtgagcccagagccagggcctgatgctgatgaggatgggccagtgcttatgtgagcagcacctttggcattttcccaggccctcggtaaaagtaggtttggggtgactatacagagaaagcatggcaagactgcagaaacagagaaatcgggaacttcagttctggccgctgccaccgtggcagccgtctacacttcacagcgggaggggaggagtcacgttgtctaccacttacctgagacattctgatttggatgatgctagagcacagaaaataggtgagctgcatgggatcccaaagccgctgagggatagagcctgagcctggtggccacagcatatgccctttctgttccatgcagctggggctgttagtagtcattgcccttgtcagcagaccttctaccctggtggcaaacacatgaaagctgtggccctgggagtggcctcctaaaacaagccacttaggtcatctgccatctacccttaacctctgtctctcgcctgaggggaatctgcaagctgtgcattgggcttacctcctgcttttgtagaaataaccatcctttggtatacatggaggatagttccagaacgcctgagtatacaaaaacccaatgcatactcaagtcccacagtgggccctacagaacccacgtatgtgataaatcagccctccatgtacgcaggtttcgccccctgccaatactgtattttcaacctgtatggttgaaaaaaatccatatataagtgcagccatgcagttcaaacccatattgttcaagggtcaactgtatagtttattgaacagccacacccattcctttacacatgatctatggcagagttgaatagttgcaacagacactatgtggcctgcaaaatcggaaatttttactgtctggccttttacagaaaagtttgccagcccctgatctagaccagcagctcatctgatagaggcagaggtggccttaaagatgtggccttcttcattttctgttggtttggtttcgtttctatgagagatttcctctgatagctctgctttccccagcacttactctctgagcttttaaatgttctctctgggagcttcatataagctcggtgacatttgagccacagtttttagatcagcacctggaatacatgacacattcttactgaggtcatccagcactgccatggtggctgcccagtcttctggccagtgtgccaggcacatgtccctgtcacacaggttccaagaaacacatacgcagccatgcatagaccaacagatttaatattatattgcagttttcagcgatgcagaatgcagctgcaattgtgttttaaggagaagccaaatggggatggttgtccctgcaacatggtgccactcctgggccatgtgcagcctcagtggacactcttccatagcgctgaggccctggccccgcctccagttaccctgtactgcccactgccttacagttcagtgcgcaggccttcaccttttcatcaccagcctctctgctcagtgctctggagttcttgaccttgtcctttatcatgagatttgctgaaatcactaatgaaaataactcccaaaagcaacaaacaaaaatattagtttaactggcactgtggtatattaaaaggcacaagggcattgtggcttaacacttttgctggatcccaagagacgcacatgatgttaaaaagagatctggcagcagtactaatactacatttcagtgtaatcatcttggggtggtttggccaggatttcccaattccttgatatctggagtttcttcaccattgtccggcatcctgcggaggcttaatatacaggcgtaaggtcagcagcaatttgtctaataagtgatgagatcagtagctgaagtctctaagctgggccattactaaataccatagccatgttgatctggaaatttatccctctagtgtcttacctcacataagccatttgcccactgtgcaatatagaaaggtgttttcaaaagtatttggccgtagattttcacatccatcataaggttggcattcaataaggaaaaagttctaactccagtattaaattgtacataaatcccaaatgttcttaaagaacactcagggacatgtttgttgcctgggattggtaatgaaaggttggtttttgaaacttgaaatttcaccattggtttttttcctatcatttctgcatatccagcaaaaggaatctcatgttgactcctggcagagttcagtggcttcagtctgtctatctgttctgaggggaaaattgtgttctggatccagtaatcaatttggcaactttaatcgaggttttcaaaattccaaggagggttaataaagaatgataatcagttttatttgctaatagctaagacaaatttgtaataaagtgttttataatacttcaaaaaaaaaaaaaaaaaaca

SEQ ID NO: 28592 - DNA, 3349 bp, Homo Sapiens
ggcacaggaggggaggagaccgcgcgcgggacggggaggaatggcctgtccgcgttaaaccatcacaagccatggttgcggaagggccacgcgtcccccagtaggagaatgactccgattcgtgaccctcagcgccggtgcatgtcgatgtaagtgcgaggccggcgagcagagtgtgagtgggggttggtggtgaggggagattctgatgcaatcggcccggaaaggaggagagccaggcgagcgcggactggggcggccacgccactccgccagaaggtcgccaggagcctccgcccttcaccttcctccgaaatccgccaggccacgccaagctccctgcccaacccttactgacgggggccacattttcccggcctccgcagccagaccttgacacaaaggacatcaaactgccgagggtaaaaaccccggaagggcggacacctccacatcgccttttgccacctttccctttatttccggagatatttattgagtgtctactgtgtgccaggcactatatctatgtgcatagaaaaaccctggaaggccatacaacaatatatatagagtgatcgtctctgcttgctgagctaacaggggtgtcaagcttccattttggtatctacttctaaatacactcagaacaggagaaatttggactaattttcaaactacagacactttctaatcatgatgcatttcaaaagtggactcgaattaactgagttgcaaaacatgacagtgcccgaggatgataacattagcaatgactccaatgatttcaccgaagtagaaaatggtcagataaatagcaagtttatttctgatcgtgaaagtagaagaagtctcacaaacagccatttggaaaaaaagaagtgtgatgagtatattccaggtacaacctccttaggcatgtctgtttttaacctaagcaacgccattatgggcagtgggattttgggactcgcctttgccctggcaaacactggaatcctactttttctggtacttttgacttcagtgacattgctgtctatatattcaataaacctcctattgatctgttcaaaagaaacaggctgcatggtgtatgaaaagctgggggaacaagtctttggcaccacagggaagttcgtaatctttggagccacctctctacagaacactggagcaatgctgagctacctcttcatcgtaaaaaatgaactaccctctgccataaagtttctaatgggaaaggaagagacattttcagcctggtacgtggatggccgcgttctggtggtgatagttacctttggcataattctccctctgtgtctcttgaagaacttagggtatcttggctatactagtggattttccttgagctgtatggtttttttcctaattgtggttatttacaagaaatttcaaattccctgcattgttccagagctaaattcaacaataagtgctaattcaacaaatgctgacacgtgtacgccaaaatatgttaccttcaattcaaagaccgtgtatgctttacccaccattgcatttgcatttgtttgccacccgtcagtcctgccaatttacagtgagcttaaagaccgatcacagaaaaaaatgcagatggtttcaaacatctcctttttcgccatgtttgttatgtacttcttgactgccatttttggctacttgacattctatgacaacgtgcagtccgacctccttcacaaatatcagagtaaagatgacattctcatcctgacagtgcggctggctgtcattgttgctgtgatcctcacagtgccggtgttatttttcacggttcgttcatctttatttgaactggctaagaaaacaaagtttaatttatgtcgtcataccgtggttacctgcatactcttggttgttatcaacttgttggtgatcttcataccctccatgaaggatatttttggagtcgtaggagttacatctgctaacatgcttattttcattcttccttcatctctttatttaaaaatcacagaccaggatggagataaaggaactcaaagaatttgggctgcccttttcttgggcctgggggtgttgttctccttggtcagcattcccttggtcatctatgactgggcctgctcatcgagtagtgacgaaggccactgaaacccgccgagaaaaagaaacatccctgttgtctgctcagtcaagtccccacacatcagcaatctctcaccacttcttttgcaagtttacagaagcaaacagaaatgtacaggatacttaaaatggaataactttttggttgcaaaacagagacatggttctataatgcttcatgtccctccaagatttgagatcaatttagggattgtgaaatttttttttcaaatttcatacaatcatatttcccagtacttttcacaatcattttttacccatctaactctatgttttgtggcttcccggtctcttagaactttgaaaacatgatatacaataatgtttatttattatacatccagattctgaaataattttcctactgatgttcagctcacactatctgtacctttttagaagagaaaagaatcttgaattgtatatatttattttgctttacagaaaaaaatggtttcgtaaataatttgcctattttggttaacatagcacatggagataatcatctgaaagttatagggcactgccactgctgaatcagagcatgcccaatatttgaggtggctctgatttcctggcagctgaactcgggtagtccagtggcctagctggtaccacatctattcccatccagagacattctctggcaagtgttctcagctgaaaagtggttggggatgattcttaccttggtaattaaatgaagctacacatttgggtaatctagcaaatgaagtattttttccctcttggcaacttgtgtcagagttactctggtctgagtcaactttcgctggggaaaacctatggaacctactgcaaaaagattgtccaaaatgcctaagaaaatactcctctgatgcatttagccttcaaccctacctgtcttgctgaagggagaaaaatgttttagtacattataggcccagcagcttttattcatgtccaccagctagttgcacagagaatcatgtgtacctaactaaggatgatctaggataagtaactcctgttttatattgagtattttagggaagtctttaaaagacttgttttatatctataaatctaggttattacaaatacaagaattttgtaccttaaataagcctcatttctatttcttcttcattaattctccatctagtcttgtaaaaaaaaaaaaaaaaaaaca

SEQ ID NO: 28593 - DNA, 3883 bp, Homo Sapiens
ggggtacagggaagtctcgcctgttggaactggctgtggggctgcggcggtggggacgggccacggcgttctgtgacatccccccgcctcccctcgtcttctcccggctggcggcgaccggcctcagctgcagcgggcccggggcgtggggcctgggttttttgtgacatcgtaaacatgagccccacacagtgggacttccctgtggaattatgttgccggcctatggcctttgttactctaacgggcctggatgtagtttataatgcagtccatcgagctgtctgggacgccttctgtgcaaatcggagagctgatcgagtaccaatttctttcaaggtgctcccaggtgaccatgagtatcccaaatgtagacccaagagaacttcatatgagtggtacattcctaaagggatcttaaagactggctggatgaataagcatctgaatctggtgccagccctggtggttgtgttctatgaactggactgggatgagcctcagtggaaagaaaagcagtctgagtgcgccaccagagtggaaatagtcaggcaaagtttacaaggaagaaacacaaaagttgcagtggttctgattcagaagaaaacccctttgcccccaggagaagatgtcattgcttcagaaagggctgcagctttatgcaatgcatgtgaactctcaggaaagtctttgtttgtactgccgcacactgaccaccttgtgggttatattataagattggaaaatgccttttatgaacatgcacagacttattactacactgagatcagaagagtgaaatctcataaagaatttttgaataaaacaacacaccagcttttatttgttaggcatcagttcaaaatagctttcttcagtgagttgaaacaagatacacaaaatgcgctgaagaattataggaccgcctataatcttgtacacgaattgagagcccatgaaactaatattctggaaattaagactatggcaggatttataaactacaagatctgtaggctgtgttttcaacacaacaccccattggatgcaattgctcagttccgaaaacacatcgacttgtgtaagaaaaagattggaagtgcagagctgtcttttgagcatgatgcatggatgtctaaacaattccaggcctttggagatttatttgatgaagctattaagttagggttaacagctattcaaactcagaatcctggtttctattaccagcaggcagcatactatgcccaggagcggaaacagcttgcaaaaaccctctgtaaccacgaagcttctgtaatgtatcccaatcctgatcccttagaaacacaaacaggcgttcttgacttttatggacaaagatcatggcgacaaggaatactaagttttgatctttctgatcctgaaaaagaaaaggtgggaattcttgccattcagctgaaggagagaaatgttgttcactctgagataatcataactcttctgagcaatgctgttgcacagttcaagaagtataagtgcccgcgaatgaaaagtcacctaatggttcagatgggagaggaatattattacgcaaaggattataccaaagctttgaagttgctggattatgtgatgtgtgattatcggagtgaaggatggtggactctgctcacttctgtattaactacagctctgaagtgctcctacctcatggcccaattaaaggattacattacttactccctagaactccttggtagagcttcaactctgaaagatgaccagaagtctcggatagaaaagaacctcataaatgttttaatgaatgaaagtcctgatccagaacccgactgtgatatcttagctgtgaaaactgctcagaagctgtgggcagaccgaatttctctggctggcagcaatattttcacaataggagtacaggactttgtgccatttgtgcagtgcaaagccaagtttcatgccccaagttttcatgttgatgttcctgttcagtttgatatttatctgaaggctgattgtccacatcccattaggttttccaagctctgtgtcagctttaataatcaggaatacaaccagttctgtgtaatagaagaagcatccaaagcaaatgaagttttagaaaatctgactcaaggaaagatgtgcctagttcctggcaaaacaagaaaactgttatttaagtttgttgcaaaaactgaagatgtgggaaagaaaattgagattacttcagtggatcttgctctgggcaatgagacgggaagatgtgtggttttaaattggcagggaggaggaggagatgctgcttcctcccaagaggccttacaggcagctcggtctttcaaaaggcgacctaagctacctgacaatgaagttcactgggacagcattataattcaggcaagcacaatgatcatatccagagtcccaaacatttctgtacatctgctacatgaaccccctgcactgactaatgaaatgtattgtttggttgtgactgttcagtcccatgaaaagacccaaatcagagatgtgaagctcaccgctggcttaaaaccaggacaggatgccaatttaactcagaagactcacgtgactcttcatggaacagaactgtgtgatgaatcctacccggctttactcactgacattcctgttggagacttacatccaggggaacagctggaaaaaatgttgtatgttcgctgtggaacagtgggttccagaatgtttcttgtatatgtttcttacctgataaatacaaccgttgaagaaaaagaaattgtttgcaagtgtcacaaggatgaaactgtaacaattgaaacagtctttccatttgatgttgcggttaaatttgtttctaccaagtttgagcacctggaaagggtttatgctgacatcccctttctgttgatgacggacctcttaagtgcctcaccctgggccctcactattgtttccagtgagctccagcttgctccatccatgaccacagtggaccagctcgagtctcaagtggacaatgttatcttacagactggagagagtgctagtgaatgcttttgtcttcaatgcccatctcttggaaatattgaaggtggagtagcaaccgggcattatattatctcttggaaaaggacctcagcaatggagaatatccccatcatcacaactgtcatcactctgccgcacgtgattgtggagaatatccctctccatgtgaatgcagatctgccgtcatttgggcgtgtcagagagtcgttacctgtcaagtatcacctacagaataagaccgacttagttcaagatgtagaaatttctgtggagcccagtgatgccttcatgttctcaggtctcaaacagattcgattacgtatcctccctggcacggagcaggaaatgctatataatttctatcctctgatggctggataccagcagctgccatctctcaacatcaacttgcttagatttcctaacttcacaaatcagctgctcaggcgttttatacctaccagtatttttgtcaagccacagggtcgactcatggatgatacctctattgctgctgcatgatgttcaagaccggcccttggctgttgttacagagatgttgggcagagctatgcaggtgtttcattgtgaactctagctttgatcatggtaaaaagttaaccttttctattttttaatggatgttataccaactaaaacccccaataaaccttgaaaaaaaaaaaaaaaaaaaaaaaaaaaaaaaaaaaaaaaaaaaaaaaaaaaaaaaaaaaaaaaaaaaaaaaaaaaaaaaaaaaaaaaaaaaaaaaaaaaaaaaaaaaaaaaaaaaaaaaaaaaaaaaaaaaaaaaaaaaaaaaaaaaaaaa

SEQ ID NO: 28594 - DNA, 3539 bp, Homo Sapiens
gggaatctggaacttgcctgctaaataaggtcgtggtggactctcagccattgggcaggtctatcaggctgcaggttcctacacacccacgcctgagggtcatagcaggctaagggtggataccagcgactccctttgctgcccaggatctccatgggcagtgccacagcggctgatgctcagtcactcctgcttctaccccctgtcactgatggcgagccttgcccagcttgagacctgttcccatctctattcaggtgccatgtggccttcactgcagccctgcagccacccacgcaccatctgtgggtctccaaaggcaccttgtagcatgtactccccgtgcctgggcaatcagatgggctgcctttgtccaagggaaaacagactcccttcgggaaacatccttaagcacttaaggccggggggggtgtctgcctctggcaacccagccagggtcttggtggcatttgtaaaagcaaagagctgtggactgccgtggtcctagtgtggtgacaatgcagcactggcatgcatgtcctccttctgaaggacctcatccttcctcacagggggatgaccaagaaatcattttgtggctgagtttggccacgccctttggactgtgctgttccgccatatttcaatgccaaatgaaccacattgacatgacctggaccatagggcttcctatcctgggctcagctgcccctgtctgaagggtcttggcttgattgcagaaggacaacctccgcacccacctaaagacatgtatatgtcttgggatcccagagattgggtccttgggcctggcttcttaagagttttgatgatgctgggaaaagtgactgcgattctgaagaaccgctgccttgcaaggtcaaggacattcagtggttgctggggtccgcagactactgccacccactcaccatcaactctgttagcccaattgccctgctggacaactgcctgaatacaggctttaggttcccctggactccagccaaggctgttcaggtgggaccatggtgctctttaagcgtgatcggagggaagacacacagcagggccaccattccatgaatgggaggtgtacagatcactttctctttgtgctcagttctgttctgtctccagcagctatattggtaagactagtacctgccagggagaggtgcccccaagtgaaggggtacagtggcacctgggaaaaggcacctggaaggtttccatgtggcccagcccagcatggaagcagggtgggaactctgctgtgtcgccagcgctcactctactcgagtggctttttgaaagccctaccatgtctgtgtcaggcctgtgctgcttcacatcctacagctgcctaggaaaggccggccacgctccctgtccacacactccctgtccacacactccctgtccacacactccctgtccactactgcagccgggccctctgcctatgggcacccaatccaagcagctgctccacctttgtttggcatggtgatttgtgttttttctcttggtgcttatgtgtgtgggcttgggacgagtgctggtatgcacttaggaccttcttgatagctccctgcactttggaacacggagcagatgagagagggtcggggcttgccctccaccttggacttggaagaagcccacattggagaggtgaggaccccatggtggctctagtggaagatacgttagtctccagctaaggaggatgaggcgcagccccagagggagacctcagtgataggggatcaggctaagaaagtgggggaagggagatgctttgtacatattttggggttataatttctctaaattttaggagaacgggtattgattgataaaagggacaggcagtagtgttcaacagtgcatgtgaaggaaagttctgttttccatggttttgacattctttggactgtattgtgactgctgtctggtccacatggtacccctttggtaagtaggcttcagtgcataccagggtatcactggagatgggagttagtgaaggggtgactccctggcctagtatagtgtgaccctgggactaacttaatgtcctaaagcattttggtgacttctagggaatagcaaagacctatttcattgtccccaggtaagtatgtgatgagcaatgaggaggagtggaaaacaaaacccagaaagtgcggcaggaccagcctgacgcacacgctcctgttgtcatggcagacagccgccttgggtgggcaccaccctggcagttccagcctgtaggggagtgaagggacatggctgagctgggcatgtgctgaggttgacttagggaacaagccctgggattggacaaaagggcccatgctgcagccactgactgggggcagagctctgggtggaagagggaagagatcctaatggaggcgcctccatctgcaaccacagttgtaaggctcatggcacctctgcttggaaagcactggtttagggacttagagaggtaggcacaaggtgggtctcctgggtaagggaagcaagagcagactgttgggccaacaggagaagctccccagagtaggggagaagattggggtgtagggccttccacgtggaacagacagcccctgtgtctctgtctcttggggacctgagtttgggtggggtggcagttggcacagcgcagatgcggtagagatgggaggaaacccagctcctcacttccgtgtgcctcatgcctttgcatacacaagcaccaaacctactaggtcttctcattacccatgtaaaccacatgttagataaatttttgcaagtagaggaaagaaggaaataaaacatcacattttggtgtctctcaggctttcccccccaactatggtttctttgctttttgttttaacatagttttgttgctgtcttctgtaatgatacagttttgtgcagctgttttcacttagcatatcgtgggcatctccccttatgattactaaatattttattttggagtggctgtgtactctcccattgactagatggaccattgtgccagttgccaatcactaatgctgttactaacttttcagttataaattgatgaatatctttgtgcacaggctgtttcccaatgtcaagttattagggtagactccaggaggtgggattcttcaactaaagaatatgaaaacctttgaggcttttactacatattgacaaaatggtttccggaaatatttgtatccccttacactgccaccagcaaggataaacatgtccatcttgcccgtattgggaattatcatctggctaaatatttgctaatttgataatgaaaaaatagcatcgtgtttcagttggcatttcactgacttctagcacggttgaacatctttcatgtggagcgattgtatttcctcctttgtggattgtcagtgtcctttgctctatcttctggggtcagataaatttgtatgagctcggtatatattaaagatattaacctggtgtgtgtcatatttgctaaaaaaaaaaaaaaaaaaaca

SEQ ID NO: 28595 - DNA, 3116 bp, Homo Sapiens
ggtccggctcccgggctgtcctcagcaagggcgcggtctggtactcgtgcgtcttttatcgcctcagtttccctccgccgactagcgcgcggggcccggttctccatcgcgcgcacggcagcctagcgcaatgaggcgggcagcactgcggctttgtgccttgggcaaagggcagcttactcctggaagaggactgactcaaggaccccagaaccccaagaaacagggaatcttccacattcatgaagcatgttcatctatacatgtgaatcatgttcgagataagttgcgggagatagtaggagcatccacaaactggagagaccatgtgaaggcaatggaagaaaggaaattacttcatagtttcttggctaaatcacaggatggactgcctcctaggagaatgaaggacagttatattgaagttctcttgcctttgggcagtgagcctgaattacgagagaaatatttgactgttcaaaacaccgtaagatttggcaggattcttgaggatcttgacagcttgggagttcttatttgttacatgcacaacaaaatccactccgccaagatgtctcctttatcgatagttacagccctggtggataagattgatatgtgtaagaagagcttgagcccagaacaggacattaagttcagtggccatgttagctgggtcgggaagacatccatggaagtgaagatgcaaatgttccagttacatggtgatgaattttgtcctgttttggatgcaacatttgtaatggtggctcgtgattctgaaaataaagggccggcatttgtaaatccactcatccctgaaagcccagaggaagaggagctctttagacaaggggaattgaacaaggggagaagaattgccttcagctccacgtcgttactgaaaatggcccccagcgctgaggagaggaccaccatacatgagatgtttctcagcacactggatccaaagactataagttttcggagtcgagttttaccctctaatgcagtgtggatggagaattcaaaactgaagagtttggaaatttgccaccctcaggagcggaacattttcaatcggatctttggtggtttccttatgaggaaggcatatgaacttgcgtgggctactgcttgtagctttggtggttctcgaccgtttgtggtagcagtagatgacatcatgtttcagaaacctgttgaggttggctcattgctctttctttcttcacaggtatgctttactcagaataattatattcaagtcagagtacacagtgaagtggcctccctgcaggagaagcagcatacaaccaccaatgtctttcatttcacgttcatgtcggaaaaagaagtgccattggttttcccaaaaacatatggagagtccatgttgtacttagatgggcagcggcatttcaactccatgagtggcccagcgaccttgagaaaggactaccttgtggagccctaagaacaccacatttgttgaaaactagcactctacccacagtgacgtggtatctgatgaagacctgatcgagtgtattgattttagtattgcttcgtgtcctccacacaggaggaggatgtattcagcctttaggatgatcagaaaagcagaaagagagagtggccggatggggctgaggggagaaagaattattaaacaataaatactttcaagacaattttaattgtgaacctaccatgttgcctcccatcttctgaaaaaacaaaaaaattgagaggctgggcgtggtggctcatgcctataatcccagcactttgggaggctgaggcgggcggatcatgaagtcaggagatcaagaccatcctggccaacatggtgaaaccctgtctctactaaaaatacagaaaattagccgtggtggcatgtgcctgtagtcccagctacttgggaggctgaggcaggagaattgcttgaacccgggaggtggaggttgcagtgagctgagattgcaccattgcactccagcctgggcgacagagagaggctgtctcaaaaattaattaattaattaattgaggataccattggatgcattcttttcttacacatattgcaactgtcagtatacaaggtttcctgccagggtatttggatgacgttctttaaacctaaccacttgctctgtgctgtctaaatcccatcagccgtacatgattcctttgcttccctctatttcccagcttttgttgtcagagggtagatgaaaagttggggcgaagggatttaacaaaagttactgcatccgtaaagatttgtgggaagatttaggtctgaaaccataccattagaaggtgtttagagatgatctagataaggaaatacaggaccatttggtcattctttcattcaccagacagctatttagcacattctgctagtggctccgcaggatatatctgatttaaaaaataggaaccacaataataatagctgcttatgcttatggagcattgccatgtgctagataggcaccatcctcagcccttggcaggtctgagctcctttatttcttccaatcaacactatgaggcaggttctgtaaccccccttagggttaggccactcgggaaactgaagcacagagagtttaagtaacttcctggaggtccgacgcgtaacatgtggaggtgctgggattcaaaaccaggcaatgtgggtcccgggcactcttgaccagtgcctgtacttcttccaaggaatagagcaagggaggtcataccgaatatcacagtgtcacctaggaagcccaagggaggtattcccgttaatctgcagccaaggccgggcgcggtagctcatgcctgtaatcccagcactttgggaggccaaggcggatggatcatgaggtcaggagttcaagaccagcctggccgagatggtgaaaccccgtttctactaaaaatacaaaaattagccgggcgtggtggcggacgcctgtaatcccagctactcgggaggctgaggcagagaactgcttgaacctgggaggcagaggttgctgtgagctgtgatcatgccactgcactccagcctgggtgacagaacgagactccatctcaaaaaaaaaaaaaaaaaaaca

SEQ ID NO: 28596 - DNA, 3446 bp, Homo Sapiens
ggcaattcccagcacgacgccctggaattcctgctctggttgctggatcgtgtacatgaggacctggagggttcatcccgagggccggtgtcggagaagatcttccttgacttgtccccactgcctgaaacagagcaacacctttgatcctttcctgtgtgtgtccctacctatccccttgcgccagacgaggttcttgagtgtcaccttggtcttcccctctaagagccagcggttcctgcgggttggcctggccgtgccgatcctcggcacagtggcagccctgaggaagatggttgcagaggaaggaggcgtccctgcagatgaggtgatcttggttgaactgtatcccagtggattccagcggtctttctttgatgaagaggacctgaataccatcgcagagggagataatgtgtatgcctttcaagttcctccctcacccagccaggggactctctcagctcatccactgggtctgtcggcctccccacgcctggcagcccgtgagggccagcgattctccctctctctccacagtgagagcaaggtgctaatcctcttctgtaacttggtggggtcagggcagcaggctagcaggtttgggccacccttcctgataagggaagacagagctgtttcctgggcccagctccagcagtctatcctcagcaaggtccgccatcttatgaagagtgaggcccctgtacagaacctggggtctctgttctccatccgtgttgtgggactctctgtggcctgcagctatttgtctccgaaggacagtcggcccctctgtcactgggcagttgacagggttttgcatctcaggaggccaggaggccctccacatgtcaagctggcggtggagtgggatagctctgtcaaggagcgcctgttcgggagcctccaggaggagcgagcgcaggatgccgacagtgtgtggcagcagcagcaggcgcatcagcagcacagctgtaccttggatgaatgttttcagttctacaccaaggaggagcagctggcccaggatgacgcctggaagtgtcctcactgccaagtcctgcagcaggggatggtgaagctgagtttgtggacgctgcctgacatcctcatcatccacctcaaaaggttctgccaggtgggcgagagaagaaacaagctctccacgctggtgaagtttccgctctctggactcaacatggctccccatgtggcccagagaagcaccagccctgaggcaggactgggcccctggccttcctggaagcagccggactgcctgcccaccagttacccgctggacttcctgtacgacctgtatgccgtctgcaaccaccatggcaacctgcaaggtgggcattacacagcctactgccggaactctctggatggccagtggtacagttatgatgacagcacggtggaaccgcttcgagaagatgaggtcaacaccagaggggcttatatcctgttctatcagaagcggaacagcatccctccctggtcagccagcagctccatgagaggctctaccagctcctccctgtctgatcactggctcttacggctcgggagccacgctggcagcacaaggggaagcctgctgtcctggagctctgccccctgcccctccctgccccaggttcctgactctcccatcttcaccaacagcctctgcaatcaggaaaagggagggttggagcccaggcgtttggtacggggcgtgaaaggcagaagcattagcatgaaggcacccaccacttcccgagccaagcagggaccattcaagaccatgcctctgcggtggtcctttggatccaaggagaaaccaccaggtgcctccgtcgagttggtggagtacttggaatccagacgaagacctcggtccacgagccagtccattgtgtcgctgttgacgggcactgcgggtgaggatgagaagtcagcatcgccgaggtccaacgtcgcccttcctgctaacagcgaagatggtgggcgggccattgaaagaggtccagccggggtgccctgtccctcggctcaacccaaccactgtctggcccctggaaactcagatggtccaaacacagcaaggaaactcaaggaaaatgcagggcaggacatcaagcttcccagaaagtttgacctgcctctcactgtgatgccttcagtggagcatgagaaaccagctcgaccggagggccagaaggccatgaactggaaggagagcttccagatgggaagcaaaagcagcccaccctccccctatatgggattctctggaaacagcaaagacagtcgccgaggcacctctgagctagacagacccctgcaggggacactcacccttctgaggtccgtgtttcggaagaaggagaacaggaggaatgagagggcagaggtctctccacaggtgccccccgtctccctggtgagtggcgggctgagccctgccatggacgggcaggctccaggctcacctcctgccctcaggatcccagagggcctggccaggggcctgggcagccggctcgagagggatgtctggtcagcccccagctctctccgcctccctcgtaaagccagcagggccccgagaggcagtgcactgggcatgtcacaaaggactgttccaggggagcaggcttcttatggcacctttcagagagtcaaatatcacactctttctttaggtcgaaagaaaaccttaccggagtccagcttttgatggagcgtgtcagtattgtgtgacgctggcattcttgggactttgccaagcaactgtaggcagctcatgttgagaatgggtttccaggaaacccgttgtcttgtaatctctaaaaaaaaatttttttttttttgtggtggggggtctccatatctagacttccaacacccaaggtccatataacccaaggtcgaaaaccttcctgcatcattgggtgctttgctacagtttggccactagaggatgctattgggtcagtattaccagtttcagggcaagaactgatatttactaaagagttttggatgtgggcaaacaagatgaggctggtttaataagaatcttcaatgtcatgtcaaatactgtcaatggcttttcctttttctttcttttttttttttaaattgtggacttaaagaagaatattttatttttaatgcttttctgggataagcattaaagatgccaaaaagaaaaaaaaaaacaaaagaatgatagtgatggtaaggcaagattctagcaaagagagatgggagataaatggctgagagttcaggtgaatatttaatatattaaaaattgtattaaagtttttcaaggtattttaaaaataactattttgatactagaaaaaaagtccattttttaatttaaatatgaaatctatgtacaattttaataaaatcctgtccatgaaaaaaaaaaaaaaaaaaca

SEQ ID NO: 28597 - DNA, 2213 bp, Homo Sapiens
gagtctggcgtcatctaggtcgctgctcagggaaatgcggaggccagtaggcttacgtgtttaccgcgtagggcaaagccttgccaaattcccggccagcggagcggcgagggtggggactcacgggaagttaaacagcctcgtcggcgtcctcgaggctccaaaaccaggctctaggcggggacgactgcagccgttatggaggccaccgcggctacggccgcggctgaggcctccccaggtggagcggtggcctggaggggaatcttgatcctgggccagccacctgtcaagaggaggcggagcgtcatgcctctggaagactggatgaatattctccaggagcctgacgaaggcgtgagtaatagggacgtgcgccgccttgttggtgttgatcagtccaccaaggagaagcagctggtcgcagtggccgtacctgtaatcccagcgctttgggaggccgcggcgggaggatcgcttgagcccgggagttcgagaccagcctgggcaacatagtgagaaacccgtctctaccaaaaagaaaaaaaaaaaaaaaagaaaaaaaattagtgcggtgtggtggcacgcacctgtagtcccagctactcgggaggctgaagcgggagggtcccctaagtctaggaggtcgaggcttcagtgagtggtgattgtgccactgcactccagcctgggcgacatagcaagaccctgctttcccctcttgtcctccactaccctcagaaaaccaagaaagaccagcgtggagagttggtcgcccatctgctctaagctgctgtgtattcccctgtaatgtaaacatcgtgaaggtggagacccagttaaccttttaggtggaaggccagatgacagagggcggcatctgacccggaaggccctctgcaaccaggccaaatacatctacagggaaccaatgggaaacatctggggaggacaacccaaataagtatcatgcgagcaagggatggtttgagaactttaaaaatcgctgctgttttgcaacatacgaagttgatggggaggaaggacccttaaatcctgagtgggtatcgagtattccaagcaactggagagaggctttgtgcctcaacaggtcttcaacgccaaggagatgacccatcttttgcagtgcatgccttcctacttttggggcaaaagacaaaaatctggaaagcttagaggaagctaaggacaggatttccctcatttttttgtggcagtgcctcaggtgacaaaatgataaaaccactgctgctttacaaagactctaacaccccacttgtcttttagagataaacgccttcctgttttcttgtaatcacacccagaatcaccactgccactttttggattagttttacaatttttttatccatcaaatccgaagtcatttaacaaaaaaaatctggaaatcagaatgttgctaactgtggacagaggtcccaatcacccagattcattattctttgttcattctaatgttgatactgtgtttctccctcaggaaggccctagctttcttcagcccttgggtcagggtataactgaagcatttgaacataatcaagcatatgtttgaccactttgctgactgtattgaaaaaaccctcaccttactctgaaagaagcatggcaacagtacaatattgccgatgctttggtagtgataaaagaggtgatgggtgatataaaatcagccactcttaagcttgctggaaactgtgggaggatgtgtgaatgatgcatatttccctagagctaatgaagaagttaaaaaaaatcttagtgtctgcaaaacaggtgggtttaagatttattgatattagggaaagtgaaattaatgagctactcaagtttctgtctttggtcatcactgagagtctatttccataggaagaagtctttgcagaggaaattgaatgctgtctgatgctacaattcatatggatcctttcctggattgaagcctgacttttaaaaaaggtttcaataaattgcttatacctatgaagagatgcaaaagaaccttcaaaataaagcaaaggacttgaagaaagagaaggaagacatgaagaagaggatgtcatttaggtgaaggtgatggatacagaatctgagtctgaggggagcctggttgacagagagacaaaaaaagaaattttttttttctgactaaaaaaaaaaaaaaaaaaaca

SEQ ID NO: 28598 - DNA, 4349 bp, Homo Sapiens
ggaggaagttccggtgtccgcggcgctgggtcggtggcggaggctgaggagagggaggagcgggccgtggaggcttcgccgcctaggtactgctataaccagaatttggtagaaaaaggatttacttgttggggccctcttgataaaaagagatgtggggggattctcgacctgctaacagaactggaccttttcggactgggtgaaagctttttctgcagcagtcatgttgaaaaccttgtgttgactttcctcgtgttctgaaatgggagcataaaagtttactccgccacttcgtcttaaaatagcaaaactttgctgttttctgcagatctaggaccttgttacagaactctgccaaaaaaaaaaatgtttacagaagaatgtgctgtgattagagaagaatatgctggtgtgtagatttcaaactctctggacaatatgaataacactgtctttgtttctacagtgggagccaagaagaaaggtttgctcccgggtggaacagggattatcctcctcctccccttaagagtcatgctcaagagagacactctggcaactttcctggcagagattcacttccctttgatttccaggggcactcggggcctccttttgcaaatgtagaggagcattctttcagctatggagctagagacggaccgcatggtgactatcgaggaggggagggacctggacatgatttcagggggggagatttttcgtcttctgatttccagagcagagattcatcacagttggacttcaggggtagggacatacattctggggattttcgggatagagaaggaccacctatggactataggggtggagatggtacttctatggattatagaggtagggaggcacctcatatgaactacagagacagggatgctcacgctgttgacttcagaggtagggatgctcctccatctgacttcaggggccggggcacttatgacttagattttagaggccgggatggatcccatgcagattttaggggaagggatttatcagatttggattttagggccagagaacagtcccgttctgattttaggaatagagatgtatctgatttggactttagagacaaagacggaacacaagtagactttagaggccgaggttcaggtactactgatctagactttagggacagggatacgccacattcagatttcagaggtagacaccgatctaggactgatcaggattttaggggcagagagatgggatcttgtatggaatttaaagatagggagatgccccctgtggatccaaatattttggattacattcagccctctacacaagatagagaacattctggtatgaatgtgaacaggagagaagaatccacacatgaccatacgatagaaaggcctgcttttggcattcagaagggagaatttgagcattcagaaacaagagaaggagaaacacaaggtgtagcctttgaacatgagtctccagcagactttcagaacagccaaagtccagttcaagaccaagataagtcacagctttctggacgtgaagagcagagttcaggtgctggtctgtttaaagaagaaggcggtctggactttcttgggcggcaagacaccgattacagaagcatggagtaccgtgatgtggatcataggctgccaggaagccagatgtttggctatggccagagcaagtcttttccagagggcaaaactgcccgagatgcccaacgggacattcaggatcaagattataggaccggcccaagtgaggagaaacccagcaggcttattcgattaagtggggtacctgaagatgccacaaaagaagagattcttaatgcttttcggactcctgatggcatgcctgtaaagaacttgcagttgaaggagtataacacaggttacgactatggctatgtctgcgtggagttttcactcttggaagatgccatcggatgcatggaggccaaccagggaactctaatgatccaggacaaagaagttaccctggagtatgtatcaagcctggatttttggtactgcaaacgatgtaaggcaaacattggtgggcaccgatcttcctgttcattctgcaagaacccaagagaagtgacagaggccaagcaagaattaataacctaccctcagcctcagaaaacatccataccagcaccattggaaaaacagcccaaccagcccctaagaccagctgataaggaacctgaacccaggaagagggaagaaggccaagagtcacgcttaggacatcaaaagagagaagcagaaaggtatctgcctccttctcgaagggaagggccaactttccgaagagaccgagagagggagtcatggtctggagagacacgccaggatggagagagcaaaactatcatgctaaagcgtatctatcgttccacaccacctgaggtgatagtggaagtgctggagccctatgtccgccttactactgccaacgtccgtatcatcaagaacagaacaggccctatggggcatacctatggctttattgacctcgactcccatgcggaagctcttcgtgtggtgaagatcttacagaaccttgatccgccatttagcattgatgggaagatggtagctgtaaacctggccactggaaaacgaagaaatgattctggggaccattctgaccacatgcattactatcagggtaaaaaatatttccgagataggaggggaggtggcagaaattcagaccggtcttcagatacaaatcgacaaggacaacagtcatcatctgactgctacatatatgattctgctactggctactattatgaccccttggcaggaacttattatgaccccaatacccaggtgagtttggggctttttttttttttttttttttttttttacctctgtcaatgattcttttgagaaaagcacccataatttgctacttgaggattttattccctggattctctggatgctcattgcatgaaaagtggaaaagtttagatctatggaaacagaactgttgcctatatggaaaatcagtgccttgtggcaatacaggtaagaacagtgttgctcttgaaaaagtggacagtgggtggtctgaatgtgtcctggtccctggagtgggtttttagattgatgtggactcttcttagacttgtaagtaaaaaagttgtttcttcccctaaaagggaactgtgcgccttagacctggaattgctgggaaactgaaacattctgtagacttacttgtttccaactgtatcgcagcaagaagtctatgtgccccaggatcctggattacctgaggaagaagagatcaaggaaaaaaaacccaccagtcaaggaaagtcaagtagcaagaaggaaatgtctaaaagagatggcaaggagaaaaaagacagaggagtgacgaggtttcaggaaaatgccagtgaagggaaggcccctgcagaagacgtctttaagaagcccctgcctcctactgtgaagaaggaagagagtccccctccacctaaagtggtaaacccactgatcggcctcttgggtgaatatggaggagacagtgactatgaggaggaagaagaggaggaacagacccctcccccacagccccgcacagcacagccccagaagcgagaggagcaaaccaagaaggagaatgaagaagacaaactcactgactggaataaactggcttgtctgctttgcagaaggcagtttcccaataaagaagttctgatcaaacaccagcagctgtcagacctgcacaagcaaaacctggaaatccaccggaagataaaacagtctgagcaggagctagcctatctggaaaggagagaatgagagggaaagtttaaaggaagaggaaatgatcgcagggaaaagctccagtcttttgactctccagaaaggaaacggattaagtactccagggaaactgacagtgatcgtaaacttgttgataaagaagatatcgacactagcagcaaaggaggctgtgtccaacaggctactggctggaggaaagggacaggcctgggatatggccatcctggattggcttcatcagaggaggctgaaggccggatgaggggccccagtgttggagcctcaggaagaaccagcaaaagacagtccaacgagacttaccgagatgctgttcgaagagtcatgtttgctcgatataaagaactcgattaagaaaggagacaagttccatgggatacaacctccctcttgttttgtttgtctctccttttcttttgttactgttcttgctgctagaacttttttaaataaactttttttcaatgtaaaaaaaaaaaaaaaaaaaca

SEQ ID NO: 28599 - DNA, 2384 bp, Homo Sapiens
gggagtggttttaaattttatattttgtttgcttaagagggctggtgtgaaggcttgacatctccccgcctatcctccaccacacacacacacacacacacacacggagagagagagagaaacagagaaaagtggtggtttgtctcttgtgttgctgtggggttttgctgtgttttcgttttgaacaattttctaaaggtctgtttttccccattaggtgcgggagatgttaaagatgagggactccaatggggcccgcatgttgaccttgataacagagcaattcatggctgaccctcgcctgtcactttggcggcaacaaggcactgcaatgactgacaaatacaggcagctctgggatgagctgggtaagcatgtttcctcacaaattaccattgatttgcatatggataaataccatagtcagatgtttcaagaacatggtcgtagtattgctgaagagagagctgctcatgcatggaacgtgttgccaatatataggttagaagcataggaggatttagaacttgggctggcatttacagaaaacaaccttagcagggttttgggggaattgcctgatcttgaggaaagttaagtgcaggaatctccctttaagtatttggaaaaaaaaaagctgtattatttttaaatagcagttttatattgtagagctgattacttatttctagattaatattgtaattgattcggctaaaatttagagtctttcttcccccttctccccacactggaattattaaaattagttggatattcattttatttttggctgctatagatttaaatgaactgtcgatcctcagaatggaaaaatacagcaaattctaatatttattgcttcctaaattcctggtggttaaagatacaaatatagcaagtgttcaaaaaaatgagaaatccactagtcatgttcattaaaagaatactgggaattttatttggatgagtcttggtacccaatgttcatcgctagggaaataatgaatgatgtatttattatcttgtctttttattaagaaatctataagtgacacctgaaattttgacaaatatatcagtacctgtattaattttatgagaagtaatgttgtctatatttactagaagatcctagtcttagtgaaatttttcttggctaatgatggaccacatcatgctgattgatcccaggtgtagtctaaaccaaacgatgctgttgtccgtgaagataccaaatgaccatgactggaaggggtatttgagattagccgttttacaaataaggaaacaagtcccgagaggttaggagacttccacaacatgacactgtgtaatctagggttatgcagcaagttggtaaaggatgtgatatcagtattttctttttcctattaataggatatacgttcagaagttggctgtggacaagtttgctacttgtgaactattagatatttgttgactttttccctggcaattttcttaagtatcttgtaataacttaatcttgctgctttctgtgagtctcctgaaataatggtagtgcccttccccctaatcaaaatgtaaatcaatctgtaactacaatagatagtttcgatgtattagaatgatgtttggggggcacagtgtggtggttaaataacacaagtataatgcatggtttaaataagtattttcataaaatcctaaatgttttactttttaagtaaacctttttcaattttgtaactctagtatagacttgattggttagatgctttataaagtaaaaaggattagcattaagaaaactataatgaaggggatcatttaaggaaaaattactgaattaatattaaatgaatgcaatttaaagagctttggtacttagagagacttagaattacaaacgactgtttaggaagaaaataccaactaaattttttggttaccaaaaagggtactggtggtacatacagtcaaataaaatttgcagtgttcacatttaattcatggtcaaatgtcacttttccaagtgggttttgaaaattacgtaccttaaccctcaatcagaaatataaatttttattaggtggaagtttccaccagctgattctagttatgccctcttatggactactttctaattaaggaccaggctttatacaaattctttgatttcagtccagcgtaaagaccacaacttctcgtcctgtgtgccccccacccactgcccaatcattactagactgctagaaattctcctatgtactctgatggcaagcagaggtcacttgccattttaatggggtctaagttctgtgaagaatctcacgtagaagtaacagtaagtagcacatcttaatattcattcaccaaaaaaaaaaaaaaaaaaaaca

SEQ ID NO: 28600 - DNA, 2075 bp, Homo Sapiens
gacgaaggactggaaggtggcggtggtgaaggtgcaggccgttggggcggctcagaggcagccacttctttcttcctcatcactttgctgttttcggaaagcagttagtagttattcgctgtatgtggcttttgagccagatcggccctcttcattatgctaaacggcggaatcatctggagcgagatgtgactatgaaaggcttatattcccaacagagttccacagatgaagaaataacatttgtatttcaagaaaaggaagatcttcctgttacagaggataactttgtgaaacttcaagttaaagctcgtgctctgggccagataaatacaaagcttctggcagaagtgaagatgaaaaaggatttatttcctgttgggagagaaattgctggaattgtattagatgttggaagcaaggtatcattctttcaaccagatgatgaagtagttggaattttgcccctggactctgaagaccctggactttgtgaagttgttagagtacatgagcattacttggttcataaaccagaaaaggtcacatggacggaagcagcgggaagcattcgggatggagtgcgtgcctatacagctctgcattatcgttctcatctctctcctggaaaatcagtgctgataatggatggagcaagtgcatttggtacaatagctattcagttagcacatcatagaggagccaaagtgatttcaacagcatgcagccttgaagataagcagtgccttgaaagattcagacctcccatagcccgagtgattgatgtatctaatgggaaagttcatgttgctgaaagctgtttggaagaaacaggtggcctgggagtagatattgtcctagatgctggagtgagattatatagtaaagatgatgaaccagctgtaaaactacaactactaccacataaacatgatatcatcacacttcttggtgttggaggccactgggtaacaacagaagaaaaccttcagttggatcctccagatagccactgccttttcctcaagggagcaacgttagctttcctgaatgatgaagtttggaatttgtcaaatgtacaacagggaaaatatctttagtattccgagtgccttgcaagtattcatttaaacattaaaacagccttttgagatgtaagtactgttatcatccccatttcacaggtgaagaaacagaagcacagagacgttgatacagactcaaggacgcagcaagtggcggagcaagaatcacactcaggcagtctctctcctttctgaacagagatgagccctaagatacctggaagattttgtttttaacctcacattaaggaaagcacacatcaccttgaaaggttgcacacttactcctatgatggtgccattgcacagaaacatttcagaatacttttctaaattaaagagtttgtggagtgttttataaatatcaatgctaggaaatctttatcaaatgaagataggtttgactttttgaaacaaaagtcattcagagataagtctggtgtgattgaagccaaatcattccagttgagtaaaaataataaaaagtttggaatatacaaacaatttcaaaaagaaaggtgcaaacctctttagagtagggtcaacttaagaattccttttatttctaaaatgactggcttagaggcagcagcacttggtaaaagttttaatgtattggataaaaaaaaagttatcattacttgatagagcatatgtgtgtgtctgaagaaagatttacatagccttacacttctctctactgaatatcatacgttacttttcttaaatgtgtctagtcatatatgtgtgatatgtataaaggccagttccctccaggagcaatgacagtctttattcggagctttaaggtagttaatgtaggccgggcatggtggcacatgcctgtaatcccagctactcatgaggctgaggcagaagaatcgcttggacctgggaggcagaggtttcagtgagccaagattgcgctactacactccagcctggtgacagagtgagactccatctcaaaaaaaaaaaaaaaaaaaaaca

SEQ ID NO: 28601 - DNA, 3989 bp, Homo Sapiens
gtaatttttgaaaaatatatctgatatttcttcagtaaaaatggtgttgttttaataacttaataagaatgtttaaagattctttaagtctggcttatctagctaatgtgggcctattaaataataggcagacttctgccttccttatattctttagatcttctcaaatactccattccaatatccatcaaaagacttctctttatgccacttattatctatactagtttttaatgttcaattactacaagattataattactgtttttattcatgttcccaagaaaaatacataagattcacacccaacacacttcgaaatttatttcactccctttgactatatgtgattatcaaaaaagtatttttcaagatattaaaaataagtaaaggaaaatgaaatatttttaggacattcaaaatctaatgaagttcagtgtttctttaattgagggcaggcagaggtgggggagaatttcagaaggtagtgaacccaaaggtggattcttggataattctactattctgtactctcatcatcttaacccatctgtttactaccctaaccatagttactaagcagagttttatcataataatatagacagctctcaaagtattgacattcagaggggattacaaatattatttttctatcatattgacctaccatgtccacagtcttccttgaattaccttccagttttactgggctgcatctaccgtttatgtctagtttgactttttctgagttcaccaattgctgctaggaatgtgctggtcactcagcagcacacccacatcacaggggaagattttgaaatacctggacagtctgaacacactgctctgaatacactcaattctaagaagtaccagggaaccgcatcttcttgctgaaatcttgaatttttgtcagcttttttttttttactgtggacagtaaagctggaaagatctaaataacccaacaggaaatgcggatgaaagtgcaagagttggtttgtggtcatctggagtccatgtctccaagactgctggaccttcaaattctgcaacttgttagatcatctggatgatagcacaactgttagaagacctagaagaatacagcgttgctatgactcagtggtgttgaatgcagaccatctaccagctggggaaagaatcaattataaacaggaataaagggattcattcctcattttaactgatgttacagtgaagatgggttcttggactcttggaagcctggatgggccacctaatctgcaagataaaaaccaaagaccaatgcgtattggggaaaagaatgcttagtactgcaagactgttgaatacctgttgaatattcctattgaggttttttcctaaacatacttcagtaacatcttaggacaattcactggagaaatgttgatccctggctggaatgtcataccattgacccatttgaagagttaaagctggatttgactgctctattctaccaggaatattgttagggtagccttttaccagtttctaaacaattgtaatcatttattgactcagcaattcctcagataacaggtcaaaagatgtacagatacattctgaagttttcttgctattaaaggcacaagagtttccttgtattttgactgacaatgtagcatgtttccattttagtttgttagtgatggtggttttccctttgaaagccatttggcatattcaccataacaattagtttaatatgattacataagaaaactatgataaaacccagcaattttagtagttgtgaaaatacgttttttaaatcatgtttaagaagaattgcaagacttgaaaccaaatcctgatgggggaattctgtttaatcctgtttaatctgtttaatttctgtttaatccttagtttcttaacctgcatagcttatcctgtattgtactttttttcttttttaaactcccaaacaagaagcttgaaacttttcctgtattttaaaattgaaatttggtcacagggtatagtcagatttttattaaggtttggtttgacaacctttaaaagaaaggtttacctcgctaatacttcttaataacatgcatcaaatgatattccctatggtgaagtatattctcaaagttatgttatctttcatttttggcatttggtgcttatggacttagtacccaggcaacaaagatctattatgcacctactctcttgtatgttcgctattatttcccaaaaaaaaaaggggcatatatgcataagaaataaatattagaattattttgtttctcccacaaagcccatgggagatggcccaacaaatgtttaaaaagtaaaagaagctgggcacggtggctcccacctgtaacccccacactttgggaggccatggcgggtggatcacgaggtcaggagtttgagaccagcctggccaacacagtgaaaccgtgtctctactataaatacaaaaattagccaggcgtggtggcaggcacctatagtcccagctactcaggaggctgaggcaggagaatcgcttgaacccaggaggcagaggttgcggtgagccaagatcatgccactgccctccagcctgggtgacagagcgagactgtctccaaaaaaaaagaaaaaagaactaaaagaaaaggagcagtttatgattgaagaaaacatgacctgggctgaagaagtgaggattgattggagtgggctagaatgagctatagtttctagctcatttgtaaggaggtagacaaaggagcattggtgcctcagagtgggtgtctggtgagaggaaaaacggtgcttaagagattttcaggctattgctgtgggacaggcatattttctccctttgcctttagctgtagataaagtgtggttatgacctgaggcttcttgtattcaaacttggcctagggcctatgtagaggccctagggtctacttgtggtggaggagggaagtatttgtagaatgtgtaggcttgagaagtaaataaagccaaaaaagcatcacttgcttacatttttaaatgagtcacaaaacaatctttctaatgcggccggtaaagaagttttaaaggtctaaggtttctctacagaaattacatgcttctcaggtctttgtttagtaaaataatacagataattatgctttgaatgcatttattattaaagctaaccgttttaatttgtgtcagaaataatttgtgcctatggtaggattaaaattgtattctttagttaaagcaaagcaatctgtttttcattgatttgataaatatgtgaatgcctaatatgttctgcatatgtaaaaatgcagaaacatgctcatttgaattactaataattattttagtatgctgagaggctttgaattcactgtaccactccttcctagagtcattcaaaacagaaaaaattagttttaagtatagattcatgtttttctgttttaaaaagttgagctaatacttttcacaagagacgaaataacatgagccactataattattggctcagttccacccaatttccatattttgggtgtaatttaaaatttttgacttggaattttaactttttttttgttttgattttttaccaggtttctaagcatgaattgaggaacagaagaagcagagcagatgatcggagcagcatttgtttctccccaaatctagaaattttagttcatatgtacactagccagtggttgtggacaaccatttacttggtgtaaagaacttaatttcagtataaactgactctgggcagcattggtgatgctgtatcctgagttgtagcctctgtaattgtgaatattaactgagatagtgaaacatggtgtccgattttctattgcattttttcaagtggaaaagttaactaaatggttgacacacaaaaattggtggagaaattgtgcatatgccaattttttgttaaaaccttttgttttgaaaaaaaaaaaaaaaaaaca

SEQ ID NO: 28602 - DNA, 7134 bp, Homo Sapiens
gactgagcagaatggtgccattgcagatcaacacgcactttaaataatcaaaacccctatctttcccctgggaaggaggaagccgaggaaggctgtgtttctgactcacacgggggagtcgggggagtcgtaaacaaccctgaagagaacagccaggcctggtgagtcactcctgggagtggctcctccccaccctgccacgcagcggcaactgcgggctgggcctaccccctggtggccacgctccctccgcacccggcctctctctgtggcatgggggcggccatgccccttggtggagatgaatgggagtggagctgggctggctgggcaggcaggggcttgcctcttgctgactaaggcagccctggaggggcccgaccatggggcaggaacccagttgccatcctcagagcgaggatcattggccgggctcggggatcagggcctctgtggtcccggcacgcctggcccgtgagactgtactctgcacgactcctccaggtggccagggtcaccggaactggctcgctctcctctgcccgttgccggaggtctgggcaccaggccaattctcaccttcccgccagggttaaacattagtgggaggttatcagtgtgggccaggggagggagaggggggaattcaactctgtctcctctgctggagccaccagttcccgcaagcccagacaatgccggtggaggaatttgtggctggctggatctctggtgagacatttttcttccttctgtcacatcacacccaatggtaggtcacttcctcgggaagatgggtgacatgggaggagcagagaccaaagtctgagttccggcctggcgggaggatcacttgagcccaggagtttgagaccagtctgggcaacatagggaggcccctgtctctacaaaaaaatcaaaataattagctgggcatggtggctcacacctgtagtcccagctacttaggaggattgcttgagctcaggagttcaaggctgcagtgagctatgactgcaccactgcactccagcctgggtgacagaatgagaccctgccacaaaaaaaaaaaaaaaaaaaaaaaaaagaatcagggcatggtggctcacacctgtaatcccagcactttgcgaggctgaggtaggaggatcacttggggccaggagtttgagaccagcctgggcaacataggaagaccctgtctttataagaaatgagaggctgggcgcggtggctcatgcctgtaagcccagcactttgggaggctgaggtaggtggatcatgaggtcaagatttcgagaccagcctggccaacatggtgaaaccccgtctctactaaaaatacaaaaattagccaggcgcggtggcgcacgcctgtggtcccaactactccagaggctgaggtggaaggagcccttaagctcaggaggttgaagctgcaatgagccatgatcatgccactgcactccagcctggacaacaccagcaagaccctgtgtcaaaaaaaaaagtctgggttccgtggagcaccccagagccagctgtccccagtcctctggggagtggccgatgggaagaagggaggaaggcacaggtgggagggtgctgcctctgccttccaaggccgctctgcctgacacctgcagagggcgggagagccaggtgagcaccctataccttgagccctgctctccaggcccaccctgttgggcttacaaaggaagttcacctttgacctcacctgctgtcctgagtcccctctgggcctctgccccacctggctgtgggccgcagtcccgggccctgaggcctgttgtgctgtggtcccagcccagcttctgggtggcattcctcttaggagaaagagagggacgttctgaacctgcctcctgggggtgcgacctcccccaaactccagaaccagcctctgctgtggagggcagggctaggcagtgggcaggtggaggggaggggagaagctcctctgcaggtgcccaggcatgacccccatcagggccctgcagttctgcgtggccagctggcagcagggcctgctctggatcccggcgacgacattatgagttgaagaaagaagagtaaagctctcggagaggtgggaacctgggtgattctcccagagtcccgcggctcataggcggtgggatacccgggtatgggctccagcgaggacacgtacgtctttggctggctcttccctcttgggtgtgcatcctcaggtggggcctggggtcttactcccttgtcccagtgccttcctggcccagtgcctgtgtggagggggtggcaggggcagctggagtctctagagcttggcaggaaggtggctgcatgtgtctgagatggccctgctctccttcctcctgcctgaacccctctttcctcttggcacagacttgcttcctgggcctggcacgagggccctcactcatagcaccctcttgtcaccacaggcgctctgggcttggtcctgggacacccgtttgacactgtaaaggtgaggctgcagacccagaccacctaccggggcatcgttgattgcatggtcaagatttaccgccatgagtccgtgagtggcccactcctttggggtccttcccctttcggggaggcatctggggctgttggtaccagcttccctctccagcagggttctgctcctggaggagagaagaccaagtctgggatccttggggggcctgggtggtagcttagcaccccagaggcgcagcctcagcccatccctgcctgtccccacttccctgtggcaggacttgggagcagtttccagccagaggctgccttgccaggggtggagaggacaaaggggaggccccacggtgcctactctgctgccactgtgtctctctgcagctccagggcttcttcaagggaatgagcttccccattgccagcatagctgtggtcaactctgtcctgtttggggtctatagcaacaccctgctggtgctcacggccacctcccaccaggagcggcgggcccagccgcccagctacatgcacatcttcctagcgggctgcaccggggggttcctgcaggtgagggggcagtgagtgggcacacacaggtgtcatagggatggtcatctcgatctgtcctctcccaccctgccctggcgacccacagctgtggaggcataggcctcttggacgggaacaagaggcctgtgctatggccttccaggctgcaggcctctgggggagggctgtggggaacagagggggcaaaaggcagagacagctggtgggcagtgccaagagggtgctgggagaagcagcctgggccactcgctccagctgacggggcttgcccccctccagaggggtctgccagcctcagagctgtggggagcccactccccaaggagacctttgaccctggagaaccaccagcaccccgcagagctgtgagcccagcccctctggccgggtcctgatgaggtcctgacactcccctggccctgcctggctctacactttgcctgcagtgcttgggtgcccatgacctgggagcctcacctgaggcccagcccagcagggcattaaccattcaggcactgccgtcatctgggctttgggctttagaggggtggatggagggaagagggaccagctgccgccagtgggaaccggtgctgaatgggtcctgtgagcataagcagggagagggtgcgcccggcacccactgacaccccagccgcaagccagggtcgccctctcctgggcagctgcccccagttccttgtcacacttcatggggcagagagcaaggacaaaggacaaagtcaggctgctccttcaaatgaattaatgattaatgagacccccggaggccccggcttttcttctgccccttcttgtgcgaggtgccacctataggtttcctgagccccgcgagccacatcccacaaacacaaggaagagaaccgaagccctaagctaagtggccaggcccggcttctaagtcaccctgcccccccagctctttggaaagcagaagtggggactgtgagggccgctgatggagcctgggtttacagtgaaacctgtggctttagtttaacagagtcttaaaggaaaaatgtgttttagtgtggagtgggaagaagaggcagggactgacagcctctgacgggcacagacgttgccctggtcttcgccgaagctgaccttctgaaatggcatctgacactccaccacccctgtgggggtgtctgtcacctggtgtcagcctagccctgtcctcagcccccaggagctcagggctcagaacacctcctgaagccctgagctcagccctgccagcacgctctagagggtggcacaaggccccatctcccaagggatggtacctaacctacgacccttactcctgggaccaaagtaaacaagcgaagacttggcctgccacaccctaagtaccaccacccaccaccagaggcgaccgccagcccccgtcgccatcagccatctccagggctgaggaactgagcccatgtacctgtcacaaaacaaacaagcaaaaaacagataaatccctcagagacaggctagccttgacatggaccccgattctcacctggactccaaaagctatcttgacctactggcatctctgacccaaatcttaattgcccccatcgccctctacatccccccagcactgaccctcaccaggactccagccccaattccatcccaaatctgtgtagcatctgcttctgccgattctaagagccctagcacctgccaagtccccccattacccaccttcccacactcagaagcctctttggtgggatgctaatgggaaggagtcttgcctctctggaggcaggaggggctggccttgtgcccctccgggcctctgagaggtgggcgcaggagaacagcactcacgaggggacctccttcaccctgggaaagggtggtttctttgctatttcacagtcacaggctgaatccttcacttggccctgcccaccgtacaggtatgctcactgccggctttagggaggccagaaaccaacctgctcctgcaaaagaatccaggcttgttctgagtgcctgctgtaggccaggcaagttggtcactgttgcatgaggggcagtgcctctcactcttgggcctgatgccaagggaggtggcctgtcccggtcgcatgcagacatcctggccatcccagccacacatgcacgtgagaggctgggtgccggcagggttcctgagggactggaagatgtggccccctgcctgcctccttcctcttgtgaatataaggggccagttcccagcccaaagccccacccggggccctcatgtttcatcaccaacaggcctactgtctggctccctttgacctcatcaaagtccggctacaaaaccagacagagccaagggcccagccagggagccccccaccccggtaccaggggcccgtgcactgtgcagcctccatcttccgggaggaggggccccgggggctgttccgaggagcctgggccctgacgctgagggacacccccacggtggggatctacttcatcacctatgaagggctctgtcgccagtacacaccagaaggccagaatcccagctcagccacggtgctggtggcagggggctttgcaggcattgcttcctgggtggcagccacgcccttagacgtgatcaagtcccggatgcagatggatggactgagacgcagagtgtaccaggggatgctggactgcatggtgagcagcatccggcaggaaggactgggagtcttcttccggggggtcaccatcaacagtgcccgcgcctttcccgtcaatgctgtcaccttcctcagctacgaatatctcctccgctggtggggatgagccctgcggcaatgccagcagctccccatcaggcccacggcctggaggccagtttgagattggaggccaggttgaaagcttgcaaatcagtgcaagaggctcagcccttcctaaccaaggtgcctcccacccgcgcagatctgggctgggcagacacctgtgggagccggaagccagggggcctgtgcagcctccctgtgtagctggccttgactcctttgcctcccacatctgtgaaacagggagcatgaggcacaagtgagctggcaagtggtgctggtgacatcccagctcctgtcctgtgccttcacctcttttttttttttttttttttttgagatggagtctttctctgtcacccaggctggaatgcagtggcgtgatctcggctcactgcaacctccgcctttccaccttccgggttcaagcaactctcctgcctcagcctcccaagtagctgggactataggcgcccgccaccacacccagctaaatttttgtatttttagtagagacagggtttcaccatgtcagccaggatggtcttgatctcctgactttgtgatccgcccgcgtcggcctctcaaagtgctgggattacaggcgtgagccaccgcgcccggctgccttcacctcttaaggagctctgagactccacttctgagagtccctgcggcctcccacctccctgcctttcaaagctctctcccccatgacccaggataaccctatgtctcctcccccagaatccttcagtggctctcatcaccttcaggaaaagcccaaactccttccaccctccaggttcctccctccccacgaggctttgttctcctggggttgcttcctggaccctgaacaagttgtgctctcattggccgggcctggccagcagtgcacagtgcctggcaggttgactctaccatccccggggctggccccgctctcctccgagacccaggctgagcccagtcccctcacccttccttgacttacctccccacctgaggctgactttggggttcccagacaccctacccacacacatgccttgatcatagcacttgcatgcgcttcttcagagtcattaatttgcttctcggcttccccactggactgtgagctgcctgaggtcagggattgcgctttggatggtttccagcctgagcctggtgcttgaacagacgtgtgcaataaatgctcgttaaatgaaaaaaaaaaaaaaaaaaa

SEQ ID NO: 28603 - DNA, 1841 bp, Homo Sapiens
ggggactccggacactgacagccgcgtggtacaaaataaacgtgtatttgttgttcttatcagtcccgtttcagtacaacactggcagagatgattctagattaactatcccagtaaaagatatgatattttccatagatacctccagaatttttttcagcaaatggaatggttctacagtgtttcccaatatagacagccatttgcataccatatgtaccacacacgcctaggaaataatgaatcacatgaagtgttagaactagaaagtgtcttggcgatctgtttgctccaatcacctcattttaaaattggtgctttccacaacatgcatcgagaccatcttggagcatttacttttgaagcattttgtttaagaccccggataagaaaatgagggcaaaagaggtgaagtgacttgtccaagatcaacagtgaattattagttggaacgccagcctgatactcctagctatatctcactggaaaagcattggagaaaatgaaaccattttaatattctaagcttaaataatagttataataggctaggtgtggcggctcacgcctgtaatcctggcactttgggaggccgaggcgggcagatggcttgagcccaggaatttgagaccaggctgggcaacatgggaagaccgcgtctccataaaaaatacaaaatttagccggacgtggtggcgcgcacctgtagttccagctactctggggctgaggcgcaaggatcacttgagcctgggaggtcaaggctgcagtgagccgagatcgtgccactgcactccaacctgggcaaccggagtgagaccctgtctgcaaataataataataataataataaatagttttacaagcgttaatttatgttttaacccccaaaaggaggcactgctatgcccattttacagatgaggatattgaggcacagaataaagagcagagccagaatttgaacctagacaatcagcatttcactcattactcttatgtaggtaataccacagtgtctaaagggctcgctattaaagttgcgagtattgtgcaacttctctctgaaactgttgacactgaagttcgtgtctacttgcattcctcatcctgcttttggtgaaaaaacaaattgcttgaaatgaataatttattatctcatgctaataacttcaggcattgagatgagctgatgggtctaaagctctgaggaggaagctaaccggcctcagaatcatagaaatgggtgccagccttgttgtaaccaggtgagtttatctgctggaacaggcagtggagagtgtacagatagcatggttttacctctggcttctgataataattccagatttaacaatcctgttttagaggacgattttccctcatcccttgaattcactgccagcagggcatttttttcttttttttatgcaaataggaaaatgcatcctaaatgagggtttaaaaaattgaaaatatttaaatatacaggatggtgttaaatatgactccattatcaatctggattcagaaatggtttctgctttattttatttcattttatcttttagaaacaaggcgtcactctgtcacccaggctggagtgcagtggtgtgatcatagctcactgcagcctctacctcctgacacaagctgtcatcccgctttggcttctcaaagtgctaggattataggcgtgagccaccatgcccgaccagtttctgcttttattaaaattgttcacagttttatacattcatgttcattaaaaatgctatttagaaaagagtttgataaaataaatattatacaaaattcgaagaaaaaaaaaaaaaaaaaca

SEQ ID NO: 28604 - DNA, 4303 bp, Homo Sapiens
gtaactagatagaagaagaagggttttgagaaacatgatgggttttggaggaatgtacaaagttagatttggaaaattcttcttatgaaatacacatataaattgtatcattttaatatggtcttcttaacggttaactgtctatgtttccagatgatgtcctaaaatagtcgttccttgcagctggtactgaagagtgtatgaaagaaaaactctgtaacagatgtgtctggtcctgtatgaatcaatatctgtagcaatggcttttatatatgtggaatcagaaggctcaggaaacaattttaatgttctgttaggttctttaaaatggggatacattcaggtctcagttgttgaggctgttgagcagcaatccaggtatgaaaatgggaaagatttgactgcttctctcatgcaggggaataaagcaaaggcacgtgcagagggaagtaggggtagagagaggcaagttagcttcagagagatttatttgcacccagttctgttctactcagcctgacgttttgtcatctttttgaaaagtggcgtgaagtggtgtggaacacatcagagggtgaagccaagcaaatctgaaagagagcagaggatttcatatgatatcctatgtgtgctttccccttccttcttaggagctggaagaggcagaattgatgtccactcaatttcagttcatcttgccaccttcatattatactgatactaatatatgtgaaataagaagagaacattccaggcagttactatgtcacatgcagtcatcagtttctctgcaaccctacaaccacaggggattccattgcttgctttgacttggacttctcataaaatgactttcgttggatttagtgtacaatttttaagttaattactgattttgtatatatgtggtattgtatctttgaaagctcatatgagtttattagggattttcagaattatcaactaaatctggctagaaaaaaaattatctgatgaaaaacctttctggtaacttaataaaaatggggtgatagcaagtgtaaatgccagttaaatcctgggtgctggtgtgtgtgaatacatgaatacatgtgtatggttgaaggaaataatttgtaaatcatagctttcctagtattacgtgtcccttcataaaatagctcagagttttctcatgaaaaataaattgacatttgagacaaaagtttgaacttgctggtgttccattcaaattgaataatgtacagctaatgattatttttggatgccttccagagacagatgggaccgtgttcagaattcacacaaaagctgaaggatttatggatgcggatatacctctggaattggtgttccatttgccagtcaattatccttcatgtctacctggtatctcgattaactctgaacagttgaccagggcccagtgtgtgactgtgaaagagaatttacttgagcaagcagagagccttttgtcggagcctatggttcatgagctggttctctggattcagcagaatctcaggcatatcctcagccaaccagaaactggcagtggcagtgaaaagtgtactttttcaacaagcacgaccatggatgatggattgtggataactcttttgcatttagatcacatgagagcaaagactaaatatgtcaaaattgtggagaagtgggcttcagatttaaggctgacaggaagactgatgttcatgggtaaaataatactgattttactacagggagacagaaacaacctcaaggtgccaagaagttaaatgttgagtatgaatctggctattttctgctttaaatggtgtgtctttaagtgtgttttataacaatgggatagattaattattaagatgtttctgctttcattattacaatcttaatggatcttccttttctttttaaagaatgtctgactgctaattacaagtacaaacttgcaaagcttgaagaataagattgcattttaaaaatcatgtcacttaataaagtgacaggttatttaaaagctctgtggcacatgagtgtttgtttctgtaattagctatgagcttgaattttataaatgtgcactaaaagtttgtgcatattaatatttcttcccatagttaggcacagcaaggtgtgtatttgtggatagtctgcaagatttgtaactttctggctgttaaaaatacattctgacactttaatttggtatctataatacctggaaagaggagcttgtctgttataaccgagatttcatgttagtagaagtagaatcattagggctgtcaacttgtcacctcctacctaacttttgctttccacctgacttgtctcagcagttgctttcaaaatcatcatcttcttcagatttttcaagttcttattctaaactcatctgacctgttttaggtgggacaagatgaggaaaactgttttttatattttaaatattagaagagctacaaatcaataggttttatactttcagataggttaggtcatgaataattacatttgaatttatttaagacaaatttagtgtgaacagtgaatttatttaagacaaatcttaaagatttgtagaataatgacttagttttttcatgatgggctcttaccacaaaactgctttggcatttggttaaccagactcatgctgggttaaagtatatagatataacagtaattcagatttaatgcatatcttggattgggactgactgaggaacctcttgttttaaagtgatttgtagtatatctataacgtttgatccttttgggtaaaatagtagctgacaaaaaataaatacaaattaattttcatgctcatctttacctgaaagactcagatttctctttaagccagctcaggaatattaggctaaacccagctgttttgcagatgttcttactcagattgaaacatcaattaattaacaggtatctattcatatttaactagaaccctgctaatgtagagaaataatacttttttaggagatcttttttcagttctctctaaaatgtcattttatataaatttctcttatatttttataagattgtatactaggattgaggatgtataggtacatatttatagatgctatcaatttggaatggtaagtgctgtgtgcctggtaatgtcatttagctgctgaacttgtaatagtaagaacagtggcttgtgctctcaagtgagccatggcgctatatctagatactcctctagtgctttgcatgtattatctcatttaattagtacaacttccccatgaggtagatcctgctattaattccattttatggagaaggcaactgagccacagaggatttaagtaaccagcccagagtaagaactagtaggcagttcaatccagatttaaacttgaggagttggattatattgttctttactcctgtatccaccactacattattctgccaagtatgttaaaacaagtatataaaaattcttactgcttgatttaaaaagggggtatttaagcatgaaaataagcctacaggtttatagctcctttaaaactgggactttgagactcagagtaagatatgtatttaatgtactgatttattatttaggagtacttgattcttcagaaaacctccaaagtagatgtggactcaagtggaaagaaatgcaaagagaaaatgattagtgtactgtttgaaacaaaagtacagacagaacacaaaaggtataatttagtactattgcagatggaaaagcaactgaatcgataattatactctgacaaatctaggcatattcatgagtttcttttgtataatgcaggtttctggcatttgaagtcaaagagtattcagcgttggatgaattacaaaaggaatttgaaactgcaggacttaagaagcttttctccgaatttgtacttgctctggtaaaatgaaatggaagacaggaatcttttagtaaaatagaagtgttttttgttgtttttgcattggatttggggagtggttaattgaaatagtcaattttaaagtttctctgaagcaaaatgataggcatcattctaacttcaggaacaaaagccagttctgttttatgaaatattaaacatgaagaaaacttgtatattctaatgtttgccaggaaaggctaggttcagtagatgagacattatttaaaagataaatttaaaaagatggtaaatgaacacttgtttttatagacaatatttgtttgaaactatgtaattttctggctaattttcttgtaattaaatgattttttaaaaaaaaaaaaaaaaaaaca

SEQ ID NO: 28605 - DNA, 1998 bp, Homo Sapiens
gtgttgtgacagctgctgttcccatcccagctcagaagacacccttcaaccctgggatgaccacaattccttccaatttctgcggctccatcctaagccaaataaattatactttaacaaactattcaactgatttacaacacacatgatgactgaggcattcgggaaccccttcatccaaaagaataaacttttaaatggatataaatgatttttaactcgttccaatatgccttataaaccacttaacctgattctgtgacagttgcatgatttaacccaatgggacaagttacagtgttcaattcaatactataggctgtagagtgaaagtcaaatcaccatatacaggtgctttaaatttaataacaagttgtgaaatataatagagattgaaatgttggttgtatgtggtaaatgtaagagtaatacagtctcttgtactttcctcactgttttgggtactgcatattattgaatggcccctatcattcatgacatcttgagttttcttgaaaagacaatagagtgtaacaaatattttgtcagaaatcccattatcaaatcatgagttgaaagattttgactattgaaaaccaaattctagaacttactatcagtattcttattttcaaaggaaataattttctaaatatttgattttcagaatcagttttttaatagtaaagttaacataccatatagatttttttttacttttatattctactctgaagttattttatgcttttcttatcaatttcaaatctcaaaaatcacagctcttatctagagtatcataatattgctatatttgttcatatgtggagtgacaaattttgaaaagtagagtgcttccttttttattgagatgtgacagtctttacatggttaggaataagtgacagttaagtgaatatcacaattactagtatgttggtttttctgcttcattcctaagtattacgtttctttattgcagatgtcagatcaaaaagtcacctgtaggttgaaaaagctaccgtattccattttgtaaaaataacaataataataataataataattagttttaagctcatttcccacttcaatgcaatactgaaaactggctaaaaataccaaatcaatatactgctaatggtactttgaagagtatgcaaaactggaaggccaggaggaggcaaataatatgtctttccgatggtgtctcccaagtgttggtgctttgggtttttataagttgtgaaaaggaagatgcacatttcttcattctccatggtgtgcatggaaatgtgtttgagtgtggatgcaaaagaaatcgagtaataaagaattagctggcttgtgaaatagtgcagtgttggatgcttcaaggggtataatcctattttattagcacaaacttgctagctaattagagtttatctttttagaaaggacaccgtataggttcgtaaaaaaatatttacaggaagcaaaatagatctattactactttaccgactttaccccctttctttaatttgtataatttttgtactatatatcgatgtgtaaatgtttagagtcttcattatgaaaatatcaataaatatttcattagtttacatttaactctggtataaaatgaaacttttaaaaataagtgaaatggatgatttcccagtggaagtatgtcaacagtcttaagatcattgccagatttcataaaatatttaagtatttgaaaaagaaacaaaatgtcttcatactttagggaaacgaataccctgtataccttctgtacaaatgtttgtgttttcattgttacactttggggttttacttttgcaatgtgacccatgttgggcatttttatataatcaacaactaaatcttttgccaaatgcatgcttgccttttattttctaatatatgataataacgagcaataaaaaaaaaaaaaaaaaaaaaaaaaaaaaaaaaaaaaaaaagaaaaaaaaaaaaaaaaaaaca

SEQ ID NO: 28606 - DNA, 4554 bp, Homo Sapiens
gttgttgacggacgccacccctctttccctcggcacctgtgcctgtcctctctgaacctgccactgccatcgttgtgaagaatcagaagcccggaagccagaagtgtggctggcctgcggggggtggagaagctgcagtgtgccctttgcttttcttttaggactccatccccgtgtctacctccctccttggagacacttccgacacgacctctactggccttgcccagcgcctaggtatgtacccacagctggcgctgcatggccagccaggtggggcccactctttaatggaaccatgaagcaagtcccttcggaagtaaagcatctttatgctaagaaccgtcacctcattgctgctgggaagcacagacctttgcacgttgggtcttatttaaggggcacattccatgctcgcctgtcatcaccaccgtcccagggctggcctgttcccaaaggactcccacctcgtccttgggtgtgtccttgagtccatgagctgatttagttgccttccgtaagtgcatcacctcctcctgggaggagagcatgagaagtgcccacagcccctgtgggtggtggctcaaggtagcctcccgggccttaggaggagtcagtgcagctggtggagcaggtgtcacctctgtgcaggaaggactgtcctcactcagtgtgataccgttcagggctcggagggaagactggcctggcctgtgagtgtggcgtagagcggggattaagcaaacgtcatgaggctgaatgctccacttctcccacaccccaacacacttcctgtgggccaggtaaggcttccatgtgctctgcaacccccagccccagtgcctgtggccagtgtgcacaggatgcctgtctcctgcccaggcctggcgttctccagtaggcccagctgcttccgctctggagtcttctctgtgtctcaggcacaggacctggtacctgacaagcaggaacctctgtgtcagtcacactgaggcaaatgcacacgaatagcatggcacgtggcccagggggaaggcagggcagggtggagtgtcaccagcaggcccatgacagtatgtggataggacaggtcagggagggcacaggtcagcatttcaggaactcgcagtattctttttccctcccttggaggtggggacctgacttgtaagttaatttggtaatttttaactaggaagtaaatttaaaatttacagaaaagttgcaaagaagatagaatttctgcttagcttttgccccaatttcccacttgccacccttccctctttgtgtttgtatctttttttttctgagccacatgaaagtaaagccgccttttgtgtctgtgtcactctgtgtgtgtgactgtgtaaggggtagcacacttacatggaacaggttactgcgtgtgggagaaggctcaggaaggtattcatatttatacagacggaaagctgggtggggttgcggacacactcccatagagaaggcggtgtgagcttgtctggcaggccgtgaataactttcatatcaataaggtaaattagtctccagaatatttgcgagatggaggcctagtatctatatgcaaaaaagaggggttcccagtatctcgactgtctcgacaagtcacgggtgtgccgtggcttccagcgtctcttaaaggactggtgctgcagatctcggaccaagaaggttttccagcaaagtcccatgctttgccagttgccttgagcctgggtctgggccctcaagttgaatattaatgcactataatgaaaagggagaggtgtcctgaatcagtatcttatatgagagatgaaagcaggtagggaaagagaaggcctggggggttctcagtagctctggaagcatcgcaggagttggtgtggccaaggggacccaacctcctatggccctggaggggcacagcttgggtctgaggggctcagtgcctccagacacagcgttgttcctcagaaatcctgtctctgcagttagaacagttggaataccaggggggcccccttggggtaaagggggatgttcctgcccctgggatatagggcagggtgtgacttacaggctcctcctaggcagccttggtgagccccagcttcttaccacactgcctgctttagatcaccctctacatgagtggtcccagcctgcctaacacagctaggaaaggatgaggttggtccctaatggtgggggaagcctaagaggcttcctcactccccgcagggctgagcagataactgggcacaactctccgcctcaggggcacactgcacccagcacactggtgggaggctctgtgctaagtactgtaagctgttctttaaacaccagctcttggaataaccgaacagctgcctttgtccagacacattccttttttttttttaataaaaaaacagctttaccgagacgtaaacacatgtcatacaattcagcagctgtcctcaggcagaggctgtgcttgccgccgccttgcttttccataggtgcgttggctgccttgtaaggacagtcagtgagttaatacccaagacctttccagccctaaaaatcacgcagccttgtacagcggaaaaacaggcttttggggtcctgggctctccctttcctcaatttccaaacaaagctgggagaggtttccaggccacggtggggactgggcctgctcctgcacctgtgcccctgagccacactgcctctcagggttcttggtgggaccatagctcagatggcagcaactgaaaggacagaactgctgcccagatgagatcccatgatgtgtgttctaaatcggcctttagtaatggtgcaggtggcctggtgccctcagcctcaccgcaccacccttttgccttttggtgatgaggctaagtacatgcttgccatatgttgaggtgggggcgggtcagtgcttctccaggggtgagtagttctgcactggccctgcgtatgggtgaggctaaaggaggaggccgcacagtggggcaggcaacatccaactgctttagcctttttgcccacgtattttcaggatattggctttcagattgcaggtatatgactctgcttgatttttgcagttggcccgatgtgcacctcagccattttctattgattctgtagaaagggactcaaacttacattcggtagaaaattacgtgtgtgtccatatgcctatctgtgcgcacacacacacacacaaatatatttgtgtgtatacacatatatgcaaatgcatggaaatgtaggagggagggaagtggaactggttggggtggggtggtgctgaaggagaactttaatattttattttaaatactttattattttttttttgagacggagtcttgctctatcgcccaggctggagtgcagtggcgcgatctcggctcactgcaagctccgcctcccgggttcacgccattctcctgcctcagcctcctgagtagctgggactacaggcgcccgccaccacgcccggctaattttttgtatttttagtagagacggggtttcaacgtgttagccaggatggtctcgatctcctgaccttatgatccacccgtctcggcctcccaaagtgctgggattatgggcgtgagccaccgctcccggccattttttgtgtttaaattttttttttttttttaaatcaaaacaccagaaacccctctgtgtagggcagaggttcttaagcagtgcggggcacctgcaggatctgttccagcagacagctggccccaaatcctggctttctgggtcaagagggctgggtggggcccaggagctgcctctcgaacaagttccagggaggctgctgaggtggggcctgcccttcagaagcccgggtctggtggagagactgggagaggcctgagtgactcgtctgcatttgcagcacctgtctgaagagaggcatggagattagagctttcttctctccccacaaccccatcctctttctgagcatttcccagctgcacgtggctgtgaggaacacggggcctgcagtatttcaggagtggctgtatcaatgtgttttctctttttagccaggaagaccaacaaacaggtgtttgtcagctataaccttcagaacacagacagtaacttcgcattacttgtagaaaacaggatcaaggaagagatggaggctttccccgaaaagttctagctgagtggcagaagtgagaatttgtaaacttatgtacaatgtacgtgtaaataaatggattgaatttcagtttgtcatcaggccgcgctcccgttttgtttttaaggggttaatcttttgagcttccttctcagcagtgtgtgggccaaaaggctcatactgacccacctggtgaaggagaggcaaagtgggcagtatatacttcctcatttggctgtgagtgatagagggatgaaatgggatttttgttgggattgaagactgtaatctaagagtttcaatcagacatgactgtaacgtgcatcctcaattagaattaaagtgatatataaataaaaaaaaaaaaaaaaaaaaca

SEQ ID NO: 28607 - DNA, 2757 bp, Homo Sapiens
catggctaagtgcccgggttcgtcctactcaaactgaacactagtcgcagggtcccacgattctcttccgtgacccacagcttctaatagagctataacacccaccgcatggcccaagttccattccttggaatctgtgaggccaagaaccccagatgagagaacaaaaaccttgcctccgtcttgggcgtggcccacctccatcttgggagctctaagaacaaagacctactgataacgttaggtcctcattaaatgtttggtaaaatttactcatgaagtcaccaggctttgctttagtggaagacttgtattgctaattctgtctccttatgtatatatgatctgttcagattttctatttttttctgatttagttggtagattttgcttgtctatgcaattacccatttcttgaggattttccaatgtaggagcatataattgttcatagtagtctcttacgattctttgtgtttttgtggtatcaattgtaatgtcttctcttttgaattgtgttcgagacatcttttttcttctttttaagttagtctggctaacgtacgctgttttgtcatctcagtgaaccaatgcttagttgcttagttgcattgatcttttctgttgtctttctgctccctatttgtgtatttctgtgctttcttactttcttccttctactgattttcggttgttttggtttttcttttttatattcttgagatgtaacagtaacttatctatttgatatctttttggatgtaggtatttattgctataaacttccctcttggaactgctttttcttcattctttaaattctgatgtggttttatagtattcatctcataagacttaccttttacagttaaaatgttctaatttaagctgatagtaccttaattttattacctcatgaagactcttcatttgtttcatattttatatgttctgctgttgaagggaagattctattatctggtaggtatatctagtctaaagtgttgttctaattcactaattcaatagaactgttggttctattgaaatgtcccattgttactaaatggaagttcgtagaatctttccaatctattacatcgttatatatataggtatgctgatgaagggagtgtgcatttttacaattggtacagaattttaattaactgaccctattatcataatagtattcccccacgctctttacaggttttgactggaagcctttttttctgatatgagcatagcaacatctcctcttttgcttggaataacttttttaatcagcttttttaaaaaatagcttttttaaacatttaattttaatgttgattccaagcaaatcaacatttgcttggaatagcttttttaatctctttactctcagtctctgtgtgttgttaagtctaatgtgagtgtctcgttagtggcgccatattgtttaatattttttgttcttttttttttaatctaacttgactttctgtgtcttttgattgaagaatccatgtagttaacaacttactacttgcattttgttaatttttgactgactgttttgttctcttctacactttcagtctttgtttttgattagttgtgttttatcagtggtatatttttgtctcttgtgtaactactagagattttttttctattacctagcatggttcttatgtaaaacatcttgtattctaatttaagctgatagtacgttaattactatatgaagactctaccttttcatttcccaccttttatgttattaatattatactatgcaactatttgtattgggtatccactaaggagttctgtatagtatagttgttattaatacatctcttatttatatttgtatactaattttaatagtaatttaaacattacttttagagtaggagagaatactgtattgactgttcatttaactttactggagagccatatgttttgttattattatttatcatgctcttgtttcacatggaaaaactctttagacatttcttgttaagtcttgtctgatggtgacaaattctcaaattttgtttgtgttaaaatgtacttacctgtttttttattgctgaaatacagctttgcagtttagagtatttttaataagcttttttaaattttattttagcactttcaacatgtcatcccactttctactcacttgcaagtattttgttaagaagtttcctgatagccttacctagaagacccctttgagtttatcctcttgctgctttcaagattcttttcatctttgatatttacaatttgattaatgtgtcttggagtattctcttttaaattgatcctaattgtggcattttgaatttcttgagttcatatcccgcctagaattcgggaagtgtttgtacagtacatatttaaataagcttcctggtcttctttctctcctcttttgggtacactcataattgttatatttatgcatggatgtggtgccacagatcacttttaaccttttcctctttttttttttcccaatcatttgttgttgttgttcctctaattggctaattttcatctgactgctatttgagcttgtcagttctttcttctgcatgatcagctatgctgttgtaactattgaaattttaaatctaatattaaattgtaaatatttaaaaaaaaaaaaaaaaaaaaaaaaaaaaaaaaaaaaaaaaaaaaaaaaaaaaaaaaaaaaaaaaaaaaaaaaaaaaaaaaaaaaaaaaaaaaaaa

SEQ ID NO: 28608 - DNA, 5536 bp, Homo Sapiens
cttccgggtggagttcagtgaaagggcagctaaggagagagtgttgaaaaaaggagagcaccaaatacttgttgacgaaaaacctgtgcccattttcctggtacccactgaaaattcaataaagaagaacacgagacctcaaatttcttcactgacacaatcacaagcagaaacaccgtctggtgatatgcatcaacatgaaggacatattcctaatgctgtggattcctgtctccaaaagatctttcttactgtaacagctgacctgaactgtaacctgttctccaaagagcagagggcatacataaccacactgtgccctagtatcagaaaaatggaaggtcacgatggaattgagaaggtgtgtggtgacttccaagacattgaaagaatacatcaatttttgagtgagcagttcctggaaagtgagcagaaacaacaattttccccttcaatgacagagaggaagccactcagtcagcaggagagggacagctgcatttctccttctgaaccagaaaccaaggcagaacaaaaaagcaactattttgaagttcccttgccttactttgaatactttaaatatatctgtcctgataaaatcaactcaatagagaaaagatttggtgtaaacattgaaatccaggagagttctccaaatatggtctgtttagatttcacctcaagtcgatcaggtgacctggaagcagctcgcgagtcttttgctagtgaatttcagaagaacacagaacctctgaagcaagaatgtgtctctttagcagacagtaagcaggcaaataaattcaaacaggaattgaatcaccagtttacaaagctccttataaaggagaaaggaggcgaattaactctccttgggacccaagatgacatttcggctgccaaacaaaaaatctctgaagcttttgtcaagatacctgtgaaactatttgctgccaattacatgatgaatgtaattgaggttgatagtgcccactataaacttttagaaactgaattactacaggagatatcagagatcgaaaaaaggtatgacatttgcagcaaggtttctgagaaaggtcagaaaacctgcattctgtttgaatccaaggacaagcaggtagatctatctgtgcatgcttatgcaagtttcatcgatgcctttcaacatgcctcatgtcagttgatgagagaagttcttttactgaagtctttgggcaaggagagaaagcacttacatcagaccaagtttgctgatgactttagaaaaagacatccaaatgtacactttgtgctaaatcaagagtcaatgactttgactggtttgccaaatcaccttgcaaaggcgaagcagtatgttctaaaaggaggaggaatgtcttcattggctggaaagaaattgaaagagggtcatgaaacaccgatggacattgatagcgatgattccaaagcagcttctccgccactcaagggctctgtgagttctgaggcctcagaactggacaagaaggaaaagggcatctgtgtcatctgtatggacaccattagtaacaaaaaagtgctaccaaagtgcaagcatgaattctgcgccccttgtatcaacaaagccatgtcatataagccaatctgtcccacatgccagacttcctatggtattcagaaaggaaatcagccagagggaagcatggttttcactgtttcaagagactcacttccaggttatgagtcctttggcaccattgtgattacttattctatgaaagcaggcatacaaacagaagaacacccaaacccaggaaagagataccctggaatacagcgaactgcatacttgcctgataataaggaaggaaggaaggttttgaaactgctttatagggcctttgaccaaaagctgatttttacagtggggtactctcgcgtattaggagtctcagatgtcatcacttggaatgatattcaccacaaaacatcccggtttggaggaccagaaatgtatggctatcctgatccttcttacctgaaacgtgtcaaagaggggctgaaagctaaaggaattgagtaagacaactgctggaagatgtcttaaatcaagctttcaaaaaaatatattttaggaggctgatttaatgccagtctaaatccttatgtagaaaggactttgaaatttttcttctcaagaaatggtttgtataagaataacaatctgctagtctgtcatttctggagtgatacttttttttttgagacggagtctgctctgtcgctcgcgctggagtgcagtggcatgatctcggctcactgcaagctccgcctcccaggttcatgccattctcctacctcagcctcccgagtagctgggactacaggcgcccaccaccatgcccggctaatttttgtttttgtatttttagtagagacagggtttcactgtgttagccaggatggtctcgatctcctgacctcgtgatccgcccgcctcggccttccaaagtgttgggattataggcgtgagccaccgcgcccagccctggagtgatactttttatggaagacaaaagccccccaaatctgtgtaaaatctgctgcaaaggtgtcatccctcttgtgtcatcactggggttagaggtgggtccgaaataatcttctgtgtccttcagttggactctcggctgccaattgatctctttttcattgccatctctggggtggttctttggttttttgtgtgttttccccttcatctctacctgtgaaagtgaaattctattgtaaatgggaggaaaaagggttggttgtgaaaaattaaagacccacattctgctttcttactcatggtaagaaaagtggccatgagtagagattgggcaagcattggtaataaatggaataagactattattattattatttgagatggagtctcactctgtcacccaggctggaatgcagtggtgtgatcttggctcactgcaacctccacttcccgggttcaagcgattctcctgcctcagcctcctgagtagctgggattacaggtgtgtgcctccacacccggctaattttttgtatttttagtagagacggggttttgccatgttggccaggctggtttcaaactcctgagctcaaatgatcctcctgccttggcctcccaaagtgctggaattacaggcatgagccaccacacccacacaagactatcatttttaatgaccaagagcctagtatatagttggtgcctgtcttagtctgtttgtgttgctataaaagaacacctgagactaggtaattgataaagaaaaaggtttgtttggctcacaattttgctggctagaaggttgggcatccggtgaaagcctcaggctgcttccattcatagcaaagggcagccagtgtgtgcagaaatcaaatgacagagaggaagtgagagagagaggtgtcggggaggtgccaggctctttttaacaagcagttcttcaggaactaagagtgagtcactcccatgagaacagcaccaagccattcatgggggaatctgcccccatgacccagacccctcccgttaggcttcacctccaacactgaggatcaaatttcaacatgagatttggaggaggtcaaacaaactaaactgtagcagtgtttcataaaattgtttgcctgactcaggttgctagtaagccagcagagggatatttgcctcctaaatctttggcagaggcaggagtaaggaagccatttctggagtccttgctactaatttggaaaactgagcttctttctttcattgctttttcccttaagagacaagtccttactatattgccctgtctctcaagggaagacatcaagactggacttgaactcctgggctcaagccatcccccaaccttggcctctcgagtagatgggattataggcatgtgccacggtgcctgacttgagtttcttattctagaacacttggagcctgaactctgaccaggcccctcacttgagcctttgctttctgctccttgtaaactgccatattgggtgcacttgccctgccacagtaatgctatatatttctgagcattgtttttctctagataattttatatttttgagtataccccacttccaagtgttttttgttttgttttgctttgtttttgttgttgttgttttgagacagggtctcactgtgtcccccaggctggagtgcagtggcacaatgacgactcactgcagcctcaacctcctggggccaagtgatcctcccacctcagcctctcaagtggctgggaccacagaagtgcaccaccatgcctggctttttttttttttttggtcgagatggggtgtccctgtgttgcccagactggtcttgaactcctggactcaagggatcctcctgtcttgggctcccaaagtgttgggattacaggcgtgagtgaccatgcctagctcacttccaggtttaacagacaaaataaacttactctagtttccatctctatcattttataataaccgtagcccacattgtagtagtttttcagctctttactaagtcccaccaattcatgttttcacccttaaaatctttctcactgatactctctctggacagaaaaaaggtgaaataagcctactataaggaatatatgacatgctaaattttatttttaaacggttcttcaagtcagattaaagtaataatagcaaattatgtgattatccatgtcccagcctctctccaaaaaaatagtaaacaagatgtcttcttcttttcccaaagatacacatacacacatgtacaaatttttttatcagataataatagctaatatttaatgagtacttaccttagtttgtcccctttacaacagctttacatctgtgtgattgatacagttcatattcccattttataactgagaaaactggtgcacagagaggataagcaacttgccaaaggtcacacagttaataagtggaaatgctggggtatgaaccaggtagtctgcccccatagctctgccccccagagctgtactgtctcccatgagggtacttctccatggagcagcctgaggcgatccctttattctgggcttctctcagaaatggattcccacacagtattcaaagcaaatttccccagaggaaatcctattggaagaacttaaaaactcagaatctttttctttgtccagagagttgaggaagcttaagctaaatgatacatgttttttaaaaaaaatcagattataaatttagtttttggtgattcattaaattctttactattatagttattttctagctgttcatcttttagctaaatttgttccaaagaagcaaaagtttggtttctactaagttctggattctggatgggagattgcactgtgtgtgacatgcaagtttcatggtgtgggagattgcagagcatttgggttactgcttttactctttggaagctgttatcatctgtatctgctttaaataaagttaaagatttggaacaaaaaaaaaaaaaaaaaaa

SEQ ID NO: 28609 - DNA, 3893 bp, Homo Sapiens
atgtgtagatgttttaacagtaaaaatactatgggcttcacctacccctggctgttgactttttcaaagtagtgcagaaaccttaggacagcctcctgccaaagagttacatttattcctatcactgcccactgcaaggctttaatagcccttttctctttctttatgagatgcattgaaaagactatctaaaagctaaataattaggaaagaatatcaacaggaaagacctaatagactggaaggtaggaaacaaagcacaggatgattaaatttttaaaacacagcagagctagcattccaataagccctaggaagcctacggagctttcacggggtacactccaggggcagatagtgggtatgatggtataggtctccacagaagaagatatctagaacagtcttctgattggtgggaattgtttgccaaaggcaattttgaactatttcacagctagcctggggttatgtaatcactggtctttcatcatggcagaaagtgccaaagcaaccaaaattccaagttcaactggatttacttgcatttacttactttacatgatgtgcctacaaatatactacgatcaatcataggtcctaggaatgtagagcttttgcagtgtgtatctagagttactggcaattggttcatgatattattgggttcagggcattccagaattgccctagatgccaaggtgtcaattatgtacttggtatgagtgttgggcagaaacatcacctctattgaaagctcaaaatgcattcagaaaatattgatgaatgctaatactaacttaattgtggaagtgttaggtgttcatcataggaaaaccttcattaccatggatacttttctctcagtcctgcctctagattgatgagaaagaatgatctacaataaattcaattcgtgcttctcccagatacagggttaaatgtgagacagcaacattttagttgcattaaaaatgtccctggttattgcttcggcctccctctgctgtaaaggctggatatgagtttgcatagcaagtagctaaacttaaactttcccactcttctgaaagatggtagaaagtttaaccagtaaaaatataatgcacaaaaggtaagttcatttttagtgtcttgcagcctgcttagttggtgtaaagaatggactactgaaagatagtaaaagcaccgaacttaaaattttactatcagaaacatgaaattgtcaccgaaattttatttaaaaactcacagaattgttggcataacagtgacttacagcttattcatcagagcaagttagtagaaacccaaatgctattctcagatatccattcttttctcagatattgacttgcgtgtttttacattcctaatgaaattgtttaaaagcaacatatgtagttgtcaagcaagctaaattggtagccgaatgaacccaacgacgtgaggctgcattacattttgtaaatcctaagtcatattcaacttgttctatatactgatttccttattcctgttaggaaaggaagttgaaagtttagacttgtccagatttcagctttgaggattcctctatcacatgaggcttggggtggtctgcgtttgtttcagcttaagagccatagcaaagatgcttcggggtgttgaaagcaacagctacattgcagagaagcaaggacagaactcgcaggtgtccagaaggagagtgagctgtgggagagagtctgggaatgggcagcgatggaggaaaagagaaatgttgaggacccctcacctcccttgtactttgtttcttcaagcctaacgttgtgtaatctattgtgttgtcttgcttatccaggacgaaaaatggatctctaatgaatacaatcatatctgtaagctacagattttaccatcaaaaatatgatttattagtaaagctggccacatggcactgaatttactggcctttgtattaatcatataaaatagtgatgggagttatagtaggctgattctgagatggctccctgtgatctcattggaagagagatgtttattatgatatgacaaaagcctagtgctaatgtggtctgcagttatgctgaaaacagaagatatacctgatagacttggctacatggctaaggagatttctgggcagtggggaagacactatttttctcttgctgcttatagcatgatagaagagccataaagtgagggaagaataaaacaggagagcataaggtcaaaaaaaggtacattaagagacatctggctttaactccaatgtgtaaagttcttaaaagtcattgcttccactcttaccacaagaagaacctgagtgaactgaaaatcagtgacaattcgtgtatccaaatgaggatgaagttcctacagcaaacagccacccagaaatctgcaaagatagatgaattaggggagtcacagctgagatctgtttacccggtgcagaaaccactagaaacaaactcttggtagcacttcagtggtaatgctgatgattttccggagcgctagtgtggagttgcgtgagagtgataaactcctggggtcacactcttggaatcccacacagttgtggattttacctccagaagccccaccaagctctcacagtaaagggttgagaaaatgccatcatggtcatgtggggcgcatggaagagaagttattgtgaaatatacccagaatattctccataacaaagacctaccctccagtgagggataaaacctttagcagagacttatcccacttgaggtaaggtcacttttcacactctgggcaccaatatccttcctgttccttgtaaggggagaagcaaagctaagaaatgcttgtaagggacatggaccccctaaaagactgtgatgtaatcataagagtatagaatacttcccctatgccaaccttctcaccacactaacagggctccaatgtaactgtggattacacctaaaagagccagaaaacacagactctctgtggaggagtatataaggatgcccaaagtcaagagtggagacaaaataaggatactagaggaatttgaagccaccgctacctacatctacagcaaacattatatatagcttgattctcagccagattaataataacaacaaaaaatgctcactaaaggcctgtttgcctcactgattactcttcaatatattatgtatgggttttaatggaaaattttaaggtatgaaaaaaagcaagaaaaaacaagtcagaaagacaaagcaagcatcagaaccagactcagatttgacacaaatttggaaattatcagatagagaatttaaaataactgttttagattttaaagactctaatggaggaaacagtcaacatgcaaaaatagatgtgtaatgtaagaagagtgatggaaactctaggaaacaatcaaaaggaaatgctagaaataataaaaatcactgacataaataaagaatgtcttcaatgggttcatcaacagaacaagtttgaggaaagaatgagtaagcttgaagataagtcaacagaaataatttcgaaagtataatatacatctatttggaataccagaaggagaagaacaagaacaagaaactaaagaaatatttgaagtaacactgtcagaggattttcccaaattaaccacagcaaatcacaagtcaagaagtagagaacagtaaacaggagaaataccaaaacaattatacacaaacttcagaaaaccaaagacaaaaagaaaatcttcaaaggagtcagagaaaaagtaacctgacttacagcaaaacaggacaagaattaaattagacttcccatcagaaacacagaagcaagaagactggagtgaagtatttaaatgctaaaataaaaaaaaaaaaaaaaaa

SEQ ID NO: 28610 - DNA, 3221 bp, Homo Sapiens
ggccttcagctcagctcaggacttagatgaagatgtcagccaagaagacgttcccttggtaatatcagatggaggagactctgagcagttcatagatgaggagcgtcagggaccacctttgggaggacagcaatctcaaccctctgctggtgatgggaaccagaatgatggccctcagcagggaccaccccaacaaggaggccagcagcaacaaggtccaccacctcctcagggaaagccacaaggaccaccccaacagggaggccatccccctcctcctcaaggaaggccacaaggaccaccccaacagggaggccatccccgtcctcctcgaggaaggccacaaggaccaccccaacagggaggccatcagcaaggtcctcccccacctcctcctggaaagccccagggaccacctccccaagggggccgcccacaaggacctccacaggggcagtctcctcagtaatctaggattcaatgataggtatgattccagtttattatccatcaaaggctccaactgctacagttctccaacttcattgtgccagtgaatctattgaaaagctgttaatatttccgtgtcctggaacacatttctcatgagttttgttcaaatattctgggataaggtagcaagatcttgtttttaaacaatctcttgaaggcaattccaattttgagaatcactatcttcaaattacctctcttaaatagggttgggaatgaggacatagaatcatgttctccctttggcactctgtttcctttcctcaaactcaaagactcccatttatttaaagttttacctgaacactccttgttcaggacaggctcagtcctgcctcacactagcatttcaagtccagtattcctgctaaatggtccttggacttttagctgttaaatggtatctcattttttaaaacacatttcacatttaaagtcatacatgcttaagctaacaaaaactaatctcactgaatagacatgtaccaagctaaatagcaattcatttctcctcccctctacccttaccaaaactcccactttttactgtttggaaactcctctttgaaatatttattgctacataactatatataattttcccaccactaataccacactttatattcagttctgtgtcttacttattggaaaaatttatttcttagctttcacatgagtttatttagatctcttcagtgtttattggttagtttttttttttacaattatatatgatgctattgtttggtttttccgtaatttacttaaccaatccttgtcactgaacattaaggctgctttcacactgtccctattacaggatatgttgcagtccccatctttctgaaaataacccttaacgtatccaacagccacaaagcatgaacaacctaacaataatcgtttttcgtcctcatctaagcaacagtttaaagcacattacgtgcaatggcatagaaagtgtgaacaaagaaaatgatattaaggaggggggctgtagaagggatagagggcaaaaggatggttttgcatcttcctcaccgcagtaaaccaatgaggtattagacatttcctgccatgtcaagtcttgcctataatcttccttgtctttttcaggaagtgaataagaagatgacagtgtttcaaatgccttgaaacataatgtgatcatgctctaacttcaatataccaataaaataatcagcttgcaatttctgattatagcatctccttctgagtgtttgggactctggaatctgagacccatgttcacattgtaagaacatccaggaccccttctccttgatgtttccagcaagcttctttcctccttatccttattaagtcatctgcctggggaaggagttccactgtttctttccttctctgtcttcttagctcgaatttaaattgcacaattattttcaggtcatttcctgatagtctagtcagcttatgaatgtaagcaaaacaggaccaatgaaagaaagtcccagaagctgagagaaactttaacaagtttgagagtaacttattttgttttctaggaaagtgagtatggttctatgcctgtattccccagaagccactagacctattttcccctattttatcactgatcagttctgtccctgcctatgattcttaccattcttaagaaaacctgaatggatttcatcaaggcggcagcataatttgaagggcaattgcgtgtgaaaattgatgtgacttgatttacacaatagtcagaaaacattttagaaattgatgactttataatgcaaccaggagtattgaaaaaaaagtaagcaatgagctcaaataattaaaaaagagagacaaaatacacttgggagaacagaaataagaattaatgaaaatttaaaagattaaatgaatgagaagaaatgattcataaattttgaactaacagtaataacttcttgaaaatccaataaaattggcaaaagattgtgaaaattctggaagaataagggaaacagataatcttcagagtaatcaggtaaagcttaaacaagtgttttaaaagatgagtttttcctacattctgaaaagcaaacatgaaaaactgaacacagtttttacagatatacaatatggagtgacttatatacaaaatgaccttaaaaatatattaaactcattatagtagttaatatctaagtaaaatatgatgaaatttaatagagaattcactcctcccaaaagcaccttcatggaagattcctcattaacaggcagtcctttagtatgctgatttatacaaaatgctgaaaagaagagaaataccccaagttcttgaaaaaaaattttttgatatgactactctaacagtaataactataaatctcactttaaataatttaaaacaaattaaagtgatatatgagttaaatgaccaagcagacttgattctaggaatgttaaggaatgttcattatttgttttggataatgaagtcagcagaggaaaaaaaatatgaccatctcaaaagatgccaacgttgtctttgataatatttaatatattttttaaaaaacaattcttgtaaaatacttttttgattagccttctgaccatgattaaaatggtgtacctcaaagtagctgctaaccttatgtgtatctgcaacaccctgaaaaattatctaataaaaaggcacaaagaaaaaaaaaaaaaaaaaa

SEQ ID NO: 28611 - DNA, 2977 bp, Homo Sapiens
tggtacccgaggccgggccggagccgcaggccagccgcgattccttcgggcgatgctgggggctttccggtcggggccgcagccgcttccggagccgcgggcgaggtgcaagcggtcttctctgtcttctttatggccagtaaaattctccagaagagatttatggcagcctcactcccagtagtttctgcatttagtgagataagccacagcaattgtctgctattttaaaagcactgtgatgcttaaatattccagctgctacatcggacaggtgtctgatgatcctgagaacagtcatcaaaaagtagaacttgagcctggaatacattctctggcatagccatagtcaatcaccagtataattaatgtaaatggacactggatagcttttttgtgaattctgatgcagcacaaagagactttaattgtttccaaaaagaaaatgtctgagattaaaatctagagttttatgacttagaggaaattttatagctttactccaaaaagggtaaggcacaaaatattctgtgccaaaggatgcatatttggtatttttcctatgaatcccttagtgtaagtggcatgatgaaattttcttggtttcaacacagatgatgtgttgaggtagtgttgaggctgagaggtgggtgggatgggtcttggagaaggaaaagatttgttttgcaaggtttgtggagagctgatgcggtagtgaggctaagacgaggggtatttacttgctacttacattgagtccactaacatctgcagcactttgcttgcattatccacgcaattatcacgggaaacctataaaataagtattcctctcctcattttacaaatagggaagcagataagatttagaaaatttcccaaactcacacaattattaaatgacagaactaggactcaaacccaggttttattaattttagagacatgtttttaaccacttggacactgccaaccatggaattgttggtatgaaaaaaacgtactcttgagttatattatccatggtcttaatatcagagaagtgcagttgagtcgctattaaagaatatggtaaaattataaaatggatactatacaaaggtataaaaatattataaatacttatgtttggggtaaaaggatcaaagtagccatgctcagtggaagggtaaggaactcttagcagagattgattaattgggagataattgattaattgggagttgattgattaattgggatttattaatttgggagtaggtaggaagataggaagttgtataaaataagggagagataacttagtacctggaaaaaaagaaatggaaataggtagaagctaagagttcaattaaaaaaaaggaataaaagatattggaagggaacgatgaatgtagcatggaagatccaagatgatgggagttcaggggctaattacagctatggggaaaaagtaatgtataagctggaagccagagataagagccatgtaaatgaagaagttgggccccaataggaaagaattataaggactagaaggagcaggagccatgtggaaaaatatcatgtagtacttttaagcttgatctgtcatctgtagcaaaaccagcatgcttgagtactgaattgacctgactgaactatgttgaaatgtactgtggttttatatccatatgcacttggtctgtggagttgtgggaaaagcatcagtgagtaggaagcccaaggatttgggtcaagtattaaatatgctatttactgtctagctatgtgaccttatataagtcacttgtggtctctgagccttcatgtattcatccataagatgagttgttgtttatattaaatgggatgtggtatgttaaagagctgaatgcatagtgatacagaattactttctgtaatactattttttaaatattttaaatgaaaaattaatgaacttataaattaaaagattcaaaagggataaaaaggtatacaatgaaaagcaattctccttcccaccagtaactctgtcctactccttaggacattcaccataaacagatatcctgaattcttctagaaatattatatataaaatcttatatttcttatgtttcttttttactattttaaaggggataaactaaactttgctttttttcatataataatatattctggagatcattttctaaaagcacatgtaaacatacctcattattataaaggtttgaaaatatcaatttatttgacctgtcccctctcgatagataattagattgtatccatccctttggttattaccaacaggcactaatcacttatcatgtacatatagcctgttttttagcattgttagacaaagtaggcatattcctttccatccaagaactcataacctagtaattgtagttggctgatagctcattgcccatacacaaggatctaacacaacctcttgaataaacatcccccttattcagaaatgccttttcctatttccatattgcaactttgcttacaaatttccaatctgtctttctgtttacagaagatatacaaaattccttttgtatgatctctttatatctcttgattttcttttgtgtttgctaccaaagggcctgcacatagtgagaagattgtgcatgatctgtgagctctaccacacctggaattagggatcaccaatatgagaaaaaaaattggaggtacaaataccattatcatatgtaattggcatataaattacagatgtatctatgactaaaaaccctgtggatataaaccaaatgcagataaatataataaaatatataaaaatataatcaaataatgatagtgctattcaaatacttcaaatttgcacagtgatttatttcttaaaatatgttaacacatgtgagccaatacactgaggtcactggataaataaacagattcttgcaagtgctttggaaatgaaaaaaaaaaaaaaaaaaaaaaaaaa

SEQ ID NO: 28612 - DNA, 4492 bp, Homo Sapiens
cccgggttgggccgcccggggactctggagcattgggatttgtagcgcgccctctgggtaggcggctgtagcggagaggcgtgcgggatcgggatgtcggggctgctcacggacccggagcagagagcgcaggagccgcggtaccccggcttcgtgctggggctggatgtgggcagttctgtgatccgctgccacgtctatgaccgggcggcgcgggtctgcggctccagcgtgcagaaggtagaaaatctttatcctcaaattggctgggtagaaattgatcctgatgttctttggattcaatttgttgccgtaataaaagaagcagtcaaagctgcaggaatacagatgaatcaaattgttggtcttggcatttcaacacagagagcaacttttattacgtggaacaagaaaacaggaaatcattttcacaactttataagttggcaagacttaagagctgttgaacttgtaaaatcttggaataattctcttcttatgaagatatttcacagttcttgccgagtgcttcactttttcactagaagtaaacgactttttacagccagtttgttcactttcacaacccagcagacttctttgagattggtctggattttacagaacttgactgaggtgcaaaaggcagttgaagaagaaaattgctgctttgggactattgatacctggttgttatataagctcacaaaaggttctgtatatgccacagatttttcaaatgctagtacaactggactttttgacccatataagatgtgttggagtgggatgattacctctctaatttcgataccactttctctcctacctcctgtgagggacacaagccacaattttggatcagtggatgaagagatatttggtgtgcctataccaatagttgccttgttaaaggtccctggatatgaccagaatatctgctatatttttgggaaggggaccattgagccagtattctatcatggaagtactttataaccttttctgacttgcttgtatattgtttatcagaaaacttaaattaaaaaaattttttttaattctgagtggtatttagtttacatttggtactctgagacaaaacacagtgatggggcgaatatttatgttctgtttgataatgtgtaaccacaaacagtgttagggcaacttaaactagcagagaaagttgtatgtacatttaataaagtccttagccatctaccagtaaataagtttgtagaataatgaaatatttgccatttttgatttttttttttttttttgagacagggtctcactctgtcactcaggctggagtgcagtggtataatcatgcctcactgcagcctcggcttcctgggctcaggtgattcttccaccccagcctcccaagtagccaagaccacaggtgtgtgccacgacacctggctaattttttgtatttttggtagacataggattttgctgtgttcccctggctgatctcgaactcctagactggggccttctgccacctttgcctcccaaagtgctgggactacaggcatgagtcactgtgccaagcctgtttttgatttttaagagtcctttcacattgcctttgatttcctgtggcagcttaagcaggaggtagagaccacctgttgcaagatgtgcagtctccacagtagctgggggagcagctgagggaaagggaatttaatttccaagttacaaaatcattatcatttagagaggatcggtcttattcaatctaggcataggtgcagggttagattaaggtatggctggaagagttaccaattagtgacagagggttctttaaatgagttgttgttgttgttgttgtttttgagatggagtttcactcttgtctcccagactggagtgcaatggcatgatctcaccgatggctcactgtgacctccgcctctcgggttcaagtgactcttctgcctcagcctcctgagtagctgggactataggttgctgaccagcaatcagccatgtttggagagtgctgcttccagacaggtgatgtgaaattaaccatgggaactgggacatttttggatattaacactggaaatagccttcaacagactactggaggcttttatccattaattgggtggaagattgggcaagaagtcgtatgcttagctgaaagcaatgcaggagacactggtactgccataaaatgggctcagcagttagaccttttcacagatgctgctgagactgaaaaaatggccaaaagtttggaggattctgaaggagtttgttttgttccatcttttagtggattacaggctccattaaatgacccctgggcatgtgcctcttttatgggtttgaagccttctaccagtaaataccatcttgtacgagcaatattggagtcaatagctttcagaaacaaacagttatatgagatgatgaagaaagagattcatattcctgtaagaaaaatccgggcagatggaggagtttgtaagaatggttttgtcatgcggatgacttcagacctgattaatgagaatatagacagacctgccgacattgacatgtcatgcctgggtgcagcttctctagctggccttgctgttgggttttggactgacaaggaggaactaaagaaactgagacaaagtgaagtggtcttcaagccacagaagaaatgtcaagaatatgaaatgagtctggaaaactgggccaaagcagtgaaacgctccatgaattggtataacaagacataacactaaatgaaatgatcaaaaccataggtagctggtttatgtgacgtgcagatgagatgaagctcagggataacccatatgacaatgactaagaggagaaaattttaaataagcttcataacttaagaagcattgcttttaaaaaaacaaaacggaacaaaaaactcttatttttttcccctaaaccatggtaaggcagcaatacctcaaaactttatatcttctattttgtagcaaattccaaaggacattagtcatttccaaccacattttgacagttatgggtcctcttcctttttatactgggtcagtggtacataggaacataatgatttaccatccaagctaatagttctgggtcaagtaccatgcacatattgttccaaaattatgtgaaacgtatttctttaattctttaagtgggctatttgaagtacatatagctaaaaagaaagaataactgagaaaatgtggaattttgaaacattaatattttatgtttaaagccataatttcctaatattatatccaaatatgagcttaatatgtccctctcagataagcttatgagatagttaatgctttcctttactggtcttaaagacactgccttaatttttccttgttcaaccaaaatctgagcattctttctatgttgaaaacactgaaaaactaattttagttaatgaactaggaagaatattgatttttaagaaacagaaaaatactacttattttccttctcaaataacgtttctttcaaaaacttctggctgaagtataacatgctggtagttaacataaatcttgtctttctcttgttctttatctttctttgttatttagatgcttgtataaatgtcttttgtttttattaagtgcctaattgacagagcttaatttgaagaagtgccctaatttattgaccacttaagaattgcctttattggggtattttatttgttcctgcgtctttttgatgtttgttcagtctactcatccctgtgagtatgtgtgggggacagctgatagaagggaggagagtgtgtctatgctcaggattgccctttagccactcagccagagatccacagggagcaacaaggacagtttcacatgcttagactttcttggaagaaacagtgaggaggagtaagtcgtgagtagtgtcaagctggatgtagaattgtcctaaggcagttgaccccaccttccaacatgttttcactttatttgcccctccctacatttgggttaggttccatttggatttgcagcaataatgactttatttctctcttggtcaggatttggcacattaaatccttttattatagaactagctattttagttacatagtaatgtaactaatggagagatttatagagaattttgtttttgctgtcatatatgtccattttggagacagatgtgatagaactagaaattaagttgcatttctgcaagtgccatttgaatgaacttcaagtatcttcttaattattaaattttctgatgaaggcattgtaacaaatatatagtattattaaatctaattaatatttggaaatattaataaataggtattttatttactgtaaaaagtcaaacttcattatgtagataaatcttattcttttcattctttcccctgtttacatcctttttacaaagcttagtcaccaattaaagctttcctatcaaaatcagaaaaaaaaaaaaaaaaaaa

SEQ ID NO: 28613 - DNA, 3087 bp, Homo Sapiens
agttgtcggagggcgccctccaggcccaagccgccttctccggcccccgccatggcccggggcggcagtcagagctggagctccggggaatcagacgggcagccaaaggagcagacgcccgagaagcccagacacaagatggtgaaggagacccagtactatgacatcctgggcgtgaagcccagcgcgtccccggaggagatcaagaaggcctatcggaagctggcgctcaagtaccacccggacaagaacccggatgagggcgagaagtttaaactcatatcccaggcatatgaagtgctttcagatccaaagaaaagggatgtttatgaccaaggcggagagcaggcaattaaagaaggaggctcaggcagccccagcttctcttcacccatggacatctttgacatgttctttggtggtggtggacggatggctagagagagaagaggcaagaatgttgtacaccagttatctgtaactcttgaagatttatataatggagtcacgaagaaattggccctccagaaaaatgtaatttgtgagaaatgtgaaggtgttggtgggaagaagggatcggtggagaagtgcccgctgtgcaaggggcgggggatgcagatccacatccagcagatcgggccgggcatggtacagcagatccagaccgtgtgcatcgagtgcaagggccagggtgagcgcatcaaccccaaggaccgctgcgagagctgcagcggggccaaggtgatccgtgagaagaagattatcgaggtacatgttgaaaaaggtatgaaagatgggcaaaagatactatttcatggagaaggagatcaggagcctgagctggagcctggtgatgtcataattgtgcttgatcagaaggatcatagtgtctttcagagacgaggccatgacttgatcatgaaaatgaaaattcagctttctgaagctctttgtggcttcaagaagacgataaaaacattggacaatcgaattcttgttattacatccaaagcaggtgaggtgataaagcacggggacctgagatgcgtgcgcgatgaaggaatgcccatctacaaagcacccctggaaaaagggattctgatcatacagtttttagtaatctttcctgaaaaacactggctttctctggaaaagcttcctcagctggaagctttactccctcctcgacagaaagtgaggattacagatgacatggatcaggtggagctgaaggagttttgtcccaatgagcagaactggcgtcagcacagggaggcctacgaggaggacgaagacgggccccaggctggagtgcagtgccagacggcatgacgtggtgcggggcagcgtggccccaccggactagcacatgatgaatgtaaagttggcacaatgaaaatgacatcgctttaatggccttgtgtttgggatgtcctgtgtatgtgttcagcattcttaattgctgagtgtctttttggcttttcttttggttgtaacttaagttatagcttaatttatatttaaatgttttaagtataaatcacctctagtctgcatatggaatctgttcatttctattttcaggatatacttttgagatgtcagtgattgcaccaacactttgtgcttctagtggctttgccataattcagtgtcaccaataaggcacagcccagttagcagcttagcccccctagcaaaccccaaggcacaaagtgggcatcctgactcatctctaggtctgtggtttctcccctcttcccttggcagagttattgagggcatgatctcagggctgctaagataacatttctgaggattctagatgatcctcttaaagaataaaagcacatccgtggatcggacatggctgcatgtgcctgcttaacagggccaacttagttcctactgttctgtgcccttcagtggatggaacgtgagtgtctgatcatctctcttggaagttttctgaaccttccaagctctgtggtgaggacaaaccagtgtttgaatcatatgctgataactgtttgcctgtgaccctcacaccttgttcttcagggttttaatgattttctgttgacaacttttgcaatgctttcccaccaaagtgcttacttgtaaagaaaactaaatccttctgtgtccccggcagcctcagtgcagcaacagaagccaagagagaatgctgctggtttggcccatggcacagccagcttctctgaccagtaatccggggtgacttgagggtctgcaaaggcatagaactccccagtgttttccacctcattctcccagattgagctcccttccaaaggatcgttcctctcattgcacagccatattacaaagggtttcctgctcaagtgatgttttggtaagaacttcgctgagttccactgtggattacagtttgtatggactactactgtaaattatagcttgtttggagggatattagtcattattttattcatgacaggtagactacaattcgaacttagggttacctcagtctttagccattactgcttatttcttttccccaagtcacaaaaaacttgcaagctgctgggttaaagcagaggccacctgtcagatctaccctacccttatttggttacatggcacctgagagtttcactcagaccagggatcttccttaggagggtcaaagtgcagatcagaccatgcaggtaaggtgaaccagctgcacggaccaggttcccgcaaaacattgccagctagtgaggcataatttgctcaaagtatagaaacagcccacctgtgcccactttgaccattggtgaggatagatataaaatcacttcttccaacgaagcctaggtgaaaatctatttataaatggaccacaactctggggtgtcgtttttgtgctgtgacttcctaattattgctaaagaactactgtttagttggtaatggtgtaaaattacattcagctccttcttgtcatataaaaggaatttggagggtgtcgcttaaaattttattccacctgtacatttgtcactttaaaattaaaattgagctggtatgagaaaaaaaaaaaaaaaaaaaaaaaaa

SEQ ID NO: 28614 - DNA, 3615 bp, Homo Sapiens
aacaacaacaaaaacaatgcatttaattaaatgaagatgagctcatgctggagtagggtggactctgaacccagtgggacaagcgtccttattaagaagagggaaatctggacacacacagagcagagaccgccgtgtgaagatggaggcagagatcggagagatgctgccacacgccacaaatgcctggggctcccagaaactacacggagcctcccccagcggcttcagcaggagcatggctcggccaacactttgatcttggtcttccagcctccagaacgttttcctaaaattcccttttccactggtgtgtggtgcaagatgaggcacattttccatggatggtgaacagagggaggagccttttgatcacaaccaggtcaccccacttctaagccactgtgcctccagccccacaagactaaggagagagagcgcagcgtggtggagagtgagctgtgctgggaccattgtttccgtaacctcgttttctgtgtccagctgacacaccttcaaagtggcatcaggtcctaaactgtagcttgcaatgtgcctgtttccagaaaccaaggtgaaagtgctttagagtcccttcccagcttttttctggaaatgcatgtttctctgaactctgagtcccaagaaaaatcacttgagacaccaagaaaatgggggaagtgctaaaattgtgtgggaattcaagcttaacaataaacatcaagacatttttgataaaaatgaatccactgacatcggggaggagcaagagaacagcacgctgacactgggtcagaggctaagaccgacatttctgggaaccactcccggaagggcacagaggagacgctttcagcctctcatcagccagcctggcctgtagctgctgcacgttatgagtgtgttcctggcatgactgcttctaacagcgaccatttcattaagtttttaagtgcctggtaattgcttggttatgaccggtgtctgctccatggcagcctcttcctgtttttgcccgaatgatgaaggaggaagtttacatcttgctccctggggacaggcagagacagtgtgtgcacttccatcctacagggaccagatctgaacagtctggagagaggagctgtggtggcagcagacagatctctgcttcaggggccaggtgtctagaagaaatgctgaggcagtgtcacgctggtgtctgtcctccttacagaatgcctgaacagttccattgactcaaagtgaagatcaaaagaaccaaatgacagcaatagccaagtgtaatcatcagtaaccctgtgttctatccacaggtaaaaaacaatcatcctcttcattatgggtttcaattttaaatgtaatacatttttagaaatgcctatttccttttataatctctttatataatctaggttattctggctcttaggtcttcatttagctactgaaaagatttgatctcaaatcaatgatctaaccacccatgaccatctcccacctctctccccgtacaccccccagcatgaattctgggaactcaggtaaaatgctttctggaaacctgcctgtattagtctgttgtcaagctgctaataaacacatacccgaaactgggtagtttataaaggaaagaggtttcctttatagctccacatggcttgggaggcctcacaatcatggtggaaggcgaatgagaagcaaagtcacatcttgcatggcagcagggaagagagagtttgtgtaggggaacaccccttttaaaaaaccatcagatcttgtgacactcattcactgtcacgagaacagcacgggaaagacccgcccccatgattcaattacctcccatgacacaagggaagtataggagctacaattcacaatgagatctgggtggggacacagacaaaccatgtcaccgcctaaaaccaactcaatagtctaaggaatttgactggggagaatctggagaggatttaattaatttggcaaaaggattagcaattgaatctaagtgagaaaagagaattcttggaggaaaaaaagatgtttagttacactgagaaattaaaacctgaagtaattgcctttgagatttttttcaggaaatgagtattgattgcctactgtgtgtcaaattatgtgtttcatgtcaaagactccaaagtagataagatataggcccagccttggggagctcattgagtcacagagaaagtttgaatgtttcagaggaatcatcaagaacaggggatcagcaatctattatattttaattgcgtcttttcatggttataaaagcaatgcgtgcgtgctgaagagaatttggaaaaacaaagaagaaattaaaaatcgtctctgatcctgccaccagaaataaccactgttagcaattgtatcacttctgtaggtctacatggttatcataataagctctagtattgattacatgcatctcatgtaccagagattatgctagactctcatttaatctgtacattagccctatgaagtagggaccatcattctcctcattttacagatgaggaaacagaggcttggagaggttactctgcctaaagtctcatagctagcgagtggcagagattggactcacccaagctttgtcttattctcaagctctcaaccaacccggtggtgagaagagccagcagcaaagcctgtcatctttgtcttctttttttttctaacctcaaatcagggagaaaatgccctttgtcattagaagggcaaggcaattctgaagacagcccagttggcttgtctccgatttggctttcaggggcctgtctgatacctatggagagacgagggctgaacaagctgtactctcaaaacaaaacaaagcaaaacaaaactttagtctctttagggactctctgatagtaatgcagagggagaaagactttctttgtctcactgggaggaaggttccctatggaaattgaaggcagtgcctgttgacatagcgctgccacctggtggaaataatggtgtaggacatcatgtccagcaccactagcgctgagagacactccctgggaagagaaatgtttggagagaaatttgcaagaagttggaagtctcgcagtagcaggtaggaacaagaattataactgctactgtgaccccctaaggctcctcacatcctcttaaggcttggagaaactcacactatgtatattttcctgtatttttgaaaaatgttttcctttatgctttgttgtaatgaaattacctctgatggtcacataccttaaatatttagtatatatatgaatactaaatgtccattttcaggagttagtttacctgcatctaaaatcaggaataggtcacagagtaactgagcaaaaagtgctgttaggtttgtgcatttcaccctttgcctgggatgagaggacctcaatcatcttggtactaatgacaggaaaagtgccctcctatccatgtgtatcagctacgtgactcaagtctccttatttccttttctagcataacaaggggttgttactgttgttttacatctgtgttaatgagataaataagtttaaaataaaaagatgtgtaccaggtaaaaaaaaaaaaaaaaaa

SEQ ID NO: 28615 - DNA, 6035 bp, Homo Sapiens
ctgctgctcatcttctggatcgcgccggcccatgggcccaccaacatcatggtctacatcagcatctgctccttgctgggcagtttcaccgtgccttccaccaagggcatcgggctggcggcccaagacatcttgcataacaacccgtccagtcagagagccctctgcctgtgcctggtactcctggccgtgctcggctgcagcatcatcgtccagttcaggtacatcaacaaggcgctggagtgcttcgactcctcggtgttcggggccatctactacgtcgtgtttaccacgctggtcctgctggcctcagccatcctcttccgggagtggagcaacgtgggcctggtggacttcttggggatggcctgtggattcacgaccgtctccgtggggattgtccttatacaggtgttcaaagagttcaatttcaaccttggggagatgaacaaatctaatatgaaaacagactagattgcaataggagcttggatggttcgaggaataggcattggaggtggtttctggccgtgattggatgtgaagtagaagaggtcctcgatcatggtgttagaattgactggatagtaacaggtggtctggtggatagcggggagcatggctcagcaccagagcagaggcccagccagccctctgcagcccaaacgtccccaacggttgcctggcaccatctctctctgatgagacgaatctcattttcatttccattaacctggaagctttcatgaatattctcttcttttaaaacattttaacattatttaaacagaaaaagatgggctctttctggttagttgttacatgatagcagagatatttttacttagattactttgggaatgagagattgttgtcctgaactctggcactgtacagtgaatgtgtctgtagttgtgttagtttgcattaagcatgtataacattcgagtatgtcatccaaataagaggcatatacattgaattgtttttaatcctctgacaagttgactcttcgacccccacccccacccaagacattttaatagtaaatagagagagagagaagagttaatgaacatgaggtagtgttccactggcaggatgacttttcaatagctcaaatcaatttcagtgcctttatcacttgaattattaacttaatttgactcttaatgtgtatatgttcttagattagaataatgcaacttcgagtatgctttaatatttcaatattcaagttacaaatgtataaggcagttagaaataatacagtcacatgtcacttaatgatagggaaacattctgagaaatgcattgtaaggtgactttattgtgtgaacatcatggagtgcacttatacaaacctagatgggacacctatgacccacccaggccagatggtacagcctgttgctcctgggccacacacctgtacagcatgtgaccgcactgaataccgcaggcaattgtaacacagtggtgagtatttgtgtttacaaacataggaaaggtacagtaaaactatggtattacaatgttatgggaccaccgtcatgtaagtggtatgtctttgacagaaacatggttacgtggttcatgactgtatattcactggaagatagtcaagactaaagacacattagagcaaattgacccctttaacatgtgattattgtccaattaaagacagttgatttaagtagcatgaggtattattttatttgtattcgatctgtgttacctgggatccagtatcaaatatatccacattctttatcagcaagcattcatggccattcagaagaaataaattaggtaacttgataataaggctaagtgggagagtacctgttcaatagctcatatatcgagtaccctgtcatacaggaacaagttaaaggacacaattgaggttaggctagcttctacaaattgcaatatgcagtttttgaaagattttctaacaaaaagccaataaatgtagccatctccttgttgtttgcaatggcagagcatcctagagttcctcagctaacctctcattatgtgtcttaaatgcaaaagagccattaattatgccagtatttgaatcaaagaggtcattctctgtctatagtgttcccatccatgtgttccaaatgggagcatagcatgaagtgatgcacatatttcaccacggtatcatgtacttcatggccagtgttttatctcagcagggaactacgccaagttgaaagatggggttgggtaaagtagattaggtgaagtagaacataaaattgaatagtacccaattaaagttcctcagtaagaaaaaaaatgtgtttttgtagacaaaaagaacatttctaaagtctcaaggaatagcttcctaaagtgttgagtaaagaggctaaataaaatgagactagtttaatatagagagaaaaatacctttatggagtaaaagtgtacgtgatgatcatgggttgtcagtgatttgtgaactgagagcagcaacaacattattttttaaaaatcttaaatcctctcaatggatggttaacaaatgctcaaagtccattactctttttattggctcttgcaggttttgtgttttatcatcagtgcttttagaaatgcaggccttaacttactgaactgaactttctgaaaacgtaatgtagcagtatcaatatacttttgggcataaaaatagtttcctaggtaaggggtgtgagatattcaaagaatacatgtggctaacaagtgtaatgagaaagttcatgtgtcacatgaaaatgatcatgtttgtgttgctacagcttttgtgggaaatttagtttaaaggcagctcttggtgtaccttagtatattttaatccacaattataccattgatactgagaggtgatacccgatgatcttctctataatattcttagagtaaaacaaaatctcaaaagtattaatagctcttctacccttgaaggtgactggccctgggacagttagaatctttcaggtttacctctgttcagcagatacttcagtaggatacatagcttttcttccagtgaaacaaagttcatatcatccattgtttttcaagcacgtgacaccagcctcaaagtaaatgacatgaccagtggttgaacagtctaattttcaaatttaatatagagcatataacttctgatttgatagtatttattttaaaaaattatgttttcatcattcatttgaaaatgaaaaagccccaaagtgagaactttgggggagggcctagaacatggatagatctcttagtggtctttccaaaagtacatgtacttgaaatattttcattatcatactattctttgaaaaaaaagatgcttactgtatacttgttttcaagcatcctctaaaatcaaaggttttgatcacaatatgcagatttctcttgatagatacttaaataggctatttctctcctcttcttgggcaatgccttgttttctcctctgaatatttgcatttgaaaggattgcttcctgttctgctcattgatcaaaggtagggccaattaaggattctaaccctaacccagcaccacaaagcccccctggagcatcttcccggctggcaggaccatgccatctctgtggagaaggtgctggggagggaagtccttccagtgccacatggagtgaggccctgcccatgctggggactttggggaggaatttggtattctggtggccttgctcagctctcattgagatcttttcctatcggaatgttagtgaatatacttcgcagctctttgttcagcaataaggaatattctttcaattcctgctcttcaagccaatttactacacccagttgtctttccagaagttcatcccagcggtaatatgttggtgtttgttcttctttggatttcacatctgttttctggtagaagtgagcactgttcacttgtgcagtcgtcttattttccttcttcctagatgactcagctctttgtaaatgttgtgctcaacttctaggggccagttctagactttggagatgcagtgtctcccaggtgtgcacggacacctggtccgtggaaacaggtgtgatgggcacaggctgctgcccttctgtctggtcgggggattcctcttcttcaagctgctcagctaacccagaagaggggagagagtactccggtggttcccagagcccctcccgttgtgccgcttcgacctgacacctgctcgatgctgacttaggcttcctgccaccaagcaggaaactagaaagagaacatttcagtgtaaggtctgttcccgacagcatggattagcttccgtgttctgaagttgttcttttcatggtgtctgacaccgagggcgttgttcgtccatcaggcgggattggatggagtcttggtgttttgccttctcagggaccaaaaatgtatcattgactccttaacagtgaccttcctcccaaggacatatccgtgttcatttttcataggttttactcatattcataggtagattctgttaatgtgagttggaaagaaaagaccaatttgtacaccagtcacaccacaagacagtttatcatataaaatacctcaattttttgtattcctcatttccacctcacaattgtactggtgatgaattttaagggtctgtcctttagcttataggtgatgtttcacatctggccagattcttatacctccattgtatacttgaaaaggttcagaattacaggaacagcagtgagaatttggcccactaccacgactcatttgtttcattcacattcctcacgtgcaacaacataattatattttaagaaaatgtaactttgttacatcaaaatatgttgtctagtaaaaagttgatattcagtagaacaaggatcatgtaaataaacatctatttcacatgtacccaaaagcatttaaaaagcagaatccagggcccagagcatgagccagggaggaggatgtttttcttcttttctctatttttccctaaattgtgcaaacataggtgagtctcttaacctttctgtgcctcagtttttctacctctaaaggggtgggatggttcttcaaattgtttctaaaacaccggcactttcagcagtgttctggtggcctgagatgagagcaccgtgttcagaagtgcctgggagtggcacagtggaaactccgcttgcacggaccatggagtctgctcaggaccatgctgtaggacacacagcctcatgcgctgagaaagcaaaggaagtgctgggtgtaaagtttgcatgattccatgaagctttagttttcctttttttgttttaaaagaaagggttttatatgttctattgtaaaatatggaaattaaacagggacttcagaaagccgcacagaaagatcaccttctgatggtgtgatgtgctcctgacattcggccgaggtctgtattctgaaaaagatttaatggcctgtgaaacacgtggattctgttgcactggatttgtaataaatgacgctgaacttcctgcttccaagcagctcaaccctgatgctgaactgacaccaggcgaatgtcagggctcccaaaccactagtgccaaagggtcatgttgaaaagttcagaatatttatttgtcagaatataataattgccccccaccttagtatttttgcactttacagaaatttagatactgtttttcagtggcttgagcgttttgccttttcaaaggataactattattttcttgaaaatggaatataatcatgagaggaagaagatgtaaaaaatgtcaaatgttgattggttgtgtaaaagttttgtcatagacatgtattggggagcttccaattagcatacatagacacatgtgtcagtggccaagacctgcttatattttgctttatagatgtagtcatagcatgttgttattgcctcatgtaaataaaaaggctattaagttttccagtaatatttattaatctgtatgtgttttaaaataaaataacttatttcaaaaaaaaaaaaaaaaaaa

SEQ ID NO: 28616 - DNA, 4657 bp, Homo Sapiens
atggcagcaatgtatcaccaaaccagtacttccctcttcccgctgaagggaaattcacagaagctatagttgatgcagagccgaaatatctgatagttgtgcgacctgctccacctccaagtcaaaagaagtcatgttcaggtaaaactcgttctcgcaaacccctgcagctggtggttggcactctgacaccgagctcagtcttcctgtcctggggtttcctcatcaacccacaccatgactggacattgccaagtcactgtcccaatgacagattttatacaattcgctatcgagaaaaggataaagaaaagaagtggatttttcaaatctgtccagccactgaaacaattgtggaaaacctaaagcccaacacagtttatgaatttggagtgaaagacaatgtggaaggtggaatttggagtaagattttcaatcacaagactgttgttggaagtaaaaaagtaaatgggaaaatccaaagtacctatgaccaagaccacacagtgccagcatatgtcccaaggaaactaatcccaataacaatcatcaagcaagtgattcagaatgttacccacacctagtccagaagtgcccaagtccaaacccgctctggaacctgccacgatacaaccggagcccttggtgcccacaactgcctcaaaaccatctgagagacctaaaaccacacacagaccagatgcacctcaaattcagcctgtctctgagcctgttccatttgaaactgaagctccctcaatgaccatagttcccaccacagacattgagcctgtaactgtgagaactgaggctacagtgacaacattagctccaaaaacatcgcaacgaacaagaacacgtcgtccacgtcccaaacataaaaccacgccacgcccagagacactgcagaccagactagactttggacctattactcctgggacatcttcagctccaacaacaacaacaaaaagaacccgtcgtccacatcccaaacctaaaaccacgccccatccagaagtacctcaaactaaactggttcctgctacaatctttgaaccagtttctcctataaaagaggctccagggacaacattcgttcctgttacagacctcgagcctgttacttttagaactgagatccctgcaacaaccttagctaccaaaacatcaaaaagaacccgccctccacgtcccagacctaaaactacaccgagccctcaggcacctgagaccaaacctgttcctgctacagtcctagaacctgtcactcttagacctgaggcctcaacaacattagcttccaaaacatcacaacggacacgtcgtccacgtctcagaacaaaaaccacaccacgtcctgaagcacctgaatccaaaccagttcctactgcggagctcaaacctgttacactcagaactgagacttgggtgacaacacaagctcctaaaacatcacaacgaactcgtcgtccacgtcccaaaactaaaaccacaccaagtcctgaggttcctcaaaccaaactggtttctgatgttctggaatcggttacacttagtactgagtcaccaaaggagaccatagcaccagccaaaacagactatgtatatcccactgccaaagcaccactctggccagaggagccaaagactgaagttgtggaatctattacatatgtatctgaaccacctgagaccacactagaaacgtcgcctctgccttctcaatctataaccctacccagcccagatgagcctcagactgaacctgctcccaagcagacaccacgtgctcctcctaagccaaaaacatcaccacgcccaagaatcccacaaacacaaccagttcctaaggtgccccagcgtgttactgcaaaaccaaaaacgtcaccaagtccagaagtgtcatacaccacacctgctccaaaagatgtgctccttcctcataaaccataccctgaggtctctcagagcgaacctgctcctctagagacacgaggcatcccttttatacccatgatttccccaagtcctagtcaagaggaactacagaccactctggaagaaacagaccaatccacccaagaacctttcacaactaagattccacgaacaactgaactagcaaagacaactcaggcgccacacagattttatactactgtgaggcccagaacatctgacaagccacacatcagacctgttctgaataggacaactacaagacctactaggcccaaacccagtgggatgcccagtgggaatggagtgggaacaggggtcaagcaagcacccaggccatcaggtgctgatagaaatgtatcagtggactctacccaccccactaaaaagccagggactcgccgcccacccttgccacccagacctacacacccacgaagaaaacctttaccaccaaataatgtcactggaaagccaggaagtgcaggaatcatttcatcaggcccaataactacaccacccctgaggtcaacacccaggcctactggaactcccttggagagaatagagacagatataaagcaaccaacagttcctgcctctggagaagaactggaaaatataactgactttagctcaagcccaacaagagaaactgatcctcttgggaagccaagattcaaaggacctcatgtgcgatacatccaaaagcctgacaacagtccctgctccattactgactctgtcaaacggttccccaaagaggaggccacagaggggaatgccaccagcccaccacagaacccacccaccaacctcactgtggtcaccgtggaagggtgcccctcatttgtcatcttggactgggaaaagccactaaatgacactgtcactgaatatgaagttatatccagagaaaatgggtcattcagtgggaagaacaagtccattcaaatgacaaatcagacattttccacagtagaaaatctgaaaccaaacacgagttatgaattccaggtgaaacccaaaaacccgcttggtgaaggcccggtcagcaacacagtggcattcagtactgaatcagcggacccaagagtgagtgagccagtttctgcaggaagagatgccatctggactgaaagaccctttaattcagactcttactcagagtgtaagggcaaacaatatgtcaaaaggacatggtataaaaaatttgtaggagtgcagctgtgcaactctctcagatacaagatttacttgagcgactccctcacaggaaaattttataacataggtgatcagaggggccatggagaagatcactgccagtttgtggattcatttttagatggacgcactgggcagcaactcacttctgaccagttaccaatcaaagaaggttatttcagagcagttcgccaggaacctgtccaatttggagaaataggtggtcacacccaaatcaattatgttcagtggtatgaatgtgggactacaattcctggaaaatggtagatgctgcacaaagttaccttctgtttcatcattgcaaacaaaaatcattgaaaatactatgccgcattcatttaaagctattttgtttactatgtataaaagtctacaatctaattaatagcaatactagatgtttattattagaaaagattgctgagagtatttatcaggttttacaaagtcattttaagaaagcaagatactgatgttaacagaataacatttttggggaagctggctccctattcatggtattttaagagatcatttgtatattatttatcacactgttgtaatgatgttttgagatacttttataacaaaattaacatcaaaaaggtatatactttttaaaaaaaatttacttttattgatgtgtactcttcctattgatgagttaattccataaatctctacttagtttaacttattggatcaaattatcttcagcatgtatatctggggaaaaaaggtccgaattttcacatttatatttaaacttcaattttttatatttaaacttcaattttttagcaacagctgaatagctttgcggaggagtttaatagttacgcattcatgctaatatacatttcctttaaacatccacaaattcttaaaaagattgaatcagtaaatttcatttcagctaaaaatggagtctaatatattgtttcaaaagatacatttttacccaccataaatgttacaatatctgaatatgctttgtcaaactatccctttatgcaatcgtcttcatattgtttttatgattctaatcaagctgtatgtagagactgaatgtgaagtcaagtctgagcacaaaaagataatgcacgatgagattgcctaccattttataggatatttactatgtatttatacgttaagacctctatgaatgaatgtatcagagaatgtctttgtaactaactgtttaattcaatctgtaataaaaatctaactaactaactcatttatttctattaaaaaggtattgtcctttaggcggggaatgggaatccttgctgcactgttgcagtcattctgaaaggacctttccctgtacttacctttcaacatgcttcaatcttatcaacgctacattttgtatttttcaaacaagtataaattctgcaataaagagatgtagtttttttttaaaaaaaaaaaaaaaaaa

SEQ ID NO: 28617 - DNA, 2274 bp, Homo Sapiens
aagatgaaagtccccaaggacagcacgtccacagtttggaaagagttgctgttagcaaccatcggggaacagttcacagactgtgccgcagcagatgatgaagtaataggagttagtgtcagtgttcgggaccgagaagacgtcgtccaagtctggaatgtaaatgcctctttagtgggtgaagcgactgttttagaaaagatctatgaacttctgccccacataacttttaaagcagtattttataaaccccatgaagagcatcatgcttttgaaggtggacgtggaaaacactaattgcactctgtaaagaattctttgtcctttgctggttggttttggaaacggtcttaacaggagggagagtgaagagaagacttgccgaagccgatgctggtcaatttagagtgggtttctgtccttgcagatgggcaattaggactcaaagtggcaggtggggtggggggagattgtgtgggtttctaccgtcacattacttgctttttaaaaaaaacacacacaaaaaacttttttttggctttctaaattctctgttcttttcactctgattttttttttttttttgccgtttaaaattccttattcagcctaattattgttttctacactcccctttcattgaggcacaagaaatgggtttccctttaagtagctctgctgtacctagttaatgagaatatgcataatcgtgacaatactgcttttgaataccacactgtacaaggaggaacactagcttggagaaatctgtcttctgattatttgttgtgacacattcctatgtactgtgagctgggcattgtttttttctgtcccagggaaaagaaaaaccatacttaatgtgattttgcactgacagcacacaaatctttaattttcctttttaaaacatttttttttagtgataaaaggaaaataatagttggattgcataacatgaaaactataatcacaattcagtatcaggatataaatcaagctctaagtctttggaccctctgtggaaacatttctaacccgaattttaatttggccttttcaaccaaaggcttagagtggtagcaagggatttcttccaataggaaacctgatgtttctgatttaaagagaaggtgatattttaattgtttgaattaagctccttgcaaagttcgggtgtgtttacccacttagggctttctttcccagtcaacgctaacacattttgttaaatgatccctttccctgctcacattgtgtgtcatttctcatcatcagtagtcctccagcctgggcagctgtccccaccctttttcatgtaggtgcaggaagttaaatctcatttccaggatgcatgtgaacatttacaaagttgaactttgagtgcattctgctcatatgaattattgggattgttgatatatattgtattatgctaccaaagaaatattggttttattagaaggaaatggtcatcctctggaccatggagactagctcagaatacgctgatttccctctcctgactttgccaagcctttggctgcttttgcctgataaagggcagggccatctgaagacacttcccccagtcggctttggagtcacgggagctagtgcctgctcacacatttttcaaaagggcagtgcactcagaacttcactgtacctgggatttttaattcctcttgcagtgttgaccagcagagagacttgaggctactttaagcctccactatgtgtttgtagataaaattctccattcaaacattttaaaggactttgaacattatctgcttatggaagttgtgcccttcacttggttagtaaccacctcagccataatacttaccatcataggtttcttaaaatgcttttttttttccctaaacttgagtttccttagtgatttcaaaatgaagtataagaatatcagatccagttagcaaaagcctaggacttgtttctccaaacattgtgctaacattcaacttgttttaaaattatgactcaagaattttaaaaaattattctggacatgaattaaaacttttttataatataagtatttttctgattgaaaaaaggatataattgacttcactctaattgtcatgtatatttccataagtaaatggattttgaagtatttttattttttgaactttatttaaagcatttgtgatgacatgttcaacttttgcatgtatgtagcctttgaagtaaaaataaataggaatgttaggctcacgttaaaaaaaaaaaaaaaaaaaa

SEQ ID NO: 28618 - DNA, 6543 bp, Homo Sapiens
cccccaaatccttgagaggctaatggagaacaggggtggggtctctaagggggggggggcgtagacaggtggggaggaggctgaatgggcagagcagacagtggaggtgaggacctgccagaaaccgaggaagcccctgctcctcgtcagggccaggtggtcactggtcctgcctgctcagccaccccaaggctccagaatcacccctcccctcttccttccctgtcggctttgccccagccccccacctgggcctcccccgagcctccgatccattctccatatagcagcctgaagggtgttttggaaagctcagacctgacttgcctcccagagaccctcaagaaacaaggtcaaattcccacctcggcctgcgagactcctgtgtgggcaggccccaggggcacctttcccaatggcgacagcctgacctcctcccttgaccaggccccctccttcgtcccctaggtccagaaccagccagcaagcacctccctcggtccctgcagtctcctgctgctgccgcctactcatccttccttggtctcagcctgagtgtcccctttttcgggaagtcttccctgatgtcccacacccaggctgggttacatggcccctctgggctgcccagtcccaggccacccctctcagttgttactggccagggacttcttgtctctccctggactgtaagccctggaaggacagggctagggctgtctttcctgtgtccccagcactacccaggatggatatgggtgagcagaggtgctgacttttcttaatgctggactaccaggagtgggtctagttatagacaagctccccagaggaacagggtggtctacgggggagtgaacagtgcacaacaaaaggactcgactttgtgatctggagcttagagtgcaaccaggaagactgctggtgcctgagcaggagaaaaacttgggttgggtgctggggacaccagctggagggttgtctggcctgcagcgtgcacgcctgggcgtgttgaagggtggggtggtgtagggtaggccctgctgacccctctgggggcctcactcctggtggcctgtgcggcctctggcaaggccctttctcctgggccaaggatcttcaggggcctggctcctggtggcctgtgtggcctccgacaaggccctttcttctggacctaggatcctcagggcttctaatctgggtccacaaatggccttggggtgtgtgtgtgtatgtgtgaaccccctcaaactgtatgcaaataatatgagcatactgtcctgggaatgggctagaactttcctcagatcaccaaaggggtcggggaatgtgaagaccacagccctggcctatgagcctggagatctttcctccctgctggtctcccacgagaggccttggtgcctcctgggttttataatgtgggtttgacatttccataagctgctctcttgaccttaaacgtttctcagagaacttgcagaggaaggttaggaagtaagtcactgaaaagctgtttcaagctagaacacgaaagtaagcagcacagagaggaagccccttcccgtctgagggtgagaagagaaatcaaaggacagcagtcttctgagtatagagggcgacagtgagggtgtccagctccgtgggacaggatggctcctggcccagaaaccttgctcaggagggatggaggggtgggcgctctcaggggaggtggtccttagacgctgaaccggcagagctgggattcccacccaggtccgtttcacttcagattctgtttcttctaccacaccacttagcttctgcgtggccctgagtaagtcacctaacctctctggagcctccatttcctgtctacacaatggaagtgaacatacccaccaagtggcggaccagcaggctcaggcctgtaggcgttcagggagagcccagcgcagagtgctcagtgagtgggggccatcgtgaggcggccagttcgtcaccaaccctgccgccctgcaggcaagctctcctgcctcacctaccctggcccacaagtgccctggagccctgggtctgccctgctgctgcgcctctaccactcacggtgtgccctgcttccttctgttcctcggggctaggggtggggctacccaactgctttaggcccactctgtgccagggcacagcaggtacatcagaggcagaaaaaggtgggttgtaaagggtaaaacctgggaggaaggaaggaggagggagggagggagggagggaagaggaggcaagaaaaggagggagggagggaggtggctctccagagctctgaggtggggctgtgagtgacagtctttgacttggcagattccagtgggggcatgtgggtgactgaggtcctgccctggcgtcgcaggggccaggccactggagtgggggggaagcgcctcacctttgatgatggatttcatgtcgcacttcacggagtcaatgttgtgtaatgcgatcaggagctctccagggttcagcggggacaaggctgagtttccctcaccatgctgggtgcccagcaggcggttgaagacttccttcaccacgatggggttgagtttgatgagtttaggcagggcctggatcacctctttcttctccagcccattgagcaccgggatgaggaagcggacgtctggcagtcgcttgtggtagagatcccggacccgcttcaccagctctggggagggtgggactttgtctgtgaggctgtgcagacatctcgtgaccagtgtctctgctcccttgggacaattttccaccagcaggagcagctccggggagttcatgcccattcctcggatcggctgctcaatgaccctcagcaccgtccgcttgatgtcggcgatggcttcagtgtacacggccgccagttcgtggatcagcttgtggttctgaggcaggagggccaggtagaggtacagacactgcttcactgtctcctccgtccagggtgctgccacctctgtgtccttgtcagctccaaacagcacagacggtgggttggggtgcaccaggagctgcaggtagttgagggcaaatttctccacatactcccgcagctgctccttctcatacatgcgtttgatgaacagcagggcctgggagcgcaccttgtccttctcatgggagctgaggtcgaggaggacatgcaggtactggaactggcgggacgggcgcttgaagatcaggtctcgaagtgtggacatgcccagataggtgcgactctcatcctcgcagtacttgcggaccacctccagggcactctctgtgatgagtggcgcctccagcacaaccttggtgaagatcccatccttctggtctggtttctcctgcaggccagacaacaggcggatgaggcagtcctcatacttgtccagggagcccgaggcacctgcggccaggtaggcgttgtactcctggtagagccaggcgaaggccaggtccaggcgggcccgcacatcctccaggatgaaggacaggacctccgccttcaggcccgagttggactgtgtcaccaggctggccaggatctttatgcggacctgggctgccccgctgcaggccacagccttctcagcccgcaggatccgcttcacagcgcccagcttcatggcttccacctgggcatcggtaaggggcttcagcacgtcgctgagacggaaaattttcttgcgcccaccagcgcctgccagccggggctgagtgacagggataatgggctctggcctcctcttggcctgcggtgcctcttcctccaggggggacatggagctcagggaacccaccaccgagatggcttggccctgggctgacaggcgccgcttgatcaggacgctctctgtcttcaccaccttctcctccttgggctcctccttgcactgtttggtctgctctacacctggtcccagtccggcagctgtcatctgtgtggccatgagccgagccaggtgcttgatctgggcttccgtgcctgctgactccacgggggtgtagatggcctggaaggaggctggcatggcctcgggtaggtacaccatgctgatgaggaccagattagccacattatcaggcgtcagcagaggctgcaggaactcagctgtgatgtccgtgtctgactggccggagatctgcgctgaggccttcgaggtccccgacgggcctggctccaagtctttgtcctcatcgtcctcccccaggttgggctccagcttcatcttcttgagtgtggagtccgagtcatcgcggggccgcttgcgggtgtccttgctgctcggcatgttgcgggcgatctcggcctgaggtgtgcccaggtccaccagcagggtggtgatctgggcctggaactccaaggaagccgggtgcttcagcacactcaacaggtgcagcttcagattcttacgcacactgctcacctgcgatttggccagcgtcgggggcaggttggcatgcagagtttcataggcctggatcacctcagacatgaacatgggtctctggcgggcgatattggcaagggagcccagcgctgtggtcaggttgatggaggagatggcagggtgcaccatgaacttaagcagctgctccaaggctgccttgccctcttcccatagcacgttgtactggatgtaggggtggtcacgagggatgcggtccaggctgatatcatgctcccggcgtcggggtatctctgagtcagccatgcggggtgacagggtgacaatgaggccctccacaaacttgatggcgtgggtgcggatgccgtcattgtcagagtccaatagcaggatgatgtcccccgccatggcagataccatgtcccagcaggcctcctgtagctcgctaatgacccgtgactttaccatccactgcagggccaccttgtagagctgggtcatggtgaggatagccttcttcaccacgttcacattctcgtccctcaagagcatgttgaggtttgcaatgagtttcagcagcaactcaatgtctcgcttgcatgcctcctcgatgaagccgatgacaaattttcgcacttcgattgacttgtctgcttggaatgcgatgatctcatccaggaagttgtccagtagtgtggggtctttgttgatgatcagctcctggacctgtttgggcactgtgatctttgagtcattggtgatcagcgccgcctggttcagaagatccaccaccctctctgaggtggtcatgccatcgatgcccggcccctcctcttgagtgaaaaactgtgatgccacgctccgacgggtgacgctgtctccactgccgctcgccatggctgctgtcagcttgtccccaggaaagaagaggatggatcaagctcagggaaccagcggatgggctgggctggattgtcacccgaacacctacaaagggcccaagcctccttccaggctgttcctccccagtcaggccttctcaagtccctctcccctccagggtctgtctctggcttatggatatgtgcacggggcctgtaacttgggggagactgacatctcccaaggcagagccagaagtctcagcctcaagtgggccaaccacaaacagctgctgaacgatgggccacatgaacgtgcaacagccaccttgcaggtctccgtgtgtcccctctctccatctgggatatgctttggactgggcaccacagcaaactttcttttttttttttttttgagatgaagtcttgctctgtcacccaggttggagtgtggtggtgcgatctcagctcactgcaacctctgcctcccaggttcaagtgattctcctgcctcagcctcccaagtaactgggattacgggcacatgccaccatgcccagctaatttttgtattttcagtagagacagggtttcaccatgttggccaggctggtgtcaaactcctgacctcaggtgttccacctgcctcggcctcccaaagtgcagggattacaggcgtgaaccacggtgcctggcccagagtaaacttttaaaaacacagctctgaggaatatcaggcacagagtccggcacatagtaggcactcaatacatcacaaaaggcctgcttcaataattatgtttcagccactctctggaatatcatgaagctgtttttaaaagggaggaagggggctttcaggcatccatcacagtcacacaggcaaaattatggaatgattaacgtagcagtatatgtcaattacacaactattcataatagcaaaagactagaagcaactcaagtgttctcaaatagggagactggctgaaaaaaagttcatacataatcaaaggccatggggcttcaacacctgtgaaagtaagtgaaaaacatataaatataaataaaggaaaaagactatggaactgtaacaagaaaggaagaaaaaaacaaaaaaatgagaacaatctctagacactgatagagagtgcatacattaagtgaaaacaagcaaagctgaagacagtgttgactgtatgtttctgttttacaaaaaaaaaaaaaaaaaaaaa

SEQ ID NO: 28619 - DNA, 8107 bp, Homo Sapiens
tccaaaatactcatattttgtaactatagatgaatattttatagatatgtgtatatctttgccattctgccaaaagcatttgagaacctgtagatgaagctgtttcaggagaattttgttgacttgctatatttatgctttaatcgttttggatgttacttttctctttctctctctctctctgtagatatattttttgtaaccacatattttatttctagtactggaaacaaatggcgctccaggagaaagatgttaacacccactttccattttaccattctggaagatttcttagatatcatgaatgaacaagcaaatatattggttaagaaacttgaaaaacacattaaccaagaagcatttaactgctttttttacatcactctttgtgccttagatatcatctgtggtgagtctcatcgatctgtttctaaatttatggcataaagagaaaatggcccaaacaggaaatcacactccactgggaaggcaaatggggggacgggaaagggtgacgggctcttcagcgcggttctacgaccgcactggccttctgaggagcagcagccacgcccagggctgtgagtggggcaggcatggagcaactgcccagggaggcgaagggaaggaagaacaggaacagggagtagaagtggaccgtacaagagaagagggtaaagggaggaagaagaattctgaaatatgcaaggacaaagcaggatgtacgtctttagtgtctgccgctgcaaaataaacacgagataactaacgtgcgtgaattgaatggttgcttctcacccatattttatagaaacagctatggggaagaatattggtgctcaaagtattgatgattccgagtatgtccgtgcagtttatagaatgagtgagatgatatttcgaagaataaagatgccctggctttggcttggtctctggtaccttatgtttaaagaaggatgggaacacaaaaagagccttcagatcctacatacttttaccaacagtgtcatcgctgaacgggccaatgaaatgaacgccaatgaagactgtagaggtgatggcaggggctctgccccctccaaaaataaacgcagggcctttcttgacttgcttttaagtgtgactgatgacgaagggaacaggctaagtcatgaagatattcgagaagaagttgacatcttcatgtttgaggtattgtatattgttaggttcagatatcattaaacaaatttcagttattgttagaatctttagcattattttttaaaacaatcaaattttaaagtagtttaactaaagaagattcattatattttaattagaaattacaaaatttaagaaactgattaagtaccagctcaacttcttcagaaaacgattttgactagtgctgggcacagcagtagacacatttgtttttcctcaagaaaacctaagatttgtcagagttttcccaagcagaagagcagccagagattgctctcagttctccatgtggcttcaggcttccttctaacctcccagacatgcaagtccacttcctcaccacctgctttctgaggttccagcagatgagcacttagctgctgccatgagctgctctacctagaggacagttaagagccctccaacagagaatcagccagttcatgattctaaaaagatctctgatctcaaatttatacatacatatgtgaagtacattttagcaagatagcctaaatattaaatcctacaaagagggactttctctatatgtggattgcaaaataaataaaacatggtttttagaagccatgtagtaatatcgtccacatggggcagagtgaaaggcacctgagtttttaatggctctgcctgccacccacgtgtgagctgctctgcggcagcctctggcggcagtgccagtgtcctgcactctggtgtgaggctccacgacacggtagaagaaggttgtgtgatgggtctttcgatccgagttccagttcaggctctgtgctgattagccaaataagatagttctgatcattccagagttctgtcacaattttcctatgtgtaaagcgagagatggactacgttggtggttttaaacttttttaagcagaaaactttactgaaaataaatcttaagcagaaaatggacatctaaattagctgaaaagtagagaggtgttaagtgtgtgggctctaagatcaaatcccagctaacatgctgggaccatgacctcaagcacctcacctagccgttctgggcctgaatattcttattttaagagcacaagcctcatggaatagttatgatgattagatttgtaaaggtgctctgagaatcgtgattggcccataagtatgcggcacataccgggtgttattattgcatgtcggagtagagagatctcacatcttcaccttgcccatgtactacacacacacacgcatacactcatgtaaacccatgcacacacatgcacacacctacacacacacatatgctcatgcacatacacatgcagacacatgtatataccaacatacacacattcacatatacacacatacacaaacacatgcacacacctacatacactcatgcacatacatgcacacacaaacatatgtatatccacatgcgcacacacgtgcatacactcacacacaaatatacacacacacccagatactcatgcacatacacacacatgcacacatatacccacatgcacacatgcatgcatacacatgcatgcacacatatacccacatgcacacatgcatgcatacacatacatgcacacaccaccccccacagaggcacacattcatgtacatttatgcaatcatacaaaaacacatgtacacacctacatacacacatgcgcatatacacatacatagatgcacatatatacacacatgcacacataaatgcagctatgtacactcgtgtacataagcacaaaggcacacacaaatacatgtacatatccacgtacacacattcatatatgtgcacaaccccatacacatatgtacacacatgtgcacacacacatccatctcctaccaggaacctctcaatctcacgtaaacaatcagaaccagactaatgatttttcttccaactctaacattccttgacattctaattgttttcttctttgcattgaaagggaggcagcataccaggtgtgagtgtgatactgtggcctcctccacaggtcggtgcaggctgtgagtgacactgtggcctcctccacaggccggtgcaggctgtgagtgtgatactgtggcctcctccacaggctggtgcaggctgcaactgcccaggttccagctgtgagctaaaagtgggcgtcctcccctgctccaccagtgtgcctcggtgctttacgtttgccttatcatgctttctgcagttggcagatgaaatgaaatcggaagttcagcagactcctcttatgcatttggatcaggcttccgctcataaattcaaggaaagctattaaaattgtttagccagaatacttccttccgtacttagacaactgagcacaacgggccggagctcatctggagttccgagtaggttttgtaactgcaagtgctaggaaaatgcagaggcgccgacctcaggacctgtaggctgtgtcttttaagaattgcagaataagccccgagcaattcattttaggagctgttttataaaacaagtactttgaagatttctgcacagagaatgaaatattacaaaaatcacttgtgccacataggaaaaatggaaaagtgagatcttttatagaggaaataatttgttttttctttttgtcctcaaagtttcagagaggtagattactgttattgactttccagatacatttttttttttctgaagaactcaccacttttgcatatggaaatgtgctagggagatgaggaggtagataagaagccaggtcctgaaatatcaaatgggtgggaaagaaggttgcccgagacattacactagcttaagaggtggaggcggagacgttacgataccgctaagaggtggaggtggagacgttacgctggcgtaagacgtggcggtggagacgctacgctggcgtaagaggtggcggtggagacgctacgctggcgtaagaggtggcggtggaggcgctacgctggcgtaagaggtggcggtggagacgctacgctggcgtaagaggtggcggtggagacgttccgctggcgtaaggtggcggtggagacgttacgctggcgtaagaggtggaggtggagacgttacgctggcgtaagaggtggaggtggagcgtccttactgcacagggtgtggagggaatggcgtgggctcagctggctttgtcatcggacacgccgcaggctcagtttctgcctctgtttcccactaagctgtttagcacagaagaagttatttaaccacatctttggcctcagtttttaatctctgaattgtaaagaacagtaatgagtctttcatggagtttttgtgcagattaattcagtttctgcaaagtgcttagtattttgcctaaaactcagcaagtatgaaatgaggttgttgtcaatttttactgcagaggatatgacttagaaccacacctctaccccctggtgcccgtcatcaacaggtgaggcccacctgacagatgggggaaggcagagaagtacagccctgacaagcaggctcgtgaaaatcagactttgttctgttcacaaaggcgcagctcacctcgtgcccatggaacgccgcctttattaacacagcacaggcacgtcccaccagcgtgcaacaccgtgcggcgtggaactgccatctctaggcatgaacctccgctttgcaggcttgtttccttgtttgtcaccgaggcaaggtgctgcacagaattcatttcttatgtttgcagtcacagtgcagtcatcaaatccagagacaattcaaaagaggtttctggtcactcctaatcatcgcagcataactctgctttttaagctattgttttctgcatttgtaggggcacgatacaactgcagctgcaataaactggtccttatacctgttgggttctaacccagaagtccagaaaaaagtggatcatgaattggatgacgtgtttgggaagtctgaccgtcccgctacagtagaagacctgaagaaacttcggtatctggaatgtgttattaaggagacccttcgcctttttccttctgttcctttatttgcccgtagtgttagtgaagattgtgaagtggcaggttacagagttctaaaaggcactgaagccgtcatcattccctatgcattgcacagagatccgagatacttccccaaccccgaggagttccagcctgagcggttcttccccgagaatgcacaagggcgccatccatatgcctacgtgcccttctctgctggccccaggaactgtataggtcaaaagtttgctgtgatggaagaaaagaccattctttcgtgcatcctgaggcacttttggatagaatccaaccagaaaagagaagagcttggtctagaaggacagttgattcttcgtccaagtaatggcatctggatcaagttgaagaggagaaatgcagatgaacgctaactatattattgggttgtgcctttatcatgagaaaggtctttattttaagagatccttgtcatttacaatttacagatcatgagttcaatatgcttgaatcccctagacctaatttttccttgatcccactgatcttgacatcaagtctaacaaagaaaaagttttgagttttgtattttcttttttcttttttctttatttttttttttttgaaaccgtgtctcactctgtcgcccaggctggaggagtgcagtggtgtgatctcagctcactgcaacctccacctcccaggttcaagcaattcttctgcctcagcctcccaagtagctgggattacaggtgcctgccaccatgcctggctaatgtttttgtatttttagtagaaacagggtgtcaccatgttggccagactggtctcaaactcctgacctcaagtgatccacctgcctcagcctcccaaagtgctgggattatagtcgtgagccaccacgcctggccagagttttttatttttatcaccaccatagatgttacagttggctgtggtcacaaaagtagttaattgtgtcagcacccaaataaacatctaacaggtttctcaacagaggaatccacagtccaattccacttcaattgatagacccaaaaaatataatttaatcaaagttctagagtttttgtttgtttgtttgagatggagtcttgctctgtcgcccaggctggaatgcagtggtgacatcttggctcactgcaacctccacctcccaggttcaagtgattctcctgcctcagcctcctgagtagctgggactacaggcgcctgccaccacgcccagctaatttttgtatttttagtagagatggggtttcaccatgttggccaggatggtcttgatctcttgacctcgtgatctgcctgcctcggcctcccaaagtgctggcattacaggcatgagccaccatgcctggcccaaagttctagaattttttaaaggtattcatggtgactcaggaatacacacatacacacacacacacacacacacacacacacacatacacacacacatataatttgaaagaggtgagtatgtactctgacttcagctctcaggttttaaaaattatattagtgggaccagttatgacaagaataatcattatagtacttttcagattttataacctggagcagattattttaagttgattagtaggttctgttacagtttttcttttgatcgtgcacttatagtcttcatttaattcctcatagaatcccagtcacctttatatatcatattattggaagagattcatcttcataatctccagttttttcacagtgcctcacagagttaatcatgccttttggagctagaaggactttagaacttatctagttatgctcctttatattataagtaagggaatagaatcaataagacagtttctgcccaaagtcatgttaccagttggtgacagagctggaaatacgtagagatctatacccttaaatctctccactcacatgctgatatactttctactacaatatgctatagctttatggaactcagggtgatgatcagacgtgtcattagaacatgagtcctctgcttctgattcaggcatacttttgggattcttccatctttaaaggaaaaaggaagccattcatctatatttagtaacccagtaatatctcacttagtttagggttagatctttagttaattcaaccttatagatcatacttatgaaggtgataactgacacgtgttccctgaattttaatttgataggcaatacatctacccactccattattttttaaaacttcatttaatagtttaaacaagattggttttgttttcaatttttattcactcttcatagaatcacaattacctttatatatcatatgttattggaagagattcctcagtaatctccaatctctcatagtgcctcacagggttggtcaatggcttttggaactggaaggaccttagaacttatctgttatgctcctgatagccaatagcagatagaagcttgcaatcaagagggtaggacatgtgttcttcaatggatatcaaaggaagaggttgcaaaccaaagccatttggcaagccctgtagcctgggccatttaagacaggggcggtctcagccaaattgcacccatttaactatcccaaagggccacagtgcctacaacccaggccctaagttgatgaagaaaaagtcaaggaaggaggtgatacaattggaaatattcccatcaaatggttaatcttatttagaaaatgggcatattagaaaaagtccttccaagatgattttggataataaaagttgtatttgtggaaaaaaaaaaaaaaaaaaaaaaaaaaaaaaaaaaaaaaaaaaaaaaaaaaaaaaaaaaaaaaaaaaaaaaaaaaaaaaaaaaaaaaaaaaaaaaaaaaa

SEQ ID NO: 28620 - DNA, 6686 bp, Homo Sapiens
tctggaaaagaaggcgagatcttctagagcctctaatcttggcatccttcgtgccctcaccttgtcgcttctgtagagataaagaaggaatgacttaatttctgttccggttggttctcttggtacctgaagatacatccagaaagtgcccagaagaaacttcctgctggaaaaaatgaaaaagcagtatttataacattagaatctggataatttgttaacatggcagaaaataatgaaaatattagtaaaaatgtagatgtaaggcccaaaactagtcggagcagaagtgccgacagaaaagacggttatgtgtggagtggaaagaagttatcttggtcaaaaaagagtgagagttattcagatgctgagacagtgaatggtatagagaaaaccgaagtgtctttaaggaaccaagaaaggaagcacagctgttcatccattgagttggacttagatcattcctgtgggcatcgatttttaggccgatctcttaaacagaaactgcaagatgccgtggggcagtgttttccaataaagaattgtagtagtcggcactcttcagggcttccgtctaaaaggaaaattcatatcagtgaactcatgttagataagtgtcctttcccacctcgatcagatttagcctttaggtggcgttttattaaacgacacactgctcctataaattccaaatcagatgaatgggtaagcacagacttgtctcagactgaattgagggatggtcagctaaaacgaagaaatatggaagaaaatataaactgtttctcacataccaatgttcagccctgtgtcataaccaccgacaatgctttgtgtagagaaggtcctatgactggctctgtgatgaacctggtttcaaataacagtatagaagatagtgatatggattccgatgatgaaattctaacactttgcacaagttccagaaaaagaaacaaacccaaatgggatttggatgatgaaatcctgcagttggaaacacctcctaaataccacacgcagattgattatgtccactgtcttgtaccagacctccttcagatcaataacaacccatgttactggggagtgatggataaatacgcagccgaagcactactggaaggaaaaccagagggtacctttttacttcgagactcagcacaggaagactatttattctctgttagttttagacgctatagtcgttctcttcatgctagaattgaacagtggaatcacaactttagctttgatgcacatgacccctgtgtcttccattctcctgacattactgggctcctagaacattataaggacccaagcgcctgtatgttctttgaaccacttctatccactcccttaattcggactttccctttttccctgcagcatatatgcagaacagttatttgtaactgtacaacttatgatggcatcgatgcccttccaattccttcttctatgaaattatatctgaaggaatatcattataaatcaaaagttagagtactcaggattgatgcaccagaacagcaatgctagtaacaggatgggaacatgggaatgataatatatattttttcttttaatattttatttttctttttatgccactttggatttttctacaaaggcagtggtgtccaaaataaaatctctgccctaaattttactaataaatccatttttctagtgatacacaaattgtttaaggttatacactcgagcttaaatagatatttttaaccaggtgtttggtttttgtttttaccgtgtaggttgtatacttacattttttctttccttaatttatacatgatcctttttccttaatttatacatgatccaggcacatttgaaatttggtaggcattgcaaacacatttgaatattgtgtatttcatactattctttaaaagtaatcttatgtcctttcctacatgtaaaatattttgttaatctatgccattagtagtattatatataaaatatagttccccgtcccccttttcattgagtttgatattcttcagtaaagctgaatgttgtaattcaccattcatactaatgttattgacttttgtaacttactaatagggatgttaaaagtaacaaaaccaagtcaaacttggtgtatttttattttaaatattaactctaaagcaggattactaaatttgattaatctggtcaatgagaatcaaatggaaacatatcattctggaggtgcacttactcttctacaatgtggccggatcatttgtcattcctgaataggtctttctctcaacctgcaagagctaaaccatcttcaaaacataaatcttgttcctttctcattggaagctttgaaaataatgataacactattagtagctagtagttactaaagtgctaaagtaattgtggggtttttctgtattagcttatgaactgttgcttctacttagcccttttatagaaactctgagctgttactttggggaaattccacaatgtattagcagccacaaatttccactggtaaccaaagagtacctaagtagtttttcattattttaagttgaatttgaataaagattccagaaataaacatggagctcagtattcaggaagcttaatactgtttttgatctacaagatccaaataattatccctatcttcagaattaacttagtctgtaatgtggcttcaaaaaaagaaagccttttgacagctacatgacttacaccatacagaacagtactggacaaaaggggtgatattttaaatttactatcccagaaacagggcaacgtttttagaaacatctttagcccaaagtaactagtaaaaataaatggagtggtatcctatcttctttttttaaggaatcaatgaataataaatgtagatagacaattttcttctggtgagctgtctaaccctttgtacacattgacatttttaatatcgtaactgatttcttgatgctagtttagctatattaggaaactgcttctacctagattgaaagaaatttgactcataaacttccaagttagaacaaatatttcttcattattgttgcttttatgtgagtagcatttccctatcttgcagttctgttaacatgaaaatggcatttttccataatagctttaaaataattttttagtaattattacaaaattaaggaaaatctctattaccgttatcttttagcattttttttttcctcagtgatctcaagattgtcttagtctcaatgagatgtagctacaaaaatggcacctcttagcagtgatgaggctcaggatatcggatatcataacaccaatgtcaggataaatatctcttctaaagacgatatttaccttttacaaggttagaaaagtctcatactacctcatctttattgtggcgcttttgtagatcactgagaagcttatcttattaaccaatataccacttcctaaatatccatctttggtgaaagaaaatagtgtggtaagagtacccatgattatagttttttatcagaatttgataagattttctgtttctgtgaaacaattattttaaatatttttcttttaaaaataactttttatcagtacagaaaaacctaagggatgactagcttacaaatattctgttaaggggtagttttataaagaaaaatgatatatagttatgttgtcttttatagtgttaaaattagtatttatatgaaagtcaagatctaagtaccttttcatataattcaaactgattgcttgtgatatgttttctctggcttttttattttttcaacttcaaggtattaacagctgttaacacttaaaaagtactgccacatatgtagccttgaagtagttgatctaataaatgagagcagggaggagattcattgactctgaaatgatttttatttttcctttggtatttgctacagtgaaaagaagtttggaaagtagatacataaagacttgagaagggaattgtttaagggaaaagaaaagagtaataattttttttaaaacattaaggaattggaattcagaaaggttacccccttcctctgtgtctttgtaaggatacatttggaagaacatacagtattcagaaactagcctatataaaatgtaaacaatatattgattgcactatataaatgagtaaattttgagaggaacaatgtgggaatgtataaatttgtctaaaattttataactgttgaacaaagggaagatttgaacagtgtaaattccagagttgagaaagcatttagcatggtggaaatgtggagagcttattggtgagagaggatggagctaagagaaataagatcaaatattaaaattaggaatttaggcattacctcagggaaaagccttgacagtgaaaagaaactacttaatcgctaatagctagtctggaccagacacttaactgcgctttgggaatcatcctgggctaatcaggaaataaacttgacttttctatttttctctgaagctttacaggacatactcccactcccatttttttctaagcctacagcatcttgattcatagtataattcctgaagtatgctgaatggactttttaaggttcctttagcatttttgtatagagttatatgtgatctttctataaccatgccattcacttaaataattcatgaagggaatggtttaatttaaaggaaggcctaataggaagaagattaaaggaagcttttagtcagcctgtggctagatttattgatttggtgatcaaacctgtgctatttcctgaatttcagctaatggccaactgtggtcaaagaatggctttcagttaaagttttgacttcttattataaataatataaagaatgtctcagtaattagaaatcccttaataagtagaacaaatgtggcaagtaggactcctatcggtatacaaattccatttctttttataagaaaaacacataaaccattatcatttattcatgagccaaagccattaagaagataaatccagttatcagcttcctgtctctgaagtttggatcattttatagatccacgcaatagagagcttccttcctatgaaacaaaaaccttgagatctctttttttttgagacagagtctcgctgttgtcagcccaggctggagtgcaatggcgcaatctcggttcactgcaacctctgccttccaggttccagcaattctcctacctcagctcccaagtagctgagatgacaggcgtgtgccaccacgcccagctaatttttgtatttttagtagcgatggtgtttcactacattggccaggctggtctcgaactcctgacctcaggtgaccacccgcctcagcctcccaaagtgctgggattacaggcatgagccactgtgcccggccaagatctaactcacgcttacttttcattaaaatatttcttgtcgcttttagctattgtcagaatccaataaacagcttacgcattcattttggtaaagcaaatttcacaggaaaatagacaaaattataagagattcctggagacaacacaaggaaaacaatgtttaaaagcaaaatagcctgtgtaatgttaggtaatgtaatgcccaagtgaataaaagatttttcgtcaagcaaactactgtttctactttgggggaaaaaagtcagttttacattcgtaatttaaggaaagaacagaaagcacaaaggtttttcttttctttattaatggcctactagaaatgagcagtgcaagagtctacctgtactattctaatacagtaagatattggacacaaaatggaggtaactttttaaaacagattggcttggaagttgaaatgtagattaatggatataacccaatagaaagggattttcaaataaaaccaaagtctatttttttatttactttctaattttgaacagatgactcagtcctaaatctttgcctttatttcctataaaatgtaggtgatacttgtaactcgacttcctggagttaattcttcagcaagaggtgaccctgggagcgtactttaaaataattgctgtacagccattgagtactaacatgatgataggttttcaaaatatctttgtagtggatgctgcataattacattcacttctcttagactgtaaaagactttcttgacttgttttaacagtagagatagcagtacaatttgaatttatggtttaggctctgcaattagaggaacaattgcagtttcctcctacccttcatatggtctgtgtaaaactgatgtttgcttaacttattttaaaagttgattacgttttcagaaaataaagataatcacttttgccatggttataatcaaatctaagctttcagacttgagagccatggtgtaaaactcaaggaggtttatttaaattatgctgactttgctagaattggataaattctgtataagccaagtatgagttcacatgtactcgaatatacagttttcacaaagctattactctcatcagtcaggcttgtatgatctattccttaccacaaaagaagtagacaattgccacttttatttctaatccttaagttgaatgtttcttcttggatgtaagttcaaataaattgatctggataaattttcatttctacttaattaaaacttcctatgtaaaatccaaaaaaaaaaaaaaaaaaa

SEQ ID NO: 28621 - DNA, 3435 bp, Homo Sapiens
aagccgggatccggcccgaagggtgagcaccagctcgtctccggtgggcgccgccttcaatgtcaagttccagggcagtcgcttggacccgtttggcgagcgcggagtgagcggcgcaggaggagctcccctaggtcccggaagaaagccggcccctgctccgcgcggccagcgacactcagagcgagattgtttgggcctgggaggaggcaggcagcgaacccaacttgtacagtggggtcttgtgtgcgctctcagtgacaggcaaggttacctctgctttgaggggccgggtttagtggtcttctccccagagtgttggatctaggaactgcctgcgttagccccttgctccacgtgaatctgaatagttcgtcctggcagtggcggtgaatttggcctgccaggacccgccctctgcctacactcagcggcaccccggctaaagccctttagctccatcgctacaggcctgtcttaagaggcctctttatacctgtgccttcacaggcggcatcacatggtctttttccaaggacaaggctgcctgcagtcaagtaatagtaatttaattgatacctgaaattccatcacctattaatttatttcaaagctttgggctttcttgttttaagacacaaaactctgttgagacgagactgacttcatatagtgccatggaattggccactttgatttcttaccccaggaagtcactagactgcattgtttgcttcttatttatatgtaccatgcctagtgtcgtacctggcattcagtaggcactcagtaattgttcagtgagcgaatgaaaggtgagaggaaggcaaagttggaaaggacttacctgatgcctgttctacttggagtttgtacattttgtccattttagttaaggattacttttattttggccttttaaaatttcattatactgtattgccttataaagaggagtctggggtattgttgcactgagctaaagggtgtataattcttgttttatctccgttatcagctttgtcgattttaaaattattttgtgtgaaatttgctacaccaccttccttaagggtatgtagtgttggtattaacatagttggtgtgagaactacttgtaggcgctgagcagaaagacgtgaggggaagcctgattttgggtagatgagatataactaattttagctttatttttctcttttgtatcatgatattcggcactaatagcagattttcaaattttagagttggtttttgccttgaaaaaaaaaggtttattcagttttttagcattacggtcactggtaatccgagagttagaattcctgagaacaatatgggcaggttgtactgggaagtggaagtagtctgtgcttgaatcaaattaaatcactataaagatgacatttgtgtttggttctgattctgctttgtcccccactgactttctttttttttttttttaatttgtaatatattttgaagagagattgctagcttaacttcatccatcccttcttgtagaaacttgtagtagggcttgtcaggcctgaaggtttacctgttggtatttctgaaaatctatgtgttaagcacctacaaagtgaattaacaaagcctagcatctgctccggtcacttgtttctttcattgagttcccccatgtgttagacattctattggatagctggttaaagaaatgaagggcagggctcttgggtctggaagctcaccttttcaggagagaagactttcaaacagataaattgtaatagagaagtatggaaaagtgtgggctttacagatgtacagagcgggttcgagttctgtctttcccaatattaatttgtgacctcaaacaagttttttctaacctcttaaagcatgtgtcctgatctgtgaaagaatgatactctgttctgtaggattgtgtgatttaaatgagaacctatgtaaagtagcaggtacacttcatggtatgcggtaggtgcatattaaatgctttctttccctgccttcctgagtgtgctaacaagtgggattgaataggtaacaaaagaatggtcattcccattagatcagtgatttttgtttttatcaagatattgaaatgtctttggaacgtataaaatttgctcccagtttcagcctatgattttaatatgttcattaaatttttctaaaatatttattgcttcatagtgaactcatcctctctgatagttgtagaataattggtactatgtactgagatctcactttgtcagatgctgctgttagtactttacatatacttagtacctgtatccatgctgtaaggtatgtatcgtcattcccattgtacatgatgaaaaaaatatgaggcctaggaggagaaataacatgaccagggttataagctaataataattatggctaacatctgtaaatgctctgtgccaaacactgctttatatatatatatattatttcatttaatccttgtggccactcttaggttctgtagaagtgacagagctggattttgaacccataccattcagtttttgtattttttttttttagtgaaaccccatctctactaaaaatacaaaaattagccaggcgtggtagtgcgctcctataatcccagctactcaggaggctgaggcaggagaatcgcttgaactcgggaggcggaggttgcagtgagctgagatcacgccactgcactccagcctgggtgacagcgtgagactccgtctcaaaaaaaaaaattaaaaatgatgttatgaaatcatttttggtgtaatttatgtggggtgatatgaggagtatgatagtggtgttcgtgatcacaggtataacatgatataccaatgaaagtcaagatttgctttgtgacaaaagtaattttagtaaatatttaaaaagcacaattttgaattttggttgtaaattggacgtattccttggttctaagggtctttttggagttcctgagctcagtgccccagaaggcacatacttcatatgaaatatgaaggatttcatactgcacaagaaaaagccttgagaaagacagaattgcttgtggaccgtgcgtgttccaccccacctgggccccagaccgtgctgatccttgatgagctctcggattccttgtgcagagtgaccgacttggtaagatgctttgtctcagacttgaagctacctctctttcaacctgttaaaatttaagtgaaatttatcctttgttgtttactgttaatattagattataaagttaaaaatgtctgaaactatttgagatccattgggtataattttttgtgatgaaatacatcattaggaatggggaaaatgttataggaaaaggtgacatttagaacttgtactttaatatgtgtatttaataaaatatacctgtaatatataaaaaaaaaaaaaaaaaaa

SEQ ID NO: 28622 - DNA, 7644 bp, Homo Sapiens
aagcactggtatcaacgcagagtggccattatggggggagagccggaagaccctctctttcgctgtttgagagtctctcggctcaaggaccgggaggtaagaggtttgggactgccccggcaactccagggtgtctggtccacgacctatcctaggcgccatgtttgaggtggtatcaacatcctacagaagaagaattaagaattcttgcagggaaacaacaaaaagggaaaaccaaaaaagataggaaatataatggtcacattgaaagtaagccattaaccattccaaaggatattgaccttcatctagaaacaaagtcagttacagaagtggatactttagcattgcattactttccagaataccagtggctggtggatttcacagtggctgctacagttgtgtatctagtaactgaagtctactacaattttatgaagcctacacaggaaatgaatatcagcttagtctggtgcctacttgttttgtcttttgcaatcaaagttctattttcattaactacacactattttaaagtagaagatggtggtgaaagatctgtttgtgtcacctttggattttttttctttgtcaaagcaatggcagtgttgattgtaacagaaaattatctggaatttggacttgaaacagggtttacaaatttttcagacagtgcgatgcagtttcttgaaaagcaaggtttagaatctcagagtcctgtttcaaaacttactttcaaatttttcctggctattttctgttcattcattggggcttttttgacatttcctggattacgactggctcaaatgcatctggatgccctgaatttggcaacagaaaaaattacacagtaagcggaaaatgtacataagcacatgcagataaatatatgttttccatcttaatgaagaactttacttcatatcaacttcttggcacctttatttatggttttgctctgggtaaaaccaatcaccaaagactacattatgaacccaccactgggcaaagaaagtatccctttgtaagtatgggcatttgagggctgatttttatcaccaaaactgctttactaaatgttatttactgtatttcgttttcagtgataaaatcaggacactgtatttttcagacattaataggaatgctaaaagatgtgttagaaaattgaaactacagaccatcatgtaacatttttgtgatctttattagttaatgttaatgattattaccttgcactaatattaccttacacactatttttttcctcctctttatgtccagtcgtcatcatttttctgttgtcattgtggctattgttcagataccttctggagttcttttgttttaattttgaaaattatggaggaaaaaagtataaatggaaactcatatactcaactcctatgtttgacagttgttaacattttccatatttgcttcatccattctttgttttgttttttgatgaaggatttttgaagtaaattagagacataacagttttatcccttagtactttctttagtttgcacctctaaaaaaaataaggatattttcctatataacaataacatcatcgtacctaacagttatctaatactaataccttaatattattatctaatactagtttatatttctacagttaggcaactgtattttagcagaagatgatggtgaggaaacaaacagtttattaataggcattaataactagacttgatctgttaaccttgtagaactgttagagtaatagaaagtttcagacagaattggttcaaactccagctctcctcctcactaaaatcttcatttgaggcagattatttaacttcactgagcctctgtttccccatctggaagatgaagataatagtatctaactcacaaggttatcattggaataaatgaaagaacacatgtaatgcaaccagctggaattaagtgcttaataaatgttcttttcactgctttgcctcatcagaattaaaatagaaatacttgactagtcattgactccgcagtgtaccttttgtattgtgtccttcttttagatcctggtaccagtttgtcttggaatatatataaaatcagtgatgaccatgataatttctctttttagagttaatcctattgaacccaggaaatagccactgaaaaagtaatgcttccccgccgccgacacacactaattaccttaatggtaatttaacttgacagattccctaagtattgaaaagtaattctaaggatctaaggttctagaaaagtctcagagaaactactaattcatatctttgatactgaaagcattcccaatccttccttgagattttggtcatggaaactggatttcatactcctgtaactatgttccctgatttttatatttgccttagttaaattgagaaaataaggaaactagcatttataaaacacttatataccagttattatgtgagatattcatactttacatattgtatcttcttatggtaattgtccatttgttgctgttgtcatcctattttatacatgaaataacaggctcagaggttaaataatttgactaaggttattcagccagatcgcgtgtacataaaacacttggtagttataccaacattcacttcccacttccagtctgattaaacttcatgtggatttattagtaatgaatactttatttaatagaaatgggaataaggaacttttcccttgtgtgtatattaaattataggaaaaatattgtttgtatataaagacctgaggttctctttctatagctttttcccccctttgtcccatccccatttctgacctgtttcataagcattccaagcaaaattatagttttacctctgctctcttttattcttctttaatttgaattcgtggttaagttattagaggcagtttttaattttttgttaaaaatctaaaatgcatgtgatagattgtgaaaaaatggctgcccatcaaagagggtaggatgaaggaaaaataaagtgacaggttcttcttctgtcacagacaaattggtttgtggaaaggtctttgtaatcagaagcaaaaatatggtataatgtagtttcaacccagaaatgtgtttgagtccatcatgtgttctgataaagcattgaaaaaaataaaatatggtaaacagagtccatgtgtgctcataatctcctaagaagaacacagcatatacaggaaagctcagaatggcatcaggaatttaaggtggtttcttctgcctgttctttccctatatactttaagctcctcctcatgctccttcttgagatactctatcagatcaacttcttcagatatttatgatggtatggaataatctaattagaaagtactatttaatgactattatcctaaatcctcaactcataaactgaacaaataattttctagttcactaccttattctgttcctttcattcacgttacctgttatcctcaaaggctgtgaaatagctgtcttcaggctgttcccagttagttgtccttgttgcacaactggagggagcacagtattgtttataggtccccaggaaagggtcaaggctgtgggtaggcttgtgtcttacgtactgttactctcacatgatggctcctaaatctcattgttcattgtagtggaaacatgttgataaaatgttatgcctttatctttcttagccaacattgcttttccattgaaattttatgtccatgtcccctcatgacttaataaaaagaaatgagagagtatatatagtaaagcctttgtcccatccccatttcttacctccatttcataaacagttcgagcaaaattttacacttcaaattttcctatattgtagttttagttgtgagggtttttttttttaatcttttctcatttgttctttatatgcatccattctaccgtcatgttcttaagaatttcagggagacccttctgagttccaggttttatctggcaaatgagtctgtgcattacaatagtcattttaagtgcctgataggtactagatataagactagatgccaagggtggtctagtcactacattcaaattacttgcaatgtagttcttcatcagagcagaaacccatggtcttttaaaaacattaaacaccaaaaggacatcagaagttatctcttctttctaaaaattctttaagcagccctcatcagtggtctggtttctgaaatggtgtccttccgttatgtattttcacctggaatcttaaccttaaccttgaggaattgctcagaaccgagccagcttcaatgcatagcaagttaaatgaattgttgtagaggaatctcaggcacctgatttcttcatgatatatcagaatttttgattttccagtggtcccaagtaaaagctcagcagattgaaagatcccatccaagtaggtatatgatcaggcaaagctgtaaccagtgatgctgggtgattgacttgattagtcccacaggcaatccctgcagttttctttctttccccaacttgtcttttcatgtcacagtcagtttttatccatggaggagggtatatagagaaaaggatctcatgtattgctctacttttttcttctagatacctgttaacttcttacgctttcatgatacatttatctagttctgttattcaagttaaagtattatacagttaagtctatggcagagtcagattcttttatgtgtctaactgttgcgaagtatagacttcttatatcttatatggtgaccattaacatataacgagcatgctagcatattgttgtctttgagagcaccgtatcaactttttgatctgtagaatgacagaagccacattcgatactctgcgactctggttaataatcctgctgtgtgctttgcggttggccatgatgcgtagtcacctgcaagcttatttaaatttagcccaaaaatgtgtggatcagatgaagaaagaagcggggcgaataagcacggttgagctacagaaaatggtaagttttataccctagtcaaaatgaaaaatagcaaaaaccgcactgtaaaaaaaaaaaaaaattggtttcctttagtagatagtatttcaacccatcatattcttattataaataaacagaacaatcttaagttgacagatatcaaagagaccttgatctgattttggtgcccagtgaggtcttaattcctcttcctgccttaagtgcttggtgtcatacagtgggtggtacaaagctgttttatgcctaatattgctaaatgggacccttctaattgatttgaaagacattataacatattgtccagactttaagacttaaagagtaggaaatactacttttagtggctaaatttattcattttaatattactcaatttacttgaacatgaaatgtaagtatttaatttatttgaggcttccagagaataaaaggacaaggaatccatctgccactatagtggaccaataacctgattctttttttaagagaggtggtttttggctaccttgctttattattattattgttattttattttttgtagagacagggtctctctgtgtagcccaggcttgtcttgaactcctgggctcaagtaatcctcctgcatcacctcccaaagtattgggattacaggcgtgagtcaccacgcccaaccagcttcagtttttgattcacctccatagttaggggcatttattaagatttaaacaacttttttctgttttaccttttatatatttttatattttccatagtttgacttcaaatatgttcatgtagaatggggacttaatgtttttatttatgagggatttatgctcatatgtggctctgcctactattgttatttagttggatattttaggtagatgcccttacattgtgttttatctttgaaatataagtaaatatataccatttgaatcttagtcattattttctccaatatatatacatcatttaagaattatttttaaggaatctattttaatattctcacgttctaaaaacttgtcttcaaattgagcctttccaaagtcattttggggacatgtatcatgcagcacaacttactgacatttagcttccttcttgtgaaaggattatctcttaagtattttggtatggcaattatatgaaagtttaattcactcctaacatgtcagttgcattagacacttaagaatgttgttggttgcaggtggctcgagtcttttattatctttgtgtcattgcactgcagtatgtggcgcctctggtaatgctgcttcacacaactctgcttttgaaaacactaggtaatcattcctggggtatttatccagaatctatctctaccttaccagtggataatagtctactgtccaattctgtttactctgaattaccatcagctgaagggaaaatgaaggtaactgttacacaaataacagtggcactgagcagcttaaaaaatatttttactcctcttctttttcgaggacttctgtcttttctgacctggtggattgctgcttgcctcttttctacaagcctttttgggcttttctatcaccagtatctgactgtggcatgaatctcagttaacaaaaaagcatatccaaatcaccctttaaattaaaatatctgtgcccttaaagggctgatgaaaaccagaagaaagcaaatacaatgggaaaaaaaaacatatcagaatgtcttgtattaaatgtttcctctgtattctcagggtgaattaatgtagtaatatttaaaattacaaaatagattgttaactgttacactgtggcattggaattttaactctttgtatttactggtatgagagggctatctacaagggtaatatttctgattaccctggtttacagaaacctccagcagtctttgaaacatctcacatgactctagttattgattgcttttaatggttttatggtactgttgatagtcatagtggctgcctatagaacaatcttcaaactgagccatgctttaggggagggaaaggggctaaagtctcttctgttggtaatttattagttactcttgaaacagtaaaatccaacagaaaggaagagatagctactgtatattacagtaaagaaagctgcatggttattttaaatttaatggagatgaatatggttaaaatatataactactgctgcttgagaatagcaagagtattgttttaaaacatattccacccaacttgagagttcttttaaaatgattggccatatgaacatttgtaatcttgccattaggtttggacctgccatattttgttttattctgtgatcctaactagttccttttaataggctaaaatatttatcaatactgatcagactttaaagaaattactttgtaaacctgctgactacctgtatgtattgtatatatattatatattaaatatataatatattgagattataaaagatgaaaatattgaatccttataatattttaagttgcagaatgtatgttaaaaagtgacttgaatgagatgtatttgtatctagaaattttatttctttttggaatgagattaaaatacattttgaaagttaaaaaaaaaaaaaaaaaaaaaaaaaaaaaaaaaaaaaaa

SEQ ID NO: 28623 - DNA, 5516 bp, Homo Sapiens
ggtctctcgctgcagtcagagctccaggtctggttcttctcctaaaggcccaggctgtgtggccccgtgtcctgcaggtattgggagatccacagctaagacaccgggacctcctggaagccaaaaatgtaatgtgttctcattttgcccaagacctttggccagagcagagcatgaaagattctttccaaaaagtggtactgagaagatatgaaaaatgtgaacatgacaatttacagttaaaaaaaggatgtataagtgtggatgagtgtaaggtgcacaaagaaggttataatgaacttaaccaatgtttgacaactaccccaagaaaaatatgtcaatgtgataaatatgtgaaagtccttcatcaatttccaaattcaaacggacaaaagagaggacatactgggaaaaaacctttcaaatatatagaatgcggcaaagcttttaagcagttctcaactcttactacacataagaaaattcatactggagggaaaccctacaaatgtgaagaatgtggcaaagcctttaaccactcttgtagccttactagacataagaaaattcatactggagagaaaccctacaaatgtgaagaatgtggcaaagcctttaagcactcctccactcttactacacataagagaaatcatactggagagaaaccctacaagtgtgataaatgtggcaaagcctttatgtcatcctcaacccttagtaaacatgagataattcatacggaaaagaaaccctacaaatgtgaagaatgtggcaaagccttcaaccggtcctcaacccttactacacataagataattcatactggagaaaaaccctacaaatgtgaagaatgtgacaaagcctttaagtactcctatacccttactacacataaaagaattcatactgaagacaaaccctacaaatgtgaagaatgtggcaaagcctttaagtactcctctacccttactacacataagagaattcatactggagagaaaccctacaaatgtgaagaatgtggcaaagccttcaagcggtcttcagaccttactacgcataagataattcatactggagagaaaccctacaaatgtgaagaatgtggcaaagcttttaagtactcctctaaccttactacacacaagaaaattcatactggagagagaccctacaaatgtgaagaatgtggcaaagccttcaaccagtcctcaatccttactacacataagagaattcatactggagagaaattctacaaatgtgaagaatgtggcaaagccttcaagcggtcctcacaccttactacacataagataattcatactggagagaaattctacaaatgtgaagaatgtgacaaagcttttaagcatttctctaaccttactacacataagaaaattcatactggaaaaaaaccctacagatgtgaagaatgtggcaaagcctttaagcactcctctaaacttactacacataagagatttcatactggagagaaaccctacagatgtgaatagtgtggtaaagcttttcacctatcctcacaccttactgcacataagataattcatactggagagaaaccgtgtgaatgtgatgaatggggaaaatcttttaaccagccctcaatttctaactatgagaattgatatgaaatataaaccctacaaatataaagaatgtgacagattttttaaggaacttctcaacctttattacacataattcatactggaaagaaaccctacaagtgtgaagaatggcaaagcatataacaagttctgtctttttttttttttttgagatggagtttcaactcttgtcacccaggctggtgtgcaatagcacaatctcggctcactgcaacctctgccttctgggttcaatccattctcctgcctcaacctcccaagtaagggggattacaggtgcccacccccatgcccagctaacttttgtatttttagtagagacaaggttacaccatgtttgtcaggctggtatccaacccctgacctcacatgatccacccacctcagcctcctaaagtgttgcaattacaggcatgagccaccatgcctggccacaagttcttactattaagagacatggtgataattcattctgaagaggaactctacaaacctgaaagatgtgacagtgcttttttcaacacttccatcctttctatacataaaaaatttatactagtgtgaaaccctagaaatatataaaatgtgaaacagcctttatatggttgccacatttgatagtaagataattcatactggcaaaattcctacaagcatgaagaatgtggcaaaacctttaatcaatgtgtacatcttattttgcaggaaagctattatccctgagaaaaattgtacaaatataaagaatatggaaaacccattaatgcctgctcacatcttactcaacataagaaggttcatagttaatgaaagcattaaaagtgcaattactgtcaaaaaatctttcagaaaatataagcctttaaagtgaagaagagtatttattctgaagacaaccattacaaatatacaggaggtttattacacacattttgtactagaggaaaatcctgaagcagttgctcaagctttgctcaacatcagagaacttatattggagaagagtcctgcaaatgtaatgaatttggaaacactttaaaaaaaaaactgcagcttagaaaacagcagagtttatactaaaatatatttttgcagatgcagtaaacatgaaaaaatattgaattcaaaattaattgtatgtaaatatcagaatttacagaataactaaggcactgacacttcagacattacattaaataagagtgttgagtatataaatgaattcacaactaaagttgttaaatttgtatataagtttgtgtaaattagtatataactttaaaaggagattttttgaagctttgtaattacattgaaagtatatttgtttccttgaaaacaatttttttgaaaagtgaataatgatgtaatacagctttcaaattatgctgttactttattatattcacgtgaaagtatgtgatcaattgttgctgcatcagagatattagagattctttattagttgggcattctttatgaccttttctataaaacagtaaggacattaaaatgtaagatgcatgacaaaaatataagtggagaggctcgttgtagttaacctatattaagtaatgtttaaggtaggtgttcagagtaatacttttctacattatactgagagaaagaaattataaattaaagtatatcaattattttactaattttactgttacgtaataaaatgcaatatatttaaaaattgttagattatgtgtgaacttaacttatattttatttacttaacttttcttttgagatggagtcttgctctgtcgcccaggctggagggcagcggtgcagtctcagcacaatgactgcaacctccacctcccaggttcaagaaattctcctgcctcggcctcccgagtggtggggactgcgggtgcgtgacaccacgcctggctaatttttatatttttaatagacatggggtttccccatgttggtcgggctggtctcgaactcctgagctcaagcgatccgcccacctcgggctctcaaggtgttgggattgtaggtgtgagccaatatgtccagcctaattttattttattttttgccatcttaaaactattgtgcatttaatgaagcattattacgccactaactttaacctatccggccttactcaaatggtgtaagcaaaagatggaagaagtatactatttggtatgtagtggaatgtcatcactagtaatcactttgccagtaaactgcaaatgaagaatattgttcccgttagttaaatttttaatcttttttcttaatttattattactatttgtgagtatatagtatgtgtatatatgtcttatagagaatattttgattcaggcatacaatatgtagtaattacattagggtaaataaggtatctatcacctctagcatttatcctttctattccaaacagtgtaattatacacttttagttacttttaaatgtccaattaaattgtaattgactacagggtgatttttatggtcataataaaaattatacagaaatataaatagaatatgggctggacgcagtggctcatgcctgtaatcccagcactttggtaggtgacgtcgggcggatcatgaggtcaggagttcgagaccggcctgaccaacattgtgaaactctctactaaaacaacaaagattggttgggcatggtggtgcacccgtgttcctagctgctcgggaggccgaggcgggggaatggcttgaacctgggaggtggaggtttcagtgagctgagatagcaccgctgcactccagcctgggtgacagagggacactccatctcaaaaagaaagaaaaaagccagggacagtggctcacacctgtaatcccagcactttgggaggcccaggcaggtggatcatgaggtcgggagatcaagaccatcctggctaacacgttgaaaccctgtctctactaaaaataaattagctgggcgtggtggtgggcgcctgtagtcccagctactccagaggctgaggcgggagaatggtgtaacccaggaggcagaggttgcagtgagccgagatcgtgccactgcactccagcctgggcaacagagcaagactctgtcacaaaaaaaaaaaagaaaaaatacggccatgtgcagtgcctcatgcctattatcccagcaatttcggaggctgaggcaggtgtgttgcctgagctcaggagttcaagaccagcctcgccaatgtggtgaaaccctgtctctactaaaaatagaaaaattagccagtcatggtggtgcacacctggaggctgaggtaggggaatcacttgaacttgggaggtggagattgcagtgagccaagattgcgctgctgcactccagcctgggtgacagagtgatgagactcctcaaaagaaaaaaaattacgtttctgagtcctgaaaaattattaataaatatttgttatatagtttctttgaacatgtggtcactctgcctgcaaacgtaaagacttttaattttcatagagtgaaatatacacatattcctctgaagataaaccttaggtgtaagaaaattatgaagtgagtgtttggtaaatatgcatttgtacatattttcagaagaaaacacaattattggaacaaaataagtttttaggtgattaatggaaaactaaacaccttgaatatgctgaaagcaaatgtatactttctgctttgtatggaatttattaatataaaattttatggcttatggctcggattctccccagaatccgtgtattaaagcacaggcaactttgtctccagaaataacactcttgagtacaacaataaaagccctcttcaaacacactcaaaaaaaaaataaaaaaaaaacctaaa

SEQ ID NO: 28624 - DNA, 4126 bp, Homo Sapiens
catttcactagtgattgaattctacttttgccatctgaattgacttgaatgtcttaaaacaggtaaatactgtaaagtgtgtattcttgatgtttattggctcatgtggacagaaatgtacagggagaattacattattttaacacacagaagtgcaactttctgctttattttctgaatttcacattacttttacttaatgcttttgtgttttgttaatacttcataatatgtgaaaaactcggatcttttaaaaagcatcatagatcatttttccatatgacactggttccgattttaaaaattatttttaaataaccgattattgattactgtattttttttctcaagaacagtgataggtagaaactaattgaacatttggtagtctttcaagaatagtgtctcttcaaggttttacttgatttaatttgatattttactggtttaccagtaaggtgtattgttcagttttttgctccgatttgaattgtggaggtggaagcaaattagtttacatggcatgtcctccctaggcacagtgacagctgtaaagtatgacggaacaaggtagcagatggtacagaatttatactatttaagaagagatgtggtgttcttcattgagtttttttcttcactattttcagaagtttttgttcttttttttttttccatcactcagtggagaaaagctttgttaatgaaagattttgtgatagagctgatgcttatacatctattctataacagtgatgaatattaacacaaaggaaatatggagaactgttataactgagtgttagaacagtcgtgtacattgatcagtattgagtccatttttaggatggattagtcagttcttttcattggtcttgaaagtaattttggctggtcgcggtggctcacgcctgtaatcccagcactttgggaggccgaggcgggcggatcacgaggtcaggagatcgagaccatcccggctaaaacggtgaaaccccgtctctactaaaaatacaaaaaattagccgggcgtagtggcgggcgcctgtagtcccagctacttgggaggctgaggcaggagaatggcgtgaacccgggaggcggagcttgcagtgagccgagatcccgccactgcactccagcctgggcgacagagcgagactccgtctcaaaaaaaaaaaaaaaaaaaaaaaaaaagaaagtaattttaaactcactggcttgaaatgtgtgctttctgtacaatgaagttattgctttccatatatccttgaatcttcagattaacgaaatgaacaaattttcggttatagatcagctctcaaacactaaagtccttaatggcaaggtcttttctgatagcttcatggatagtattgatgatcagatttcttctgtgttattgtcttaaaaataagcatttgaaccttaatttaaattcttttcttttccatttagagatatgtttttttctttaccttcatacctttctatttcttgctaatttctatcactaattccttataattgtccctgctccccttcttgatctcttcagggggaatactaggcagttttgtatcttctgatctcgtaccctgagacttcatctgaatgtgctctgccgccttcttatctgaactagatgaattggccatgattatgaataggaatattaatgaaccagaggacatactagtcacatgttattatacactaaaaaataggaagtcatcttgaaaggcagttaatgtactgcaaatgtccctatgacttctttgctttctcttataccaaacatgcaggtatttaatttgtttaatgagggttgagtggagttatgtgtcgcttttattcggattgacgaaaatcaaccataattttcaagggatcttcatgggttgtgactggaagctgaccttagtcttgcgtctcatcctttatgatgttgagaaatcatctaatttctcagaactttttcttatctctaacacagttattaccataataatattgtctccatttatcatacaggatcattatgaaagtaaaatgaagtagtatatatgaaaatgctttttaaacacaaaagctttatacaaaatattgttgaatttaaataaggtaaatcttttttagtttatatatttgcagactatacatgttggattaaatgggcaattaagttttataggaatttgcttcctaagtctacttttgaagaggaaaacaggaacgtaccatatattttgctaagggtaaaatatttttggtgaattgcagacatttaatttcacttgtctgaggtaaaacaataaactaaaatacatgggcatgcatcttacactgatcttattagaggtcagtgctaagtacccatcttgattgaagttagctcagatgtggagattcatagaatgagggtccaggagaagaaagttaggggaaatctcattttctttctgtaattcattcagtggtgccagagctgggggttccctacaatggctatttagactttccctgcttcaaaataagagcagtatccttagctctagccaagcatttttctaattcctgcctttggtcacaaagaaggaaaagcagagctgtgaataagttagtggaggtcagtcacatcagagttcatgacctagtgattgctggtgaagtaatattggaattttggtaccatgagaagacttataaaggatttcatcagaagttttcattttttctaaatcctcccctacaaaattttcagattggaaattactcttgtatttgtagaagattgtctctaaaattgtggtttaactcacgcaggaagtaaaattcctatagcaagacatagtttcattttagaggacccccaaaatcccgtgaattctctggtgatgattctagcctaaccttcaacataaaataatgaagagaacttttaaacttttttatgaattcctaaacattaccatttatgtggcagaagttctgttccctataatctgcaatgctgaagtatctctattcaattcccttccttatctgttaaatttaatgtctttatactaaaaatataggctcttgggattggagaggaaaaattagaggtgattttcagatttcttgttctatggaagaggaagctgagctcagggagatatgagctccacagccacagctggttaggggcggctgccagtagaacagggcagatgcctggactcccaactcagtaggccttctgttacacctcaaaatgtgttacatgggaagaaaaagattaagaaaaagcaagataattttggagaaggacgagaggaagaggcatgaacttgtcctaacaatgtcaaagaatattttaaaggtataccagttaaagtagtgtgtggctggtgccagtagaggtcagtcaagggatccctgacgagaataaagagcccagaaacaggtccatgtttatatgggaacttgatttttgacagatatggcaagctctatggggaaaacaatatgtactaccttatacccttccccaaaaacaaagggattaaagacctaaatatgaagacaaaacttttaaatgagaatctataaggttattttcatgattttgcaaatgggaaggatttctttaaagcaagacacaaaagcatacacaggaaaaaatgatgcataaaaacatggcttctgtagaacaatagagactgtaaaagaacaagctacagacaaggaaatgtttgcaatgcatggaactgtcaaaggattcgtatctggaatacattaaagaagcaaaagaacctcatacaaaagtcattgagtaaatgacagccatgcattagaacagcaattctcaaaacttttggtctcaagatccctttacactcttcaaaagtgagaaccccaaagagttttcatgtatgtgggttaaatctattgatattttctgttagaatttaaaaattatgttaaaaaaataagaagaatgactatttttcaaaacaaaaaatgagaagagtggtattgttttacatttttacaaatctctttaacatttagcttaataaaagatagctggcctctcaaaaaaaaaaaaaaaaaaaaaaaaaaaaaaaaaaaaaaaaaa

SEQ ID NO: 28625 - DNA, 2996 bp, Homo Sapiens
tcttcaggaacagaacgaacaggtggtagactcggaaaagtgaagggtccaacattccgaatatcaggagtacaggtgaatgccaaactagtcatctcccatgaagaagaattaatacctttgcacaaatccattccttctgatccagaagaaagaaagcagtgagtgatttattttctccattgtaagatttttgttattcaataattgcaaaatgaatgtgctgaatttttatggtgttattggctagttttgaaaaaaaaaaggaagaaataaagcatattattttgaagttctaatgactcacgtttttcaaaattaatttttcagttaaggcaattacaaacttatcattagttattaactttgatgccaggtatactatcccatgccacacaaaggcagctcattttgatatagactggggcaaagaagatgattccaatttgttaattggcatctatgaatatggatatggaagctgggaaatgattaaaatggatcctgacctcagtctaacacacaagattcttccagatgatcccgataaaaaaccacaagcaaaacagttgcagacccgtgcagactacctcatcaaattacttagtagagatcttgcaaaaaaagaagctctttctggtgcgggaagttcaaagaggagaaaagcaagagctaagaagaataaagcaatgaagtctataaaagtgaaagaggaaataaagagtgattcttctcctctgccttcagagaagtctgatgaagatgatgataaattgagtgaatccaagtctgatggtagggaaagatccaagaaatcttcagtgtcagatgctccagttcatatcacggcaagtggtgaaccagttcccatttctgaagaatctgaagagctggatcagaagacattcagcatttgtaaagaaagaatgaggcctgttaaagcagctttgaaacaacttgataggcctgagaaaggcctttcagaaagagaacaactagaacatactagacaatgtttaataaaaattggagaccatatcacagaatgtctaaaagagtatacaaatcctgaacaaattaagcaatggagaaaaaacctgtggatttttgtatctaagtttactgaatttgatgcaagaaaattacataaattatataagcatgctattaaaaaacggcaggagtctcagcaaaacagtgatcaaaacagcaacttgaatcctcacgtgattagaaatccagatgtggaaagattaaaagagaatacaaatcacgatgatagcagcagggacagttattcctctgatagacacttaactcagtaccatgatcatcataaagaccgacatcagggagattcttacaaaaaaagtgattccaggaaaagaccctattcttcttttagtaatggtaaagaccatcgtgattgggatcactacaagcaagacagcagatattacagtgacagagagaaacacagaaaactggatgatcacaggagtagagatcacaggtcaaatttggaaggaagtttaaaagatagatctcattctgatcatcgttctcactcagatcatcggttacattcagaccaccggtcaagttctgaatatacgcaccataaatcttccagggattataggtatcactcagactggcaaatggaccacagagcttccagcagtggccctaggtcaccactagatcagagatcttatggctccagatctccatttgaacattcagttgaacacaaaagtacaccggagcatacctggagtagtcggaaaacataacaaaaactgatacttcgtctttctggacttttcttttagccatatatcataaaccaacacagtaattgccttacatgacttgaaagatataaacagatcttctatcagtagcagtattgctacttctttccaggatgcaaggtctattatcccaacagaagagaaaatatttttatatttaaggattatgctgcactgtactacaaaattgtagtacttttttttgttttcttttttaaagaaatggaaaatgtttactattacagggacctcaacactgccctcccatacaggctggataaaactgtttttaagtcagtgattttagactgacctccatttaaattatgtttatatatgaactttactctgacctgtgatcatgtttcaggaaggaatgaaagagagttctttcttaataaagaaaaacactcaaggactttgttcatttccaaagctacttgtttacattgtacactgcgaccaccttgccgcttttcatcacaagcttgaatatttaaattctgtacttatatctgtaaaatagccaggaatttcctgtttgtgatctattatgcctttttacaaaaaaaatggctgtaaattattgtaaatattaaaggaactttccttacttccttccctttctcaggctttttttgactgttcctttccctaccaactcaggccttcttattaaaaaaaaaaaaatcagtgtaataacactttttaatgatttgtcttgatggaatcattgtttagaatgtaaaaatggggaaaggggccacttaattccattagtcctctttttatactgaatattttattagatacatgttattcccttttttttccttttttagtcaatattgtgtttgtagttttaaaaaatggcgagatatgtaaaatctaaactgcatgctctggaaacacttttttcagatgcatctggtttaaaagggtaggtgtataaacacttttcagaatccaaaacggccaaaagttattgtaaatccgtttgttttcccgttttatgtgggcaataatgtcaaatgtgctatgcagccaggttaacattttagataaacttgattgacttttaatataaactgttacaatgcacactgattgtatataaaaacgttatatatgacaaattaaatttaagaaaaaggaaaaaaaaaaaaaaaaaaaaaaaaa

SEQ ID NO: 28626 - DNA, 3790 bp, Homo Sapiens
gagggtccgccagctcggggccagcgcatggggctgctgagaccgctccggacgtgcgaagcgttcgcggtgcggtggagaagaccaagctttcttcctccgaggagttccctcagactctgagccttcccagaacaacaactatttgctcaggacatgatgctgataccgaagatgatccatccctagcagatttgccccaggcactggacctcagccagcagcctcacagctcaggtctctcttgcctgtcacagtggaagtccgtgctgagcccaggttccgcagctcagccttccagctgcagcatctctgcttcctccacaggcagcagtctccagggtcaccaggagagggcggagcctcgtggtggttctctggccaaggtctcctcctccctggagccggtcgtcccccaggaaccttcctctgtggtggggctaggacctcggccccagtggtcaccacagcctgtgttctctgggggtgatgcttctgggctaggcaggagacgcctctccttccaggctgagtactgggcctgtgtgctgccagattccctgcctccatcacccgaccgccactcccctctctggaacccaaataaagagtatgaagatcttcttgactatacttacccactgaggcccgggcctcagctcccaaagcaccttgatagccgtgtgccagctgaccctgtcctgcaggactccggggtagacctggatagcttctctgtctctccagcaagcaccctcaaatcacctactaatgtctcccccaactgcccaccagcagaggccactgccctgccattttctgggcccagagagccaagccttaagcagtggccctccagagtaccccagaaacagggtggcatgggcttggcatcttggagccaacttgcatctacccccagagccccaggcagtagggatgctcgttgggagcgcagagagccagccctgaggggtgcgaaggaccggctgactataggcaagcaccttgatatgggctctccccagctaaggacacgggacagagggtggccctcgcccaggccagagagggagaagaggaccagccagagtgcccggcgccctacctgcacagagtctaggtggaaatcagaagaggaagtggaaagtgatgacgagtatcttgccctccccgctcggctgacacaggtttctagcctggtttcgtatctaggatccatttctaccttggttaccctgcccactggggatatcaaagggcagagccccttggaagtgtcagacagtgatgggccagcttccttcccttcaagctccagccaaagccagcttccccctggagctgccctccaaggatctggggatcctgagggccagaatccctgtttcctgcgctccttcgtccgtgcccacgactccgcaggggaaggcagtctggggagcagccaggccctcggggtctcctctggactgctgaaaacacgcccctccttgccagctaggttggaccggtggccattctcagacccagatgttgaagggcagcttcccaggaaaggaggagaacagggaaaagaatcactggtgcaatgtgtgaaggtaatgacactcaacgttaggaagctttgtgtacaggtgtcttgtctcttcccccaatccactaacatcataataaaacatgttcatgttgaccaggcactttttatgtgccaggcattgtgctgtaccttatcttattcagtcctcacaacttttaccaggtaagcactgttctcattttactttttggaggaaagagcagagagaggttaggtaacgtgcccacttataattagcaagggcttgagccaagaatgagacccaggtagactatttgcagaggctgagctcttagccactacccttggctgcttcctaactcagaggtattctgaacaaaaaaggttttgtgcacagatgcctttaggaaacactgggctaaacaaaggtaagtggctttcttgactgcaggacttctagagcttcatttgccacagtggtttaagtgcaaagttaggggcattggatgtactgttgcctagactttgtggccaccggaccatcttgtgaaccaaatgacttaatatctggaggtataaagaacactgcgtggaatagggttatcggtgtcaggcatctgaatttgaaacatggcactgctgtctttggaatgttggctcagcctcttgagtttgctcattgtaaaatgtggagccctgccttcttaggatgttgtgtgcattaaataattcatgttgagggcttcggtgcattcccagacatgttgaaggttcaggaatgtgcctgtccaggaacgtgtcctagcgcttgcggggggctttcaccttcccaggaggtgacgtggttattttgtcttgtgaggtaggtaggacacgttatcatggacccctctttactgataaaagattgagatgccatgaggtaaagctgttcttcgctatagcttcaggttagtcatgattttagtcatttattttacgttcacttttccagagaaacatggacgtatctggctccaagatgctgattctagttagtaatggtgctgatccaagaattggtttccatggcaggcacgcctcttctgggctgctccattcctacctgcaaggctgggttttctcagcctgtcatttttgatgtcacaccaggctgtggttttcattgctttggcagagggaggtacagagtcgtggagtcgggacaggtgagcaaggaggagagaggaaactgaagacattttgctgtcagctggaagagctgatctgctggctgtataatgttgcagatgttactgaccacgggactgcagccaggtccaatcttacaagtctcaagtcttctctgcagctttaccgggtaatatgcggtcctggctctggcttgttccctcacaagagtgtggctaaattactcgattacaaagtaaaatctcaaataaccaatgtctggtatgttatagctcagttgactattatacctgaaatctaattagagcttcacattcttaaagcggaacgctttgtaaaatgcatgaattatttcccaggccaaatggagcttgaagatacaatatatttatctcaaatcaaaaatactttaggttttgggctggcaggtgcagtgggacaagtcttttatcccagctactctggaagctgagacaggaagattgcttgagcccaggagttcgagtacagcctgagcaacatagcaagaccccccccccctcaaaaaaaagttttttcttaattaaaaacaaaaatactttagggtgatttgcaatataattttccaaatgtctcagggattataaatacagacttgcactattatgacgcctctagttatgtatggctattgaagtaaaattaaagactcagatttttttatttgcactagccacattctgcatgttcaaccatcacatttgtctagtggctaccacgtagaacagtgcagatgtagaacacttccatcaccacataaagtcctattggactgcaccactatttaaagatctgagctgaaattgtactgactccagaatctacaatagggcattttgatggtatttaaatagaaatctaggccaggcaccttggctcacactattaatcccagcactttgggatgctgaggctggaggatcgcttgagcccgggagttccagaccagcctgggcaatatagtgagacctcgtctctacaaaaaaaaaaaaaaaaaaa

SEQ ID NO: 28627 - DNA, 6389 bp, Homo Sapiens
aagcagtggtatcaacgcagagtggcattatggccgggcaactaggggctcacttaatcctgaaaatcctgttcaagtaagcataaaccaattaactgcagcaatttatgatcttctcagactccatgcaaattctggtaggagtcctacagactgtgcccaaagtagcaagagtgtcaaggaagcatggactacaacagagcagctccagtttactatttttgctgctcatggaatttcaagtaattgggtatcaaattatgaaaaatactacttgatatgttcactgtctcacaatggaaaggatctttttaaacctattcaatcaaagaaggttggcacttacaagaatttcttctatcttattaaatgggatgaactaatcatttttcctatccagatatcacaattgccattagaatcagttcttcaccttactctttttggaattttaaatcagagcagtggaagttcccctgattctaataagcagagaaagggaccagaagctttgggcaaagtttctttacctctttttgactttaaacggtttttaacatgtggaactaaacttctatatctttggacttcatcacatacaaattctgttcctggaacagttaccaaaaaaggatatgtcatggaaagaatagtgctacaggttgattttccttctcctgcatttgatattatttatacaactcctcaagttgacagaagcattatacagcaacataacttagaaacactagagaatgatataaaagggaaacttcttgatattcttcataaagactcatcacttggactttctaaagaagataaagcttttttatgggagaaacgttattattgcttcaaacacccaaattgtcttcctaaaatattagcaagcgccccaaactggaaatgggttaatcttgccaaaacttactcattgcttcaccagtggcctgcattgtacccactaattgcattggaacttcttgattcaaaatttgctgatcaggaagtaagatccctagctgtgacctggattgaggccattagtgatgatgagctaacagatcttcttccacagtttgtacaagctttgaaatatgaaatttacttgaatagttcattagtgcaattccttttgtccagggcattgggaaatatccagatagcacacaatttatattggcttctcaaagatgccctgcatgatgtacagtttagtacccgatacgaacatgttttgggtgctctcctgtcagtaggaggaaaacgacttagagaagaacttctaaaacagacgaaacttgtacagcttttaggaggagtagcagaaaaagtaaggcaggctagtggatcagccagacaggttgttctccaaagaagtatggaacgagtacagtccttttttcagaaaaataaatgccgtctccctctcaagccaagtctagtggcaaaagaattaaatattaagtcgtgttccttcttcagttctaatgctgtccccctaaaagtcacaatggtgaatgctgaccctatgggagaagaaattaatgtcatgtttaaggttggtgaagatcttcggcaagatatgttagctttacagatgataaagattatggataagatctggcttaaagaaggactagatctgaggatggtaattttcaaatgtctctcaactggcagagatcgaggcatggtggagctggttcctgcttccgataccctcaggaaaatccaaatggaatatggtgtgacaggatcctttaaagataaaccacttgcagagtggctaaggaaatacaatccctctgaagaagaatatgaaaaggcttcagagaactttatctattcctgtgctggatgctgtgtagccacctatgttttaggcatctgtgatcgacacaatgacaatataatgcttcgaagcacgggacacatgtttcacattgactttggaaagtttttgggacatgcacagatgtttggcagcttcaaaagggatcgggctccttttgtgctgacctctgatatggcatatgtcattaatgggggtgaaaagcccaccattcgttttcagttgtttgtggacctctgctgtcaggcctacaacttgataagaaagcagacaaacctttttcttaacctcctttcactgatgattccttcagggttaccagaacttacaagtattcaagatttgaaatacgttagagatgcacttcaaccccaaactacagacgcagaagctacaattttctttactaggcttattgaatcaagtttgggaagcattgccacaaagtttaacttcttcattcacaaccttgctcagcttcgtttttctggtcttccttctaatgatgagcccatcctttcattttcacctaaaacatactcctttagacaagatggtcgaatcaaggaagtctctgtttttacatatcataagaaatacaacccagataaacattatatttatgtagtccgaattttgagggaaggacagattgaaccatcatttgtcttccgaacatttgacgaatttcaggaacttcacaataagctcagtattatttttccactttggaagttaccaggctttcctaataggatggttctaggaagaacacacataaaagatgtagcagccaaaaggaaaattgagttaaacagttacttacagagtttgatgaatgcttcaacggatgtagcagagtgtgatcttgtttgtactttcttccaccctttacttcgtgatgagaaagctgaagggatagctaggtctgcagatgcaggttccttcagtcctactccaggccaaataggaggagctgtgaaattatccatctcttaccgaaatggtactcttttcatcatggtgatgcatatcaaagatcttgttactgaagatggagctgacccaaatccatatgtcaaaacatacctacttccagataaccacaaaacatccaaacgtaaaaccaaaatttcacgaaaaacgaggaatccgacattcaatgaaatgcttgtatacagtggatatagcaaagaaaccctaagacagcgagaacttcaactaagtgtactcagtgcagaatctctgcgggagaattttttcttgggtggagtaaccctgcctttgaaagatttcaacttgagcaaagagacggttaaatggtatcagctgactgcggcaacatacttgtaaactagtgaatgtctgagctttggaagcatgaacagttataaacgtgcatgcatacatgcacacacacacagacacacacacacacttgttaattttgtatagtatttttatacttggacagaacttataaagttaaatatacttgctgcatttcaacacatctgttggaccaacagtcacataactaacctttttgaatttttggaagccattgctgttttaaagtcattatgtagaatgctacaaaccctaaacttaatatatactaattcctgaaaaagactttgagacagtactatgtcagttcagccacctattttgcattgttttctataaggaggcaaagcatatgtgttttcctgttatgcaccttttatagcctttaccactgtgtaatgttcacaaacaccaaagtaaaggaaaaatgcaggatgttaccgtaaaatccagctgctattcatggagctgaaaaacaaagcacaaataatagatagctaagttaagaactactaagtagtttatagaagtagggaaaaacgtaatactgctttttattcatgtctttaaagcctttttcagaataagtgccaatcactgatgttgtaaataatggtgccttaactttatatgcttccctggcacttcgtttctgatttttttcctgatttgataaataattagtacatagttttcactcacttgcagcttactaaagacaagaaattatgtacatgtactaatgtttttcccacaaaaaaatcctttacttctgatgtatgaattagttatctaaatagttaagcctaatacctgaataagactcaccaatgtgattgtacaataaattctatcattccattaaaatcctacatttattcccaggaatggtaatttcacctccctacatctatactccactccctcagtaaataagtgaaaattgttaacccatgtgcccattcctgagtagggcagactcttcacaagaggcccatgacaagaattctagggtccagattgaactttaatataggcctttgtctgtgtagaccagtttgtcttgtaaactgtcttacttatgtgtgtaaacattttacattcacatgaaaagttattttcctttatataattggattcagaatcataagggacaggactgaaattattctacagtaaccagtaagaataagattcggccgggcacggtggctcctgcctgtaatcccaacactttgggaggccaaggtgggcggatcacctgaggtcaggagtttgagaccagcctggccaacatggtgaaaccccgtctctacacaaaaattagccaggcgtggtagcgggcatctgtaatcccagctacttggggggctgaggcaggagaatcgcttgaacccaggaggcggaggttgcagtgagccgagatcacgccactgcactcccgcctgggtgacaagagcaaaactccatcttaaaaaaaaagaaaaaaagagtaagattcatttttattagttactcaacttcagacacaattttgttaatttggatatatacatatatataataagaactcatggttagaatagaaatacagatactttaaaaatggtaatagaaattgtaccaatcaggttgctgtgagaaaactgacaaaatatgcaataaagaataccaagagagaaaggacaatcgccaattcagtttcccagaacagaatttttatgaactgcacaaatgtttaatgtaaatggtgatacctacagggaagaaatagaagagttgataatatatcactgggacggggtgggggaaagacttgaaatttttggtgcctaacactaatggtccatatgtagttaaacccatgagtatggtatatgaatgtcttttttaaatgttaaaatgtgttgtctatttaataagttaattaaaatgcagatcaaagcaccaccatttgctttttccacagatcattaacatttccttaaagtatgtaagtacctttgcaaatgcaaatgtactagtaattttcacttaagcttttgagaccgaattccattccaccagttatcacttagccactgtaatttaaaaacaaacaaacaaacaaaaactgtcttggtagaggtcgttaattagactcaacatgtactgcctttttgcagtctattatgacagtgtcttttagcacaaataatagagctaaaaaatgtcctgtcacttccattataagaaatctggattcatatctaagtgtatattataatactgtacagttaagagttcagaacaagtggtaatgttttctcttaatttaactcactttgtgccttctttactcattcaaacacacatacattttacatatagtttatttctttatgaaatgctaatcttcagcccgtaccaaaaagtggagtggagcctctttgcactactactatcaataaattttaaatcagttggatttttaagcattttttaaaagctgacattaaagtaaatctaaaaaaagtttaacaaactggccaagacactaatttttatgtataatcacaatattttatactcacctttattgactaaaaataattatgctacatgttgtcctgcatcagaagaattatttcttcttgccagtgttttgggatttgaagataatggttcactcaaagaacctattattttctctactgaggaacccaatgtagaacttgcactgatatttttattactgcctttatatgaatctataggtatctaaatgttaaggcatgtatgatctttgatcatttcttttttcaaattaaagttgtataaaagtttcaatatcttgccttaaattagttgcctattctttctaggattcaaatattgtgacatttaaaaaagaaaacattcacttttgaaacttagacttcagatcaaaaaggactgaacccccactatcataatccatacattcatttccatgttgtttgactagcagtgcatatatgaatgaatatggtaattaatcttacctataagaaccaaatactttaattatattaagatagtgaataaagatgtataatatttttattaataccttgaatatattcagtggattgaatgtgacttcataactgtactacgattgtattaaaatatttctggaataaaaaaaaaaaaaaaaaaa

SEQ ID NO: 28628 - DNA, 4113 bp, Homo Sapiens
gggtactccttcctggaccgcgctggaagccctggcggcggcggcccatggggcccttggcgctgcccgcctggctgcagcccaggtataggaagaatgcgtatcttttcatctattacttaatccagttctgtggccactcttggatatttacaaatatgacagtcagattcttttcatttggaaatgattcaatggttgacactttttatgctattggacttgtgatgcgactttgccaatccgtatctctcctggaactgctgcacatatatgttggcattgagtcaaaccatcttctcccaaggtttttgcagctcacagaaagaataatcatcctttttgtggtgatcaccagtcaagaggaagtccaagagaaatatgtggtgtgtgttttattcgtcttttggaatctattggatatggttaggtacacttatagcatgttatcagtcataggaatatcctatgctgtcttgacatggctcagtcaaacactatggatgccaatttatcctttgtgtgttcttgctgaagcatttgccatctatcaatcgctgccttattttgaatcatttggcacttattccaccaagctgccctttgacttatccatctatttcccatatgtgctgaaaatatatctcatgatgctctttataggtatgtattttacctacagtcatctatactcagaaagaagagacatcctcggaatctttcccattaaaaaaaagaagatgtgaagtacagcattccagtgtgacacgagaaaagacaggctgtggattcagtgcagtaaataaaacacaggaagtattctggtggaaaaataccttgtatttgacaaaaatccattacatgaaataactgcacatacccccaaaactctagacataacaggctatgtttttcacacattgtatttttaagacatatatattctccataccctgcttcaccaaaattcctgcttcatttggattttatacaagttatacttacattgtatgaagtctgattattttcctgtaagtttaatgagaaataggagattagctgcaatagattcaattaaattaagaaaccaaacttgataacctaaattacatgtattctttttcacttccaagttcccaaatagatctgtaggagaagagggatggaaaatatattccacatttgcctagaataacatatttcatagacagatgtctgtcttcagatctaataatactcaccctaaacattagatatgtttagaaaattaaatatctttccaagccctatgtcttagctcaggttgctataatagaacaccataaaccgaatggcttaaacaacagcaaacgcttctcacagttctggaggctgggaattccgctcaggatcaaggcatcagctaatgcagtttctggtgagggccctcttcccagtttgcagatagatgtccttctttgtccccacatgagagagagatcaactctcttatgtctcttataatggcactaaccccattcatgagggctctaccctcatgatctaattacctcccaatggccccacctccaaataccatcatattggaggttagggcttaacacatgaattttgggggaacacaaagattcactccatagcattctgtacctggtcctacaaaattcatgtcctcctcacatgcaaaatacatacattccatctcgacagcctcaaaagtcttaactcattcctgcatcaactctaaagtccaaagtctcatctaaatcagatgtgggtgagattcaaggtagaattcatcctgaggtaaaattcctttccagctttgaacttgtgaaatgaaacaagttatgtgcttccacagtacaatggtgggacacacaaagggtggacattcctattcccaaagcaagaaacaggaaaaaaggaaggtgtaatgggtccccagcaagtgcaaaacctagcaaggcaaacaccatgagatcttcagtcttagtaataatcctctttggcctgatactctggcttcaggacccaatgaggcagaggtattgcccccaggactatgttggaggaggatgacccccatatcaccaggcggaagctgtcaggcctgttgaaaccaaggcaatgactgccccttttgaaactgagaaggtaccactgatgttctctgaatcattgttccgggtcagtttctccttttcttgaagaatagtgtacattcacagctgaatagctctatggtcccaaattcaagaagtccaacagtcttccctcattctgtcccatctccattcctttcaatacaaactagcagtgttcctgctggggtggctgattaggtctgtggttcacacccacataaatctaattggatgactggtctgctacactcttagtgttctctaccaaacgtgttttcttatctttttgtaatgcagacagactgataatttcccacatcttttaagttgtggttccgtttttgttaagaattctgtcttcattttttgtcacattttactttaagcagtcaaggtaaaccgaggcactccttcaacactggttggagatctcttcagttcaatatctaatttcatggctcacaattttactttccacaaaacactagaacatgaacacaatcatccaagttctttggcatattataacaaagatcacctttcttccagtttcccataacaggttcctcattttcatttgagacttcatcagaatggcctttattgtccatgtctaccaacattatcttcatggtgatttacgtgttctctatgaagatggaggctttctctcccaccctcttctctttgagccctcaccaaaatcacctctatcaatcccttcatggcaatactggctttttctagcaaaaaaactagtacctcaaaactcttccagtactcttccaggtactctagtacctcaaaactcttccagcttctatctgttacctaacgtcaaagctgcttccacatctttatatattcgttatagcatcaccacacttcttggtactaattgctgtcttagcttggctgctataacaaaataccataaactgggtggcttagacaacaaatatatttctcacagttctggaggcagggaagtccaagataaaggtgctagacaattaagttcctgatgaggttccaaggtgctagctgattcttcttcatggtttgcagatgaatgccttcttgctatatgttcacatggtggagggagaaaccatctctcccttatttcttattgtaaaggtactaatcccatttatgaaggttccagcttcaaatgccatcacactggagattagattttcaacatgtgaatttaatgggggacaccagcattcagtccctagtgctctgatagagtattcattaatgtcatgtatttgttaacatcttgtaagttatttgggctttgatgccttaaaagaagaccctgacctcatgatccacccgcctcggcctcccaaagtgctgggattacaggtgtgagccactgggcccagcccacctctgtagttctttggaataattttatgattaatttgattagaaactcagttctttggaataattttatgattaatttgattagaaactcagttttttttttttctttaatttttgagacagcctgggtgacagagtgagactctatctcaaaagagaagaccctaatgaaaatagtaaacctttagcaaatacacaaatgatgccccattctgtattctttttaattttaaaaataatgacacacacatacaggaagataaaaggtataaaaatatactaagtactttttaaaaaggaaaattcatgttttggattattactgaattgttgctaattactgtaatgtaagtcatatgtccttacatagttttgaaaaatgctttctttaaaaatctaaaaaaagtgtgaataactggtagtcattgctgtatcattgatgtatcactcaatttttggtaaagaattataaagatcttacctagaaactatgtaaaaaggtattaaatatattgtgatgtaagaataggataataaaaatgtaattttaaaaaaaaaaaaaaaa

SEQ ID NO: 28629 - DNA, 4319 bp, Homo Sapiens
atcagaaaaggcaaccagtttacaggcaaaagcagaaaaatcaccaaagtcacctaattcagtgaaagcagaaaaagcatccagttatcagatgaagtcagaaaaagtaccaagttcaccagcagaagcagaaaagggacccagtttactgttggaagacatgagacagaagacagaattacaacagattggaaaaaaaattccaagctcctttacttctgtggacaaagtgaatattgaagctgtagggggagaaaaatgtgctctgcaaaactcaccacgatctcagaagcaacagacatgtacagataatactggtgattctgatgatagtgcttcaggaattgaagacgtatcggacgatttaagtaaaatgaagaatgatgaatctaataaagaaaattcttcagagatggactacttagaaaatgccactgtgatagatgaatctgcattgacacctgagcagaggctggggttgaaacaagcagaagaacgcttagaaagagatcacatctttcgacttgaaaaacgatcaccagaatataccaattgtcggtatctatgcaaactttgcttaattcacattgaaaatatccagggggctcataaacatataaaggagaaacgacataagaaaaatattttggaaaaacaagaagaaagtgagcttcgttctctgccacctccttcccctgcccacttggctgctttaagtgttgcagtcattgaattagcaaaagaacatggaataacagatgatgacctcagagtccgtcaggaaattgtggaggaaatgtcaaaggttataacgacatttttaccagaatgttcacttaggttgtatggctcatctctgactagatttgctctgaaaagtagtgatgttaatatagatataaaatttcctcccaagatgagtcatccagatcttctgataaaagtacttgggattttaaagaaaaatgtattatatgtagatgtggaatctgattttcacgctaaagttcctgttgtggtgtgcagagatcgaaaaagtggtttactttgtagagtgagtgcaggaaacgatatggcatgtctcactactgatttacttactgcccttggcaaaatagaacctgtctttattcccttggtgttagcctttcgctactgggctaagttgtgctatattgactcccaaactgatggtggaatcccttcttactgttttgctttaatggtgatgttttttctacaacagagaaaaccccctcttcttccttgcttacttggaagttggattgaaggctttgacccaaaaagaatggatgactttcagctgaagggcatagtagaagagaagtttgtgaagtgggaatgtaattcaagtagtgcaactgagaaaaactcaattgctggggaaaacaaagctaaggcagaccaaccaaaagatgataccaagaagacagaaacagacaaccaaagtaatgccatgaaggaaaaacatggcaaatctcctttagcattggaaacaccaaatcgggtatccttgggacagttatggttagagctgcttaaattctacacactggattttgctttggaggaatatgtcatatgtgtacggatacaagatattttaacaagagaaaataaaaactggcctaaaaggcgaatagccattgaagatccattttcagtcaagaggaatgttgcacggagcttaaacagccagctggtttacgaatatgttgtggagagatttagggcagcttatcggtattttgcctgtcctcagacgaagggtggaaataagtctacagtggatttcaagaaaagagagaaggggaaaataagcaataagaaaccagtcaagtcgaacaatatggcaaccaatggttgtattctgcttggggaaaccacagaaaaaataaatgcagaaagagagcaacctgttcaatgtgatgaaatggactgtacatcacagagatgtattattgacaacaacaatttgttggtaaatgaactagattttgctgaccacggacaggactcttcatctctttctaccagcaaaagcagtgaaatagagccaaaattagataagaaacaagatgatttagcgccttcagaaacttgtttaaaaaaagagctcagccaatgtaattgcattgatttgtctaagtcgcctgacccagataaatctactggaacagactgcaggtcaaatttagaaacagagagttcacatcagagtgtgtgcaccgacacatctgctacctcttgcaactgcaaagctacagaagatgcttctgaccttaatgatgatgataacctccccacccaggaattatattatgtgtttgataagtttattttaacctctggcaagccaccaacgatagtatgcagcatctgcaaaaaggatggccattcaaagaatgattgcccagaggattttaggaaaattgatttaaaacctctaccaccaatgacaaaccgatctcgggaaatacttgatttagtatgtaaaagatgttttgatgagttatcaccaccttgttctgaacaacacaacagggagcaaattttaattggcttggaaaagtttattcaaaaagaatatgatgaaaaggcaaggttgtgcttatttggctcttctaagaatggatttggatttcgtgatagtgatctggatatttgtatgaccctggaaggccatgaaaatgcagaggccttaatagtgggaaggagattgtccaagctccagggaagaaaaagactgattggacagggaagaagtgtcccaggccttctcaacagcaactagcaaaggagggtatctttgtagatgttcagtcctttaccagcctagctattgttatttatgtttcaaaatgcgggactgtttgcaagattggggtgaggcccagcttctggcatctgtagtggtgtcagtatcgcctctgttacattataaaagaattcagcagaatagtgtgcttttctaaaatcattcttttgaacggtggttttgaaattgttagacccggagtaaagatggcagtgatgacttaacttctggccataagaagttgcttctggtgtcttaacatcttgttttataaagaaactgaaaagttgcaagtattttatttgttctcctttacttaaattctgcttagagccacctacttggaaagtggctgcccttctccattctgaagagtaagaattgagggaataggaaatgatttttatacccaggaaagaggttagagttttagatatcttctatgtaaaatttattaaacttctaatcactaagggtttgtatattatatataatctgtgccattcctactgggaagttgaaacaatgaaaataataaatcattttctttcagatgagccataattgaaacttttaagattagcataattgtatcgttgaataataaagagaaaaattacctcctttgttaattttatcatatgtgaattagtaactaatggtttctttgaaatcctttggtttagctgcaatggctcctgctctcatgtagctaaaaagaacatgttggaaaaatgcaaatgactttataactcttgggattgatgtttatacccttcagctatttccagttaatttttaatgccataatcattatgtattatgattatcattaccataccaactctgctgtctctggtttttacaagagtaacacatttaaatttacagaggtaagaatttccttggagaaataggtgctggtgataataggagtatctttcttttccatatcaacataattataataaataactcacagatttaaaggcttattttgtgccaggcattctgctgagtgctttacatacatgtctcatgtaatcctcccaacagctctgcaggacaggagtttatgattatcttgattttatagaatagtaatgtaatgctcagagaggttaaacatctggttagtcacacagctaatcaatacttagtttaagatttgagactgggtgcagtggctcacgcctgtaatcccagcactttgggaggctgaggcgggcggatcacgaggtcaggagatcgagaccatcctggtgaacacggtgaaacctggtctctactaaaaatacaaaaaaattagccgggcacggtggcgggtgcctgtagtcccagcaactcgggaggctgagacaggagaatggcatgaacccgggaggcagagcttgcagtgagccgagatagcaccactgcactccggcctgggcgaaagagcaagactccgtctcaaaaaaagaaaaaaaaaaaaaaaaaa

SEQ ID NO: 28630 - DNA, 5404 bp, Homo Sapiens
atgttataggacaagacaaagaaattagaagtagtctgatagataacatttgccatgtttggaaaatactgattatttactgatgtaatgaacaaatttgcctatgcaaacaaaataagtttcttccaagtaatgtccattgtcatgttacatcctttgtgaaaaatcctgtgcaacctgtgtatgaggatgtgtgccttttgtttgggtattattgtatacttccacttctttcatagttactacaatccatgaggtggcaggcagatgtaatgttattttgcacatgggaaactgaagctaggaatgtttgttcatgctaattcaaataggtagcaccagaaccagaattaacgtgctattcttcaaaattgctgctgctattgacaagaggtagttgagcattttcaccatctgccaatatactgtgaaaattttagtaccaattgatgcttttgagttaaagcggatcagctatgagaagaactagtggtatacaacattgtacagctgagcacgtggctcggtgggtggaggagaaactgcatcccctttgggtcgttgcctgactgaagggaccatgtgcatgatatgtttgggagatagtagaggaataaagtgataattttggggggaagctgtcagtagattggaagcctgcatagtacagctgaaaagttttaggtttgctgggtaggcaatagggaacttttggtagtgtcttaaatggggtcattgtaatcactcctaaattttggaaagatttttaaagaagagggtcttgaaggctttgaccaggttctaggcactggaaatagtaaagaaactacatgagagaactgttgaaataaaaaagagccccatgattgtccgtacaggttttggtgggaaagatgttacaaaaatattcggttgaatacatggaaataattgtaggatcatacatgagaacagaagttgtaaatggggctgttttggggaatggatgttaaatttgggatttatacgtgctgaattgggaaaaagtgaaatagtaagtggaaatgacctgaaagttggagatggaggcctggactagggaaggtgctggattgtttatatttatgtcaagtcctaagcagaaagataagaggttctgacccagaatgtgtcagatgggtgagataaggagggtgtagaggagactgcactagggaaagagacagagatagagccttggagggcaggtgagagccaggcgagcaaagtccaggccagggagcttttcaagtcatgtgatggtcaagccagacccaacgggtgcctggagggagaggcaagaaggaggtcctgggagacctggaagccgttggtgggaaaggggcaaagggaagtggagccaggagaccagcaggtattgcacaattactcagacagtttgattttagtatggatggggtagcttaggacagtgaatgagaaacaggtgtgttactgtgggtttagggtcatctgggccactcctggcatctggaatttcccagacatgccatttgaagccacgccagatgctgtgagttactgctttgatgttttgtattttgtgttgttttctgcatgtaattgtgtttgcactggatggaaatggaaaataccaactttccagaggaggaaggaccagtgaggggacagaaacccaaatgacttacccagaatagaaaactggattgtgattgagctaggaccccaaccaaggtctcctgactcctggatgaaaatttcctggatgacagcagccgtcaaaaccaatggaacctgtccctgctttcctttttagctacatttcatttgtctgttcatttatctatttattggacttgggacagtctttttcacatttttttttctgtcaactcatcttttatgaagaacagattatccaccttcagtgacacttgccccccactagcttttctcaactacaaacaaaatacagcacagaattcacaggaacatgtaggcagtgggatgaagctttgagcctcttttctacaaagagctagtcctcagtgctgtatgtttggagcagtgctaggccagttgttttgttggacagacaaaggtcagtaaaaaggggtttatttgatttttaattaggaatatttcatgttaaagttacttacctgtaagtaaaagatcttagaaaatctaagttaacatatcatgaaatagtaaacagtgagatgagagaatatatgattaagtactggatagaagtgaaagcagtaaacgttattatattataggtagagcctgtagtctccctttcttattcagtgtagtctgttacttgcagcgcattagaaatatgatttctagtaagcggtgcttatgctcatatctcctgacagcgtagcagtttgaaggtcttaaagggtgtgtcatgactaggtttggattttttgcctttcagtgtactagtacattttggaatagctccggaaattaacagaaacatttgctggaaggaggaggttactatttgtattttaaatcagttgcttagcattttgtcattgtatcagctttcatgggaaaaaggttgaaacctgtagccttgtatcaaattggctaaaaaagaaaaattagtgttaaattatattttggtttagtctagcagcttgggataaattgaggcaatagcaaccttcaaagctggtgtccatctgttagtaaagtgtgtagttaacatccacggtgccgtgcggtgtctgctttgcgctctgaccctgttagtcagcaaagcgcaggatgtcatggtgggcttggagcagggaagggctggagaaaaccatttgcaggagccttggtggaggcattgcaggctgttgggtctccccgcagcagagagaatggtctttaggggcattttggccagggttgctgggagaggctttcccaaatacttggtagcaattgggtgaaaagctgctggagcatcttctggctctgttgatgtttcttacggacttccagctcattagtgaaaaaatagagtcaacatctttctttgtagggtgagaaagaaacacccagagattttatttggcttttaattagggattattccagtgctagagtgaatggtctcagaaatattaaatgttcagtttgaattagtttattacagaaaagcttcttggtttgcagtatgaaatctgcaactaaagtttacactttttacttaggcagatatatatactgaagacatggcctttggagcttcaacttttccacctcagtatttatcttctgagataactcttcatccatatgcctattctccttatacccttgactccacacagaatgtttactcagtgcctggctcccagtatctttataaccaacccagttgttaccgaggttttcaaacagtgaagcatcgaaatgagaacacatgccctctcccacaagaaatgaaagctctgtttaagaagaaaacctatgatgagaaaaaaacgtatgatcagcaaaagtttgacagtgaaagggctgatggaactatatcatctgagataaaatcagctagaggttcacatcatttgtccatttacgctgagaatagtttgaaatcagatggttaccataagcgaacagacaggaaatccagaatcattgcaaaaaatgtatctacctccaaacctgagtttgaatttaccacactggactttcctgaactgcaaggtgcagagaacaatatgtcagagatacagaagcaacccaagtggggacctgtccactctgtctctaccgacatttctcttctaagagaagtagtaaaaccagctgcagtgttatcaaaggtgaggtgagggtttctctctttttctttttcctttgtacactttaaattgtctcatttcaaacattacacattaaatcttgctgtgggctttgatgtccatggagctggggaggatgtattgggggaagcctttcattgtgcacttatatgaccttctttgtttgaacagtttataatgaggctgtaacatctagtgcagctattgttttatttgtgcgttttgttttgttttgttttgtttttgaaacggagtctcgctctgtcaccaggctgcagtgcagtggcacgatctcagctcactgcaacctccgcctcccgggttcaagcaattctcctgcctcagcctctcgagtagctgggactacgggcgcacactgccacgctggctaattttttttttgtattttagtagagacgggatttcaccatgttgcccaggctggtcttgaattcctgagctaaggcaatccgcctgcctgggcctcccaaagtgctaggattacaggcgtgagccacccacgccactgtgcccggctgtagctattgttttaaaagaatcacctagtatacctttttttttgtggggagggagtctcactgtgttgcccaggctgaagtgcagtggcacgatcttggcttcttggctcactacaatccccgccttccgggttcaagcagttctcctgcctcagcctccggagtagctgggactacaggtacatgccaccatatctggctaatttttttgtatttttagtagagatggggtttcaccatattggtctggctggtctccaactcctgacttcaggtgatccacctgccttggcctcccaaagtgctgggattacaggcttgagccaccgtgcccaatctagtatactcctttttatatggtagctgaaaggtattgtggtgcctcagaaggaaaaggttgtaacagagtcaagccgctttgacagcccattttcaacacgctacttctaacatgctgatagcactttttccaatatagaaaaaaaagacttttataaaaattgaaatacattaagtcctcacataatgttgtcaataggttcttggaaactgcaactttaaatgaaaggctgtatagtaggtcctccagtaacattttcttcaccatcatttcattatgatgttgatgaaaaaaggaattggttttgttttatgttgttttgtttaaagtcacagtttccaagaacctgtccatggtactgaggacttaactgtagtaatatttaaaactgcatagtgtaacttttgaattttccaggcttttattacatctttgtcttgttaatgatgcagcaaattcaggaaaacttattacagcaggttaattcactttgttcaacatttgatctcagagttttagtccaccaagttgaggcatttctctcaaatggattgatttgagacttccaggaagaaatagtgtctggttagtagttcctaaaatggcttctgatgaatttccgctgaaggagcagtggagtacatgccagtacgaaggcaagtagaaaaaaaaaaaaaaaa

SEQ ID NO: 28631 - DNA, 4542 bp, Homo Sapiens
agagttccgactgaaatttgagaagctctttgctattcaagtggatatgtgcagttgacagtttgagagatgcatctagggttcagtaaagacaacacaagcctgtctttagggtctacctgtgaactgtgaacacagcaatgagaatgatggacatcacctttaagtatttttctagactttattactcatgtgtttgtcatgaggtgtaacttagtagttcatagtcctataatgtatgttattgactaggtagcatttatttttctaattgtttctgttatagtgctgccacatgtgtttcccagaaacgcattttacccacagttcttagggttggcctgattagtttaattgctgtctgaacctgcttcttactgtgattagttcaggaatctagatcaaactcattggcatttaacatttcaggaagtgaactgagtaacaactaactcagcaggggagtgtagtatgctattatcttttgggaaagcagcttatttgctttcaagaggcagcaggaggatggactgtctttaggtatgaaggcaagaatgattatagacaatatgcagaggaggacacagtgtgggagaatcagggaactgagccactcatggagttcagccaaccttggatccctgctgcacctttggacttccagttaagccaatttgtctgacatatttacttataccagtttgaatcttgaaatatttcaggaataataatttcctagataaaaggaaagacctttcatgaaaggtctcaagtcaaatagggtcaattaggacagagttgctccaattacatatttggaacagatgtccaaatgttaatacttgactaaggctaaagactaatattaccatcacaggaaaaatgtccagggttttttttcagatgtgaaattttatttaaaaattttaaataaactaaatcaaaaaattttagtagttgtactaatttcctggggctgtcaaagtaccacaaactgtatggcgtaaaacaacacaaagttattctttcatggttttggaggctagaagtttgaaatcaacgtgttggtagggccatgctctctccaaacccactaggggaagactcctgtctttcagtgtctggtagccccacttgttctttggtttctggcagcataactgtaatctctacctcagttttttcatgtatgtctccatgtttttttactttctttcttgagatggagtttcactcttgttgcccaggctggagtgcagtggcatgatcttggcttactgcaacctctgtgccccgggttcaagcaattttcctgcctcagcctcccgagtagctgggattacaggcatgcgtcagcacgcccggctgattttgtatttttggtagagatggagtttcatcatgttagtcaggctggcctcgaactgacctcaggtgatccacctgccttggcctcccaaagtgctgggattacagatgtgagccactgcacccggctgtctccatgtcttcttataagggtatcagtcatactggattagggcccaccctaaagacctcattttaacttgattacctctgtaaagaccctgtttccaaagaaggcaaaattctaagcaactaggggttagacttcaacatatctttcggggggacacaactcaacccataacagtagtcaatggctgtggcaggctaaatgtggctcccaaatatgtccatatcctaatccctacagcctgtgaatattaccttatatagccaagaggattttgcagatgtgattctgagattgagagattatgccagattatccaggtaggccccaaatgtaatcaccacagtccttataggagaggcaagaaagtcaagtgtagaaggaggcgatagaaggagagagggatttgaagattaataggctgcttgctttgaaggcagagggaagggaccataaaccagaaataaacctctagaagctggaaaaggcatggaaatagaccctcccttaaggtctctggagggagtgcagccttgatttctaccgagtaaaattgattttgtacttcagacctccaaaactgtaagagaatgactgttgttttaaaaccattgagtttgtagtaatttgttgcagcagccacaagaaactagtacaacatctatatagaattttttcaataattggagaaatttgaatatggattgcatattaatattactgaatcagcattaaatttgttaggtgcaataatgtgattgtagctatttaggagaatatcctatttttaagagacatgccaccatatttagggagaagtgccaacatatttgcagtttattttcaaatggttcagaggctgtctgtgtacatgagaagacaaagataaggcaaatgcagcaaaattgtaataattggtgaatccaggtgaagggactatggctggtctttgtacttttttttccaacttttctgtaggtttaaaattttcaaaataaaaaaatgggaaatactttaaaaattgtaatcaaagacattagtacagaaactttcataatgtattttatttttacagtaaaattaatttatgtaaattgatagaattttactaatttcactcccaagttacattaaaaggcttacatatgtttgataatagcatatgtaaactagaactctgaatgatatccattggtcataatacgtactatgtagcggtaatggtgacttttgtgattgcacaagtctagagatgccccaaatgacattgacttagacatctggttattctaaggctgaaactgaagttgaatagaaggttttagtcaaatactgagatgaaaactgaggcagtcctggcgggggggagtgagtgtgtgtgtatatatacacacatagacatcatgcttctaaacatttacagaaagaaagggtagattatctacaaaaaaataagaatcagactgatatgagatcttacaaacctaacccccttctctttcctaaactccagattctcatatttctgacttcctatttgatatttacacttcgatatttaccaggagtcttcaacattttgttcaaaacagtactcttggttttcttcctccaagactactccttactcatatcagcaaatagcagctcttttcaagtgctcagtgtaaaaacctacaattaatccttgatttctctttcagtcagcctatactaaatcaatttcatttaaaatatctcggctactactctgcatctccactgctaccatcggcctctccagtcacattctccaagagcactctatctcatttaaaagacaaaatctctgcagtggcctgtgatgctccttaatggcctacataatccagccctcaagcacctccgtgatctctgtaaaactttcccttggtcactgtgcttcagccacattaaccagcttgcatatttctcacattcaccaagcttgttcctgccttggggcctttgtacttaccatgttctgttctgagaatactctgcctcaagatatcctacaactatcttactgtattcagctctctgctcaagtattaactgatgaaacctgtcatccctactccactccatgttctgctttacttaacagcaattgcacatatggccccctgaataatatacatttagtcacttatttttacttatctgctaattaaaatgtagactttttctattctgtttactgctgtattcccagcatgttttatccgaatgtgcagtggtttcttttcttctcccttatcgtgggaagtgatgtgcacaaatacacataatggagcctgaatgtcatattgctttcatacctgtgtgaattttggtaagaaaggaaaagtagcgattgacaggtaatataattacattaagtcactctcatagttagctgtttattgctttcctgctcttattctcagtccccaggaccaaatgttgaccactaccttcccccacatataattaggttatttaccgaacgccatgcaggtggctgttaaaaggaagatatatacttaccttataaactcaacttttccctgttgtctttctgtctcacccctacctccatgctttaaattaacttttcaggcttaggccttatctctcagtagagccatataaggtatgtgtaaaagcaggaaaatgtttcctggggatgaagctttgaaaagcttttttttttttttcttttggcaataaaataaggtagattcagcacaatacctaataactaaaaaatctgtttttaattgggtggggcagacagcaagtgtgtcatcctggaagatactatttgggattttatgtaggtacataagagaaaaaagtgaacaaaagcaaggggctaccaggacgccgcagtatgcttaacatgtattttctaagtttgtattatgcctttatcttggtacttttatcttctgttctcacttgatctttttgaaatgtattttaaatcctaataaaaatatataaagtctggaattaataaaggaaaaaaaaaaaaaaaa

SEQ ID NO: 28632 - DNA, 5110 bp, Homo Sapiens
ggctgttgttggctgacttccggtggtgccaaagccgtttccgtggaatcaggccggctggtgagggtacagaatggaacaaaagtgggacttttaaaatgttgccctgtaagaagagaagaactacagtgacagagtccctacagcataaaggcaatcaagaggaaaacaacgtagacctagaatcagccgttaaaccagaatctgaccaggttaaggacttgagttcggtgtcactatcctgggatccaagtcatggcagagtagctggcttcgaagtacagtctttgcaggatgcaggaaatcagcttggtatggaggatacatctctgagctctggaatgctcacccagaacacaaatgtaccaattctagaaggtgttgatgtggccatctctcagggaatcaccctaccttccttggagtcttttcacccccttaatatacacattggtaaaggaaaactccacgctactggctcaaagagagggaaaaaaatgacactcaggcctgggccagttacccaagaagacagatgtgatcatcttaccctaaaggagcctttttcaggagagcctagtgaagaagtcaaggaagaaggagggaaacctcaaatgaattctgaaggggagataccttccctgccatcaggcagccaatctgcaaaaccagtaagccagcccaggaaatcaacccagccagatgtttgtgcctctcctcaagaaaagccactcaggactctgtttcaccaacctgaggaagagatagaagatggtggactcttcattccaatggaagaacaagacaatgaagaaagtgagaaaaggagaaaaaagaaaaagggtaccaagaggaaacgagatggaaggggtcaagaagggaccttggcatatgacctgaaactggatgacatgcttgaccgtaccttggaggatggtgccaagcagcacaatctaacagcagtcaatgtccgaaacatccttcatgaggtaatcacaaatgaacacgtggtagctatgatgaaagcagccatcagtgagacggaagatatgccaatgtttgagcctaaaatgacacgctctaaactgaaggaagtagtggaaaaaggagtggtaattccaacatggaatatttcaccaattaagaaggccaatgaaattaaggtaaacttggaagaaataattgttattcttttccagaaagacttcatcggttttgaaacttaagtacttcctctttaacttttcttgatcaatctttgttttaattccagctttgtttttttccattctattactcttaggtttgtatctcatggaattcactttaacctctgcctcgtgttatttgctttagctgtacattatgctcttaggatttttttttttctgccctgcttcttccccttattttccaaatacgtatgatttgtgtttcccattacttcatttctttctaattgtactaatgtagcctcctcagtttgtggatatccaccttgaagaagatgattcctcagatgaagaataccagccggatgatgaagaagaagatgaaactgctgaagagagcttattggaaagtgatgttgaaagcactgcttcatctccacgtggggcaaagaaatccagattgaggcagtcttctgagatgactgaaacagatgaggagagtggcatattatcagaggctgagaaagtcaccacaccagccatcaggcacatcagtgctgaggtagtgcccatggggcccccgccccctccaaagccgaaacagaccagagatagtactttcatggagaagttacatgcggtagatgaggagctggcttccagtccagtctgcatggattctttccagcccatggatgacagtctcattgcatttcgaacgcgttctaagatgcccctgaaagatgttcccctgggccaattagaggcagagctccaagctccagacatcactccagatatgtatgaccccaatacagcagatgatgaggactggaagatgtggctggggggacttatgaatgatgatgtggggaatgaagatgaagcagatgatgatgatgatccagaatataatttcctggaagacctcgatgaaccagacacagaggatttccggactgaccgggcagtgagaatcaccaaaaaggaagtaaatgagctgatggaagagctgtttgaaactttccaagatgagatgggattctccaacatggaagatgatggcccagaagaggaggagtgtgtagctgagcctcgtcctaactttaacacccctcaagctctacggtttgaggaaccactggccaacctgttaaatgaacaacatcggacagtgaaggagctatttgaacagctgaagatgaagaaatcttcagccaaacagctgcaggaagtagagaaggttaaaccccagagtgagaaagttcatcagactctgattctggacccagcacagaggaagagactccagcagcagatgcagcagcacgttcagctcttgacccaaatccaccttcttgccacctgcaaccccaacctcaatccggaggccactaccaccaggatatttcttaaagagctgggaacctttgctcaaagctccatcgcccttcaccatcagtacaaccccaagtttcagaccctgttccaaccctgtaacttgatgggagctatgcagctgattgaagacttcagcacacatgtcagcattgactgcagccctcataaaactgtcaagaagactgcgaatgaatttccctgtttgccaaagcaagtggcttggattctggccacaagcaaggttttcatgtatccagagttacttccagtgtgttccctgaaggcaaagaatccccaggataagatcgtcttcaccaaggctgaggacaatttgttagctttaggactgaagcattttgaaggaactgagtttcctaatcctctaatcagcaagtaccttctaacctgcaaaactgcccaccaactgacagtgagaatcaagaacctcaacatgaacagagctcctgacaacatcattaaattttataagaagaccaaacagctgccagtcctaggaaaatgctgtgaagagatccagccacatcagtggaagccacctatagagagagaagaacaccggctcccattctggttaaaggccagtctgccacccatccaggaagaactgcggcacatggctgatggtgctagagaggtaggaaatatgactggaaccactgagatcaactcagatcgaagcctagaaaaagacaatttggagttggggagtgaatctcggtacccactgctattgcctaagggtgtagtcctgaaactgaagccagttgccacccgtttccccaggaaggcttggagacagaagcgttcatcagtcctgaagcccctccttatccaacccagcccctctctccagcccagcttcaaccctgggaaaacaccagcccgatcaactcattcagaagcccctccgagcaaaatggtgctccggattcctcacccaatacagccagccactgttttacagacagttccaggtgtccctccactgggggtcagtggaggtgagagttttgagtctcctgcagcactgcctgctgtgccccctgaggccaggacaagcttccctctgtctgagtcccagactttgctctcttctgcccctgtgcccaaggtaatgctgccctcccttgccccttctaagtttcgaaagccatatgtgagacggagaccctcaaagagaagaggagtcaaggcctctccctgtatgaaacctgcccctgttatccaccaccctgcatctgttatcttcactgttcctgctaccactgtgaagattgtgagccttggcggtggctgtaacatgatccagcctgtcaatgcggctgtggcccagagtccccagactattcccatcactaccctcttggttaaccctacttccttcccctgtccattgaaccagtcccttgtggcctcctctgtctcacccttaattgtttctggcaattctgtgaatcttcctataccatccacccctgaagataaggcccacgtgaatgtggacattgcttgtgctgtggctgatggggaaaatgcctttcagggcctagaacccaaattagagccccaggaactatctcctctctctgctactgttttcccgaaagtggaacatagcccagggcctccactagcagatgcagagtgccaagaaggattgtcagagaatagtgcctgtcgctggaccgttgtgaaaacagaggaggggaggcaagctctggagccgctccctcagggcatccaggagtctctaaacaaccctacccctggggatttagaggaaattgtcaagatggaacctgaagaagctagagaggaaatcagtggatcccctgagcgtgatatttgtgatgacatcaaagtggaacatgctgtggaattggacactggtgccccaagcgaggagttgagcagtgctggagaagtaacgaaacagacagtcttacagaaggaagaggagaggagtcagccaactaaaaccccttcatcttctcaagagccccctgatgaaggaacctcagggacagatgtgaacaaaggatcatcaaagaatgctctgtcctcagtggatcctgaagtgaggcttagtagccccccagggaagccagaagattcatccagtgttgatggtcagtcagtggggactccagttgggccagaaactggaggagagaagaatgggccagaagaagaggaagaagaggactttgatgacctcacccaagatgaggaagatgaaatgtcatcagcttctgaggaatctgtgctttctgtcccagaactccaggtgagagctggagaatattctcaagtatttcgtggactcagtaatatgtatcacttattgatatgccacctgcttgcttgctgcactatggatagtcctaaaatcatttgtatttgatttgtgaatgcattatgggacatgattgtggagttgaggtgaaatgagatggaaaggatgaaattttacttattatattaaactcgtttacacattaaaaaaaaaaaaaaaa

SEQ ID NO: 28633 - DNA, 7746 bp, Homo Sapiens
gacctagggggtaagcgtgtaccttctccccattttggaggcagagtggccttcctggtaataactagttcaagcataatgcaaaggcagttgatgcattctgagtgtaccgctaataatagtagggggaccagcagctcacaagcatcccatcacttgaccacaacagacatgtcattgagctcagctgagattagccttgcctaaatcagcagaactttataggagacccaaagactcctaagaaataatgaaactgctttaaaaataaacgagctatttttaatagttattaagtattggggtggttcgttatgcagcaaaagataactgattcaggtataaagcacatggtcacaaaggacctaaggggatggggtacatattgggttttgcagtagccttggcatttagctctagagcttatttgtagctcagagctgtgaacatgatgggctcagcatggggagatgataaagtacaggcgagaaagccccttgcaaagtggtcaggcacccgggccaggacaggtctaaccatcctcaggatgtggcacgacctcctatttgtaggttaggtgcaaacaaatgctcttcttcgatgcttacaccaaccccaggacccacagaaggcattctgtctccatcaatccagggctggcataggattttaagagacagggcattttcaaggtaaaagagcatttctgaatcacattcatctaataaatagctacccaatgtcgactatgggctctccaccgttccaggcctggaaatgtagcagtgtgcctcatggaaatgtagcagtgtgcctcatggaaatgtagcagtgtgcctcatggaaatgtagcagtgtgcctcatggagctgaccttcccatgtaacctagcaagcccttgaaaaggagagaaaaaagtaatggggaaaggtaacctccctgtggtagttttaaaatgtctgcaaattcttctctccaagaggtggaactgaatttacctccccttgagtacgggctgtacttagtgactcacttctaacaaagtcggaagtgatggcgtgtggcttccaagggtaggtcttaaaagacactgcaagctctgacctgggctccctcttcgatcactagctctggggaagccagctgccatgctaaaaaagacactcaagcagccccacggagaggtccacaacgcaaggagctgagtcctcccaccaacagccagtgaggagccgaggcctcccacctacaaccagtgaggagctgaggcctcctgccacagtcacgggagtgagccttggaagcagatcctccagtgacagtcaggccttcagaaactgcagcccctgctgacatcttgactgaaacttcaaaatcatccagctaagctgcttccaaattcccagctgggagatgataaatgtttcaagctgctaagtttcagggtaatttgttacacagcaacagataacaaatgcattccccctatccccctgcttttccaactttgatccattcctccttccttcatactcaccatacaccacataatgggggaacaaggatgtaacaagacaggattctggggaactgagctcaaaagggaaagttctaatgaacatttgctatactgaagtggaagaagcaaaagcttgtgagcagcactgagcccgcacttgctttacctggaagtccaagccccacatcagtttgtgcttcttctggctgcccagacccaggttgggggagctaggaatttggagggaagggttaagggaggctggctggacatgcagactcacttgagcaggatctcatactggccggcatgccagggctgcaccttctttagaaccagggtgaacacgtcctcattctgaagcacctcgaagtggccagtgtctttgcagagggctttgccatctctgagccagtgcacggtaggaaaggggtcaccagctatggcgcaggagatgaggacactctggcccagggaggctgtcactgagcgaggcttactgatgaaccagggctgggtgccatcgtgaggctctggagattggcaaagggcagagctaaacagggatgtccctcagcaggcagtgtccactcaattctccatggaggtgaaggatgggaagatagcatgtcacccaagtaacagattgtccagaaatcactgtgattggatacacaaatgcagcacacccttctcattgcacatccatctcggatacattctcagaggataatattaacatgactgtatatccaatgtaaggggaggtagcccagaaggcacggggcaccgagccaggtgctaatgatctgtatccaatgcgtgtgattaagagttgtcactcactttatgtgtgcttaacttgcctctcctcttaaatatgttatctaatggcaaggaccctgttaagcctataactcacctcaaaatctatcgctgccaaattgttaagtgtattacagatttccctcttagtactctatgcaccttggcaccagtaacccagagagggcagggacttcagaaagctgggaaaggcagccccactcagtcagagcttgtgatgttggacagggagctggcctctggggctggggtgggactgagggacgagagggccctcagtgggaacaaagtagcctcatgtggtttccttgcctccaaatcacttttggaggggctgcagcagcatctccttcccactcgctctgagtgggtcagcctcaccttgcaccgtgagcacggcctgggtgcggacctctccagcgctgttccaggcctcgcaggtgtacgtgcccgtgtcctccgggaacacttcctggatacaaaggctgtgctgagttcctctctgttcaaagtggaagtcctctgactcttggatctcattcccattgtgcagccagatgacttcagggggtggattccccgaaccaggaggaggggaagggggattggttagggaggtcctccccggccatgcagcaactctgcgctgaatgcagtgatattggatgaaacactccaacaactctctatgctttcacttccccatcagtaaaataggaattcaaacaggatctacctcatgggtttgttgggaggaccttaaaatttgaatagtgcaactgagaacatcttctgagatttgggaagttctcacataatttttttttttttttttttttttgagacagagtctttgctctgtcgcccaggctgcagtgcagtggtgcgatctcggctcactgcaggctccacctcccaggttcacgccattctcctgcctcagcctcccgagtagctgggactacaggcaccggccaccacacccagctaattttttgtattttttagtagagacagggtttcaccgtgttagccaggatggtctcgatctcctgaccttgtgatctgctgcctcggcctcacaaagtgctgggattacaggcgtgagccaccgtgcccggcccataatctggttttgtaccagtcttcaaaaccttccagctacactggccacactatattttcaaattaatctttcactgctctagctctatggccatcttcttcctctggaccatttaatcatgaatccagaaaatcctacccagagaaggcagaaaagagaggacaagagtctccatttctttgggtccatcacctgatggtcccatctgattttctggtggatcaaggatctgagcgggtcctcggagagcaatacccattgcaaccaagaccattttcatgttaatccccaagagagagctgcagagacagacctgacacttggacagtcatagtgacctggcttccatccatgactttgagatcagagaggccctgcaggaagatgggtgcagtgggcttgctgggagccacaggcagaaggtactcactcttcctgctactcttcttttctgtgtggtagaaaacagaacgtggggtgaacattcatgcattcattcaacaaacacagactaaatgaccacttggtacacgactgtgttgatgctcagttcccaccagaaactggcagctaacagataaagagtgtttggagtttctagagatcattaggaacaagatgcttcccatttctctgcttggcaatgacgatgttcttgcctgatagccaggaatgaacaatgagttcttataagtttgtgagttttaaaaaatattttatttatttttcagataaatgatacactcacatggcacaaaattcaaaaggtaccaaagagtatggcaagtctccctcccaccccatcccccagccaggaggctggaggaaaacttcccccaaagcaggtgcagttgaagggcatggagcctgagtgtgagagcaggtaaccccccacggtccccttggaagatggggctctcaggcccctgctgctctctggtgctgctgactcagcaccgcagccttcgacggagggccgccaggggccttggcagaagctctgggagtgggcttgggggcacaggattggaaatgcattgatctatctcgtttctctcactaggctgcagcagtcaggagagctggctgcctcgggagagttgaggaatttcctgtcttgcacagactgagaaggctcaaggacaaaatgtttttgtctttctatagcattccctgttcctgcctctctgcaatctcagcgagtccccagccttacagagcttcatgcagatgggctcaaattcctagatgctacgggaacgtcaccaactccagcgcactcccctttaagcctgtggcagtctcctcttcaaccccaccttctctgggttcctcccacagcccctgtttcctgggggtttggcaaagccaagtcaccctgtgggtctcagccattggggactaaaagcctatctgcctctccctcccctgggagcccagaagtatgcatgaaagggtggcctgggagctgcctcccacctggcagctcactggttccacctgcagctgtggaggggatcctggcctcaggcaagtctgcctccgtctgaagccccacttcctcatcggtctctacggggagtcgtggtatcatcacaggactttgggtagttttaaagagataataggtaaaaatactttgtacaaccattcattatcaatgagaacatttgtacgagcctagcatgagaactgactcacatctatccacttgggctcaattactcaatgggtttatcagcagtcaaagaaccaatggagtctgggcttcacccaaggattatggactcatttttataggacctgaggcaaatactattaggaatacaaatgcgttgcttaaaaatatcatgggatatatctcaaagtaaattgaggacaagcgttcattgcaccccctccaggagatgagtgagtgaacttgggggaaaccggccgatcggcagacatttagttcggtgtcactcattgcccccggtcctgtgttttgttccccaaagccctacagcaagaaagaagggaagatggaaatgattgggagtgaatgttcagaacgagcctgttctcagaccggcaaggtgggacccagtcccaactcaccattccactgtactggtgtagagaccaggagagacttaactaacgggaagtgacttggctaacatcatggggccagtgtgggcagacccagagctcatgcccaggccttctgatgacaaggccgggatgttacgtaggcgtcccttcaaagggaaccagtctcctccaacggtgcccatggtgaccgctccaggacaaacacactgtcagctgacccacatcctagatccttgacaaccgagaaaaactaaagcagaacagagacaagccaggtgaaaagagcaacacaatgtgtgtgtgtgtgtgtgtgtgtgtgtgtgtattgcaattcattccaaagccaaacaaattattccggctcatctctggcctctagcctctatcagtttctgctcactcttctgtggacttaagtaaaatacgaaaggacagatggaaactggcattcttaactcgtggccctggctgtgtgatctgaagcaaccttcccaaagcaagcctcggtgttctctcctccaaacttatggcaacataatactgagaagtatgatgtctgcatcatcagtctaatgcatggtaatattgcagggctttagatgattagaaagtaacatataaaacagctagaacaatacatggcacacaagcagtataaaaatcaatgttttctgactttcccaacccaactaactcctttggttgtggaaattcaacctgataataactccaatgagaaaaaccccccaaaccagaactttcatgtaacgatgattccttataaagcccagcgctccaggattccaaaagatgttcatagctaattcagtgttaccctcaacatctcggaagtattgggcagattgtgtctgttttacagtggagggagctgagactcagagaaagaagctcgcctgtcctaaggtcctggggctgcgatgccccatgaggagggagatgctgctggtggggtcctggtctgggtgctttcccttgactgtcctgggagcagaggcaggtctcaattctgtgaggagctttctgtcatcatccatattcatgtccagagctacccattaccctgggagtcactcctctctgcttgtccttggcctccttctagcatcatcctggtttaaggaccagggtctgaggcaagaggcccccagtgacaaggttgtctcagagagcccaagacttcttcgtcttgggaggacacccactggccatggcacacaaatagcaagggatgctttgctgggacccagtgacagacttgcccagctcaaatggggccaaactaaatataccccgggtttccccacagctgtgcttcctgctgctctgctgagactgagcccagagagggccttctttctggagtgcagaaagggctgagtctccttgctttccttgcctaggattaaggatctaaagtgcatttatctgttgctctgttacttggtattagccaattcactcctggactcagtcattaaactgccactgtcccattttgacagaatggaaaaggattgatcgggctgtcgtccaatgggaaagacaagcacaatgactacgaataagcccaagcagactgctgacaagtaaaaacgatgccatgtagacgaagctgttaataggacttaagaaagagcaagaatggagaaagggaagaacagagagaagagaaagaaaaagaggcaatgtgaagaagagagagggggaaaagggaagcaaaggaagggggagagaatgagagacagacagatatacgcactctcccctttatgattctactgacccatggagtttttccgtccttgccattttggctgtttttgactcactagaagttgtttttgaagccagttcctagtcatgaaactaaacatgaaatgatcgctctggtgaagcaaaagcatcaaacaaatgacctatcaggatccaagagcagccatgcagaaagcccatgggctgaagcaggtggtggcctggtgctgctgctgatcacctggactactgtgggcagctgacatcacctcctgagcatcactttcttcgtctgtaaagtgaattcggaagtgtcaagtggagttgttgtgagaattaaataaaacaagccagcttttctagccaaaaaaaaaaaaaaaaaaaa

SEQ ID NO: 28634 - DNA, 5920 bp, Homo Sapiens
tacaaagaaaattcaaggtcagtttaccactcacaaaataccaaacatccttctgctggttaaaacgagtgacagctgccgtgtgtgtgtgtgtgtgtgtgtgtgtgtgtgtgtgtgtgtgtatgtgtatatgcgtatatatgtgtgtgtatgtgtgtatatatatatgtgtgtgtgtatatatatatatgcaattatacctttatccctactctagtccaccttcctataaataagatgtattgagatgctcagtgcccccattctgacagcatccaatcgagtgaatcctcacttccttgaaatcacccaaccagggccaaaatcctaaaagaggttctttgtgacaccctctgtctgagaagtcctatggttctctgtgatgaatagacccaactttttcaaatacaggcatttctggtgggctttggctgaaggcattcacacccaccagtgaatgtcttgcacttctaattgtgtctcggggcatgcctggtggaggacctgactgagacaattgtgactggatgtggtctgagagcaggcagtaggatgaggcttggggactggctcactcactgcccaactggtagcaaaacccatctggagcagcgtgtgaggtatggacactcactcacacgagggggtggcccagttgctgaggattccaccagtggtaccctgggaaaatatccctgtggaggggaatgggaggagtcaaactgtggaagataagaggagtactgcacacaaggacagtagagtgtctgttccctgcagagggatagtgaggaactgatgaggtgactgtgagtgcccggggcctctgtcgttatcttggaggatcactttgaggtcaggagttcatgaccagcctggccaacatggtgaaaccctgtctctactgaaaatacattaattagcttggtggcgggtgcctgtagtcccagctactcgggaggctgaggcaggagaatcgcttgaacccgggaggccgaggttgcagtgagctgagatggcgccactgcaccccagcttgggtgacagagcaagactccgtctcaaaaacaaacacacagtactgcatcctgggggtggaggtgaggtgacggtagagatcagtgctacccttggaaatctgacagatacagtaagatggtccctatcatagttccatttaatttgccagcctcatctgcagaatccagatggatcctggagaaaaattaaccaagtagcctcaatcacaaatgttgggttggatattacatcagtgttagagcagttaagggctcaggtatgtggtgtgcagccattgactgggtgaatccatttttacctaccccaattacaaaacagtttgctttcatgtggaacagatagtattcctttcagttttgctgcaggaacatattactcttccacccctgtcataatacagcctgaagagatttaccatcaaatactgtttttttctctctcttaacttaatcccgaattggataatttctcttcatcttcactgtcacctctacgccatcactgtcatctctagaccgctctgctgttgagagattgatggaatcattatgcaaactaaaatagaatgttttatctatcaaattgtatttctttgtcaatagtgttagggcacagtaggttcatttactgctggtaagggtgtaaattgttagaaactttctgaatggcagtttggtaataacaaacaaaaagcttaagtttgtgtccttaaatgccttacttcaatacccaaggcatatggcctcaataaaaaattatggaagcatgcaaagattttgttaacaaagatataatcattgcagggtagaatttagaaatttaagactgaaagatcttttcagtcacctgcagcaagaaaggagtcaaaacctatgtacgatctcaactagtaaaattttctccttgcccagggatcatgctgagtttaaggacagaaatgcaaagtgcagcctgggaaagtgtttcaacacacaaaaatagaaccacctgtatgtagtctttttgaaagcacaaaataaagagcagtcctacagggttcactgctatgtcctgaatgttgatgtcccttccaaaattcatatgttggaacctaatgtcaatgtaatagtattaagaggtggggcttttgggaagcaatggagtcatgagggcttcaccctcatgagtaggataagtacccttacaaaagaggctcagggaggcgctcttgcctcttccaccatgtaaggacacgtagcaggcacccatttctgaagaatgggccctccccagactccatatctgctggtgccttgatcttggacttagcctctaggactgtgagtgacatatttctattgtttataaattatccagtataagtaagatattttgttagagcagcctgaacgaactaagacactctaagcgggaaactcacaaaaaatatttggtagtgaaaaacagtatggtgtgttaatgtatggtgacaagtgtttgtttgcatttaaaaatgcattggagcctcgttttgattaggcagtaaatttacctttaatacgtaagtttgacagttatatgtaatcagctttttttttttaagatggtgtgattgaggttaatgtgaactgaactttctatttctaagctgtcttcatctaattttacctttctgtggaaaatcaatacaagtcaaccatttttattgcccagttattcaaagttttattcaaagagcaaagatttgacaatgcatagaattaacattggtttgtgggccaccttctgggccagcaccaaagactgaaaaaatattttgccccctaaaagttgttattgagtcttgtcaaatcacattgctctgtcagaaggtaagacaaatcagtatggactgagagcaaggtcagcaccgtgaacagccattgcggttcctttaacccactgggaattcatgcagtgaagaagcaacacaccatgaggcaaatggctcaaacccaaagaccagaggttcaggggatacatatatatttttttttaatctgtagagatgggatctcactatcttgcccaggctggtctcgaactcttgggctcatgctgtcctacctcagacttccaagtagctgggttttctttgggctaattatttttttgtagagatggaggtctcgctctgttgcccaggctggtctcaaattcctggcctcaagctctcctcccatctcagcctcccagagtgttgggattacaggcatgagccatgtgcccagtctagaagatctttgacttcaaagaacagataatctagagaccttcacaagtgatcatgttggcactatggtcattacactgagacctataactgggctaggattggttatttacagaaaaaccttgtggtacttaattccaattcatgttaatttatgttatcttgcttaatccttgcaaagcccttttagaggtgggtgttatcccatctataatctgctgcttgtcttagaccaaggaagtgaaagtattcagtccaagcatgctaccatccatttctggtaggtttggtttgtttttagttggctttcctgtttaactgttatttgtcttcctattgaggttagatgtgcattttggaattgcatcattttacatagaaacagctttccagtggagttgactagcatcctaaggacaagtacaaccacttttgaaatagatcatggaaatcacaaagtctgatgttccacaaaatggagtatgatgttatggacactagaaatacaaggtatgggtcattagtaacgctaataacattttcctatagatgacttttaataacactggtttaatgtcaatttttttttttttttggagacggggtctccctctgtcacccaggctggttggaatgcaggagttcgaacttggctcactgcaacctctgcctcctaggttcaagtgatcctcccgcctcagtcccccaagtacctgggaccacaggcacacgccaccatgcctggctaatttttgtatattttgtagagatggggtttcaccatattggccaggctggtctcaaattcctggactcaagcagtccatctgcctcagcctcccaaagtgatgggattacaggcgtgagctgctgtgcctggcagaacagtatgaagtgttaacgccaaaatttgttttagctatcatatataaatcataagcatattatttggttggttggtgttagctcattccttcaatcggatgatttaaaataaatgtttttcaagtatcctctgtgatgtatcccaaaggttagcttagaaagaaaagtacttggtgaaccattcctggtgcggagagccctgtttctgctgggcttctttggcttgggccgtttcaccatctggggtcctaaaaacaaaaaaaaaggtttttttatatggttttgaaaactatgcaagaagcagcttaatacccaccatcttttcagggaaagataactgcttgtttactcttcaaaaacacccaaatgggactggccaacattagtagtgggaaacaaattgtaaaggatggggctggggagggagtacctaatcctcattttgaaaacagaaggttcaccattgtttggttctccattgttcctttgagacttagtggttgtagctctaataatgcaggattaaccaaacctacagatcaagagactttgtttttattttttgtgacagagtctccctctgtcacccaggctggagtgcagtggcatgatctcggctcactgcaacctccagcctcctgcgttcaagcgatcattgtgcctcagcctcccggggagctggaattacaggcgcataccaccacacctggctaatttttgtattttttgtagagatgggtttcaccatgttgcccaggctggtctcgaactcctgaccttaggtgatccacccacctccatctcccaaagtgctgggattacaggcgtgagccaccaagcccggcccgattaagagactttagaattccaaggtgatagagtaaatcttgaggaataatgttagtaataatactgaaactatattgaagatttttgtgccaagtcctgtgctaagcacatcctatggattaattcctttagtctcacgtcagtctgatgagataggtgctgtattatcttaattttaaaggcaaggtatatggagacctggagaggtcaagtgacctgtccaaggccacagagctaagaatgaggaagactgtaatttgaattcagacctccagaccagatggagtccaccttttgtataacccatgctgaagttttcaggtaagtgattcagtgtcccttgtctaatcatccatgaaaaaaggccttctggaatttggtaccaggtgctagaaagaatcctacttcccctcttatctacagggaaatagaataagggcccctgtccccaacatcccccaaaccttgtggcagtttttgcatctgtagactggttgggtttgtaggtccggccacagctggggcttgggtccaagctgggtgatgtagttattggaggggcattaatcctggaactcagatcgccactcagaaagttctttgcataggaggcgaggttcggcacgctgaccacgcggctgggcacgtcctccaccttctttttctgtttgtattaatggacaggttagtgcaatgcaatgcaaaaaacaaagcattattgtaaaagcaaataatgctcacccaatcaaaattgtatcggagaagaagcaacaatttcatttatacacttacatgctattttttaaagcacttttccctccaatcttcattttgtattataaataaatatgtatgttcacaacctcttaaaaaaaaaaaaaaaaaaaaaaaaaa

SEQ ID NO: 28635 - DNA, 4399 bp, Homo Sapiens
ggaagggagtgttccgtcgtttccgttgccggctgtttgcagtggggaaaccgaggcagctcctgctccccctagttcttccgctcctgtgaggaaaaaaaaatgtttatttctttgtgggagttcttctatgggcacttttttcgattttggatgaaatggctattacgacagatgactgggaagtgtgaattgcagcgaatatttgatacctatgtaggtgcacaaaggacacacaggatagaaaattccttgacatactccaagaataaggttttacagaaggcgacacatgttgttcagagtgaagtggacaaatatgtagatgatattatgaaggaaaagaatattaaccctgagaaggatgccagttttaaaatatgcatgaagatgtgcttactgcagataactggttataaacagctgtatttggatgtagaaagtgtgaggaaaaggccatatgattctgataacctacagcatgaagagctactcatgaagctttggaatcttctaatgcccacgaagaagttaaacgctagaatctccaagcagtgggctgaaattggttttcagggtgatgatcccaagacagacttcagaggcatgggcatacttgggttaatcaatcttgtgtatttcagtgaaaattacactagtgaagctcatcagattctttcccgttcaaatcatccaaaattagggtattcttatgcaatagttggaatcaatcttacagagatggcttatagcttactgaagagtgaagctttgaagtttcatctctataaccttgttcctggtataccaacaatggaacactttcatcagttttactgttatcttgtctatgaatttgacaagttttggtttgaagaagaaccagaaagcattatgtatttcaatttgtatagagagaagtttcatgaaaagattaaaggacttttactggattgtaatgtagcacttactttaaaagtataaatcatccactgtatcttctatttctaccacattttgcacattcaacagaatttatatgttgtaataggaattatctgatcaattacactcttatatataatttcctacaaaaatatttcagaaattctatttaagaaagctagtggacaatcagtgtatgtttacaattgtttatacactgttctccaaaggtaccttatccttccaaagatcccctctgtagagtcatgcgaactacagtttggaacttgggacttagcccgttggtgtaaaagtataaatcaggtatttgtattaaattgattaaaatgtgtaaaatcaattttcgtttttatgtgttatagggtcaagttggtatctttttcaaagctctttaagatttttttggtttttagtttggaaatggctgtttttaattttctttgtctgatttttatttctaggttaattaacagcaagtgtttctttatggttttctttgtttgcatcttaattacatgtcataacgttgcttcattagtagcaaatagagcagagatacagcagagagaataaagaattagggcctccttttgggtttctgtgattattgagcataactgatgagagaatgacagtattggtgactagcttttttgtttttaaataacacactttaaaatgccacagtgttatttgaaagcttaaaggcattttctcatcttcagtatttgctttttatcagttgtagaaaagaaccttagtgttttcttctctacctatgtatgcttatgaaaccgctctacctacatatgaaacttctctacctatgtatgtttacgaaaagagatgtatttgccaagaaaatcttgattatataaaagacaaaaagattataaaagacagtttctgtttaagtaaaactgtctttgaaacttaagaaagcttaagttttaaaaaaatctcagttaaacatcattggtttatttgacttactgttaactcttgcttctctttgactccatggtgtttttagataaccatgtatgaactttatgttaatggtttgtgggatactaaaatagcttgaagatgacttgatgactgtgcattttatatagttttattctcctaaaatctcaggagggcagcaagtgctgtcaacgattatatagtgatgagatttttatgggaatgatttcttcttggtgcgttttacacatttgtactgatagcaaaactaaagtttaaagcagcaaagtttaagttctccttaaatcctacagaaaccaaccttttaaggacataatttcatctaaaacatgacgatatttagcacaccttttaatgtgggtatatatcaagtgtttaaggactggctagtatgtgatagagcaagacctgagactttataagtatttgctcgtgtctgttgacagacctctttctttcaaacttgttagaagagtggtaagacatatccaattggaaaataagatgcagtgttgtatagcacatacatttaaagtgcttgcgttaaaattagtttctcaataagataaaattattttaaaaatttggttcactttattacaatagtggcaatttagcttttcagtattacaggaatttaaaaattggtttcttgtaggggacatctcaactttgggaatatcttcacttaatttttaaaaaatattttcatgctttattgtccagctatacaatatatcgcaaaatcctgacaagttcattgtattaaggtattaactattacatggaaagcaattctgttcatcttttgatgtttgtgttgaaaatgcttatctttgtgttttgatcttccaacagctgagagcttgaactgatttaaacatttgtcaatatacttaagaatgctttaagtaaagaaggggaaaattttaagtaagttttttcccttctaggaagaaaaactatgatgatgttaagaaaatgtcattatagagcttgctcaataatatgttctttaaatccacctccatttgtacattataggtatcattctgtttttgcttaaaataatctgcaaccatttcagatagttttacagcaaattgatctaaaagccactaataaattctagggtttgagtctagaagccaagcaaactgtcaccaatgtcagttgtaaattagaatgcaacatgaggcttcagactcatgacaatgatatacatgaaaacaaaaatataattgtgtctaccttcctactttcccttttgacatatgtagttggaattttacatagtcttaaaatccatatttagaatcttacctgtttctataataattagtaaaatgccaaagtagtgatagaatattgtggcattgaagtagccgaaaaattgttagttttagcatcaaaaaagtaaatagatgttgaaatgaatttttgtatgtgccaggttgaagagagtgtgccagtgacaggaagtagtctaaaaaattaacagttatggttttaataggatctgaaagacaatctttaaagaaatgggagaaattgggggtatcagtgaacctataccaacctctctttgtacataaatatggtgatgtagctagatataaaaatcagtgtcttactggcaccatttacagtttagaaaacaatctttttcttaaaaatgcccatctgatttctatttttaggagctacttggatttgtatgtattttttctacgtgaaaatatatgtactcttcacttttgttccagtactataattgctcatgcactctttctcccctttgagaacattcagtgaaatacaacttcatcaaagatttgctcaaaggagaagaatcgcatgagtgtgaaaagtagatgctcgtagccagaacagaaaaggttacacatgatcatggcacagaagataggaggtttgacttggtgggccataatgtttattatcctttttgaaataacagggaccagcagcagttttctcaggataaatgctctaccccacttctctatgaacaggtgtggggaggcttactttccattttcatatttatacacctctctacaaaagcaatttttaatgaaggttagtggaattgttaaaaatctgagaggaatgatgactggaggtgtttggggtttttttctgtattcattttttaatgagaaaagttttaaatgtagtacaggttagacccaactactaccttactattataggacgattctatgtttctgttaaagtattcaagtagctttctctgggggaaaaagtaccacttggacacttaaaggaattgggatttttgtctactttggataaggcagttgacttcttaagtaaaagcaatagtgtaaaatgtcattttgtttggaatgttaagtgagcaaataaaaaacatgttgaaattgtaaaagaaaaaaaaaaa

SEQ ID NO: 28636 - DNA, 2456 bp, Homo Sapiens
ggccttggcttcagctgcggttttggggtcccggactctgggatcggcggcgctatgagttctttcgaggggcagatggccgagtatccaactatctccatagaccgcttcgatagggagaacctgagggcccgcgcctacttcctgtcccactgccacaaagatcacatgaaaggattaagagcccctaccttgaaaagaaggttggagtgcagatgaggaaactgaggaaccagagaggttaaattagttgcccagtgtcacacagccagtaagtggcaggaccaggattccagccagcttgaaggtttatctatactgttcacctgtgactaaggagttgttgttaacgagcccgaaatacagattttggaagaaacgaattatatctattgaaatcgagactcctacccagatatctttagtggatgaagcatcaggagagaaggaagagattgttgtgactctcttaccagctggtcactgtccgggatcagttatgtttttatttcagggcaataatggaactgtcctgtacacaggagacttcagattggcgcaaggagaagctgctagaatggagcttctgcactccgggggcagagtcaaagacatccaaagtgtatatttggatactacgttctgtgatccaagattttaccaaattccaagtcgggaggagtgtttaagtggagtcttagagctggtccgaagctggatcactcggagcccgtaccatgttgtgtggctgaactgcaaagcggcttatggctatgaatatttgttcaccaaccttagtgaagaattaggagtccaggttcatgtgaataagctagacatgtttaggaacatgcctgagatccttcgtcatctcacaacagaccgcaacactcagatccatgcatgccggcatcccaaggcagaggaatattttcagtggagcaaattaccctgtggaattacttccagaaatagaattccactccacataatcagcattaagccatccaccatgtggtttggagaaaggagcagaaaaacaaatgtaattgtgaggactggagagagttcatacagagcttgtttttcttttcactcctcctacagtgagattaaagatttcttgagctacctctgtcctgtgaacgcatatccaaatgtcattccagttggcacaactatggataaagttgtcgaaatcttaaagcctttatgccggtcttcccaaagtacggagccaaagtataaaccactgggaaaactgaagagagctagaacagttcaccgagactcagaggaggaagatgactatctctttgatgatcctctgccaatacctttaaggcacaaagttccatacccggaaacttttcaccctgaggtattttcaatgactgcagtatcagaaaagcagcctgaaaaactgagacaaaccccaggatgctgcagagcagagtgtatgcagagctctcgtttcacaaactttgtagattgtgaagaatccaacagtgaaagtgaagaagaagtaggaatcccagcttcactgcaaggagatctgggctctgtacttcacctgcaaaaggctgatggggatgtaccccagtgggaagtattctttaaaagaaatgatgaaatcacagatgagagtttggaaaacttcccttcctccacagtggcagggggatctcagtcaccaaagcttttcagtgactctgatggagaatcaactcacatctcctcccagaattcttcccagtcaacacacataacagaacaaggaagtcaaggctgggacagccaatctgatactgttttgttatcttcccaagagagaaacagtggggatattacttccttggacaaagctgactacagaccaacaatcaaagagaatattcctgcctctctcatggaacaaaatgtaatttgcccaaaggatacttactctgatttgaaaagcagagataaagatgtgacaatagttcctagtactggagaaccaactactctaagcagtgagacacatatacccgaggaaaaaagtttgctaaatcttagcacaaatgcagattcccagagctcttctgattttgaagttccctcaactccagaagctgggttacctaaacgagagcatttacaatatttatatgagaagctggcaactggtgagagtatagcagtcaaaaaaagaaaatgctcactcttagatacctaagaattcaaagcgtttcaacctagagcaaccactaaaaaacctgcacagagatgacagtcaatattacaatagagaaaatacagtacttaaaaatgttcaaataacctggttgggtgtggtggctcacacttgtaatcccagcactttgaggtgggcaatggcttgagcccaggagttcgacaccagcctggccaacacagtgaaatgtgtctctacttacaaaaaaaaaaaaaaaaaa

SEQ ID NO: 28637 - DNA, 3945 bp, Homo Sapiens
cgggatctcaatcgacacaagctctcccattcagatgagaaaccctttgagtgtcctatttgtaatcagcgcttcaagaggaaggaccggatgacttaccatgtgaggtctcatgaaggaggcatcaccaaaccctatacttgcagtgtttgtgggaaaggcttctcaaggcctgaccacttaagctgtcatgtaaaacatgtccattcaacagaaagacccttcaaatgccaattttcctccctcatgcagacgtgcactgctgcctttgccaccaaagacagactgcggacacacatggtgcgccatgaaggcaaggtatcatgtaacatctgtgggaagctcctgagtgcagcatacatcaccagccacttaaagactcatgggcagagccaaagtatcaactgtaatacatgtaaacaaggcatcagtaaaacatgcatgagtgaagagaccagtaaccaaaagcagcagcagcagcaacaacaacaacaacaacatgtgacaagctggccagggaagcaagtagaaacactgagactgtgggaagaagctgttaaagcaaggaagaaagaagctgctaacctgtgccaaacctccacggctgctacgacacctgtgactctcactactccattcagtataacatcctctgtgtcgtctgggactatgtcaaacccagtcacagtggcagctgcaatgagcatgagaagtccagtaaatgtttcaagtgcagttaacataaccagcccaatgaacatagggcatcctgtaactataaccagtccattatccatgacctctcctttaacactcactaccccagtcaacctccccacccccgtcactgccccagtgaatatagcacaccctgtcaccatcacatctccaatgaatctacccacacctatgacattagccgcccctctcaatatagcaatgagacctgtagagagcatgcctttcttgccccaagctttgcctacatcaccgccttggtaaacagtattataaaatcaaaatatgggtaaaagtaaatatttaccagcaacttaacttttagttgattaaagcaaaaagtaaaccatgaaattgggagattttattacattagttaataagagtgtggtagcatttttctccaatttggctgggattattcaaagttgggtgtgtatgtaacttatcactggaccactttagtttaatcagaaattccttttagctgacaacattgcttaaacaggatagtagttggcaagatgaaatgccagaattaaaaccaatcataagtagaacccacttcaaaataaaaaaacagcattactatttctaatcccaaggaatcactttattgtaaacactagcagaactcttctccctatacaaggtggatggctgattttaacctgaaattttaaatccacagattgagagctagtgtagaattgtctgtgtttattgtttttatgagtaaatacatgcattgtcataataaaatgcatttcagagaatatgcattttacctttgggaatatgttaatttcaggcagcattccctatgggaaaggtgataccagctctgatatgcaaagcatatgataatttatcattctaacttcaacgtataatagggattgtgacctgatatttggagatgtaaatattgctcagcatattaatcccgatggaatatagcattgtagttgactttttaaaaaaaaaaaaaatttaaaaaaaatctacaaattgtgttttgctaagaaaagcctcaactgacagaggagaagtcaagtgtgtggacaggcaagctcctaataaacagagtccagtgggattcctatttaggagccaaggagtactttggaacagtacaaatatattgctttaaattggaagacgctggaggcactgggatgtgatatgcccctctctctcccaatcagagcctgttgatattacaacagggacagatgtgttagttgctcactagagtttatgtcttatattaaattgtatacagtttttattctaaccactaactaggtagtgtatgccccttcagaacatgcagagtgtatctttttttaaatttctccttccgtttcttaagtattgcgcagatttgttcaactttgtaaatatggacatcactttttttttctttgagaaaacacttgtatcagctttgtggtgttttcagggagacagctgtctgcattccctgtagaaacccagcaatgattatgcacgttgagacatgtgctttttatttcttagcaagatattttatctctgtacataaagtagaaaccaaaagctagggaaacagatactctttacaccatcatgccacgcattgtttttaaagcattgcgttaaaaaaaaaattaactaaaccaagatgctgtgattttttaagttgcaatatgtttttggtttttttcattttttaatcattgcagttaagagaaatggaaattagttgtgttaatcttgcagaatgtttgcaggactgactatcaaactggatgatttccatttataccctactgtgtcagttcaagcatcaaaataccttgcatctgagacagacttcctacatcagggacaggtatctgtgtgtcattatacaaaacagttctagggggttgaactacatagtaaaaaaataaaataaatagtacttagtgtaaaataattttataaatgatcttttgtactttaggacattaaattgtacaacttttgtatatataaaagcttaggaactttctgtttagcaggaaggcaacacattcctacacttttaatgtatatgtttgttataatgtccatgtaaacatgccctatgtttgtgccttttaattagtttgtctcaataaacaaaatgtagagaaaaatatgtagctatgactttgttacaactgttcttatccacagtacaaaaatggtttgtttttaatatgtagagcattatgtgtggactactggaaggactcgtgtagggaaagcccaagaatgaccttgctgaggcctggattgggaggcacagtggccacatttggaggaagttcacatttcctggcatgcagacccaaaactgggttctggctctgcctgctgggatctgttatctctggtgggctggcagtcataattcacaattcagacagcccaggcttcctccacagtggtccaaggagcagtcctcagtgggggcaggtgtgggccctacccctaagctagaatgtggttgtcagaaccctgaaagtattagttctaaaaaaaaaaagatatatactagaagtaattgttttatcaattcattgtataataaacaggagtgagacttcattgtatgacttcagttaaaatactattttgtatgcattctttattcacttaagaagcttgtctgcaataataaagccacgtcatgtcttcttttgggagggagagagtcgatggcaggagggggttttgggtgggccactgaaaaggggtaccgaataggttgtgtgatgaaattctgtgtcttggaactggaattgagtttcgatgttgatgaactgattcaaccaggtgttgaaggcacgacagccactgctctacgaaaaggcagagtacgtttttcccttctggttgtaacctggttgagagcttcccctttatcagattggcagctaaacagttgtattagataatccttaaatctgacatccagcctgttacgctctagggctcgctgcttggcctgcgtttgctttttattgtgtatccgttcccctcctacggtgtgctcctgaatgaaggtttctatgtaagcagatgatgattttacctgtcaataccagcactgtattactaacatgcaaaatactgcagatttattttgaaaattaaagttaactggtcacaaatgtaaaaaaaaaaaaaaaaaaa

SEQ ID NO: 28638 - DNA, 2083 bp, Homo Sapiens
ggggcttgcaggaccctgaccccaagatggcggcgcccagcgaagtggccgcgatagcccctggcgaaggcgatggcggaggcggcggctttggctcctggctggacggacggttggaggcactgggagtggaccgagccgtttatggagcctacatcttgggtatcctgcaggaggaggaggaagaagagaagctggacgctctgcaggggatcctctctgctttcctggaagaagattccctccttaatatctgcaaggagattgtggaacgatggtcagaaactcagaatgttgtcaccaaagtgaaaaaagaagatgaagtacaggccattgccaccctaattgagaagcaggcacaaatcgtagtaaagccaaggatggtgtcagaagaggagaagcagagaaaagctgccctcctggcccagtatgctgatgtgacagatgaagaggattctgttccgaaacaccaatgtggaagatgtccttaatgcccgaaaactggagcgagactcacttcgggatgaatcccaaaggaagaaggaacaggacaagctgcagagggagagagacaaactagccaagcaggagcgcaaggaaaaggaaaaaaaaaggacacagagaggggagcgaaagcgataaccttggcctactctattctttccccccatgaacttatcaaagggagaactggttgtgtatttaagagaaatgagagtgcattgcaaagtagtttcccaaggcatttcccctattgtttacatggtcaaaaggaaaatcaaaatcacttctaattacaaaatgtgctgttttggtggggtgggcaatcagattattatagttgatgactgtaccaaagatctggaatgggggccacctttatattttaatactcaagtcctgtgctccttttggccactttaaaaagtcttccctcaccttggataaataggattcagaaagctaacagttttcattctgaaggagcagaaacataatcaatccctccctgagataaaatgtgggcatgcacattgctttggagtcagtattcagctgtaagtgtagtattgttttatggctgaaatagaaagctaatgaagaggcctacctggatccagattttatgttaacatggcagcaaaactaggaaaatgggaagaaattacttgcggggtgttctagatctgattttttttttttttttgaaagtttcagcctgtgggaggaaaagaggtatcttttaaaatagagatagttacatattttcctcatctaggctgtgtcactattgggtgcaaggatatcattgttggctagattcattttgtataatcatgtatcctcttgtgtgctggtagagattttaatcctgatttttccataaaacatgagtattaagaaataattcctggtttggagaaactggagaaatcacccttttaaggaagaaacactggaaatttctgctaacaccaagatatttaagagtgtacatagtaggtgctcaacaaatttattgaatgaatgagtgaatggaaaaactgggagagtcaaaagtgagcagaagctctccatttctacttctgtcacaaaccacattaaattgtaaataaggcccttctccacttgacttcaggcagcagattgtctagaagcctaaggacagcaatttctctgacaagacaaagtagatattttataccaggggttggcaaactactgcccacgggccgaatttggcccagtctgtttttgtatggtgcaaactaaaaatgatttttacatttttaaagagttataaaagaaaaaaatatgtggtctgtgaaatctaaaatatttactacctggcctgttggaggaaaggtttgccaatctctgttttataccattaactatgagattaacaaaaacttttacctttgtgcagaaggttaaaaaaaaaaaaacatggttaaggaaaaggagacatgttacctcttcatacactcctataactgtggcattgcaaaaaataaaaataaccacctttaaaaaaataaatcttatttaaattgcaaaaaaaaaaaaaaaaaaaaaaaaa

SEQ ID NO: 28639 - DNA, 4746 bp, Homo Sapiens
taaaactattaagaaggaacttgaagtagtacaatgtaacgataattatgaacatcctttctgaagctataatattgtcactagacatctctgccatcttctaataacattgccctttcttccactgttcaaacacctaactgatgaaccccagctgtctgctctcagaagtggatgcaacaccatgagttaagcaacacctcgaacccagcagttttggaattcacttggatgcactggaagagtcgtatttccaagtttacagggtcacgattaactagtcttattaccttttggggatggacagctaaggtatttgagatgaagaaagataaagagtgtttggtagtgataggatttggagatgcaaacttcgacatctaaaatacagaaaattaacaaatactatcttttgaagtccttgaattgggaaattaggatgtcacagtaaagtgacattaagtgcagaagtgctctggttttctggtccgcagcagagttcacttgggtttcttcgtgaaagtacatgaggctgattgccccgaagtcacttcctgcagcatgtccttcaccccgggcttaccctgttgagtcgggggacccagcaggcggctctgcccctaccattacctactgtgtctgcctctcacagtgccccagtttttgtctaaaaatgaagcagaaacaaagctggctgcgtggctgtttgaggacttaggagctgttgtccggcaccccataccatttccctggggagggctcagcactagctgaaatccactttattccggtgtcggtggagtttctaatcagaacaaacgcctgccgccctcacttccgtttcagctggcgctcacatgggaagggggtgcacgctgcccagtggtggaatatttaaggcatcgcccttcagggagccgagcactgatttccacagccgggggcctgcactccacttttgaccatggggaaggaggtctctcttccgtggcccaaggacttctgaattgtgttcttggagaggaagcgtgctgggagcccagatagtggggctgagacactgtgtctcaggcacagaggtagtcgtgtcccttgtcccagatgaagaaagataaagagtgtttggtagtgatagatttggagatgcaaactttgacatctgaaatacaggaaattaacaaatactagtttttgaaacccttgaattgggaaattaagatgtcacagtaaggtgacattaaatgcagaagtgctccggttttctggtccgcagcagggttcacttgggtttcttcatgaaagtaaatagatgaggctgattgccccgaagtcacttcctcgtgacttcgttcagggctcagttcagcgctccctgaactgtctgaggagctggagttgctccctccgcaggcacgtttctgcctgcaggtttatcctgttcagtaggtcagggtttgttactgacaaccatgacctgctgtgagcccttctgcgagtgtggagctggggggcaagaagggcagccttagctgtgccaacgcttcgtcctgtcaggtaatgaggaggggccgggtctagaaacggaggtcgtgttcaccttccgatgtgggaatgggaaagcatttgctgttgttgttgaaacaatttcgctccgtctcccagcctgggagtgcagtggcactatctgagctcaccgcaacctctgcctcctgggttcaagcaattctcctgcctcagctgttctagtagctgcgactacaggtgcataccaccatacccggctaatttttgtatttttagtagaagcagggtttcaccatgttggccaggctgggctcaaacccctgacctcaagtgatctgccacctctgcctcccaaagtgctgggattacaggcgtgagccactgcacgtggtgggaaagttttgtggctatttttcagtgattttttactacctgttaagataccagcgatctttttcatactagtttggccccaaacaaaacatcagtgtctcctgacgcaggagaagtgacacctgttctcctgtacccagtggatggaagagctaagtgggcagacactatcccagcctgttagggctgctatagccaaactgaaagcgggcgtgttatgaacaacagcaatgaattcctcacagttctgctggctgggagtcctgcgtcagcgcactggcagactcggtgtctcgggagggcctgcttcccatttgtagacggccgtcagctctcgaggggcctctgttatgagagcactgattccattcacactggctctgcccctgtgacctcatcacctcccacaggccctgccttcagttaccgtcacctgagggctgaggattttgacaggaatttgggaggacataaacattcaggccttagcaaatgtgttttattttccaactatcatcaattttaaaaaatcagaatcgtgcttggtgtaatcacattatatagaattacatgttcaaagttatatatgttttttggaaatcacattctaattggttggttggttggtttatttatttatttatttttgaggcagagtctcgctctgtggcccaggctggagtgcagtgacatgaacatagctcactctaggcccaacctcctgggctcaagcgatcctcccacctcagtctcctgagttgttgggatgttgggactgcaggtgtgccccaccacgcccagctaatttttaattttttttgtagagaccgggtgttgccatgttgcccagactggtctccaaactcctgggctcaagcggtccttccaccttagcctcccaaagggctggtattacgggtgcgagccactgcgtccggcctggaggactcctgtttgaagttgtgtcagaaaaagaggaagagtcttctgttagaaacagaaagcccttctcttggagataagccttgtaaaaagctacaggccagggagaatttcagggtcagattcaggagttccttaaatgagtttggttttcctcctgtctttcacatacataggggatgaaataatacccaggtcatcaaagtctgtgaaaccaactgcaacaggacctctgattcttcccactcagagacccacaagtgccactctgtttttggacaacggtcaacaagcttcaccgccaagtgcctgatttgtcaaatgagagctttgtcgtttcttcagatgctgaccagtatctgaattcagtatctctgaattacaggagaggagaaaatagatgaaatactgctgtcagtaccacggttgctggctcttgtttagcttctgagtcagctggggcacccctgccatctgctctcagtgtggggctgggtgtccctgcaccatggaacaagggcaggtcgtgtcttcccggaaggcccagcacgggtgaagatttgggggcagatttataccaacatacactggtctatacattggatatgtgcaggttcccattcgtttcctggggagccatgtgtccctgaggccagagagtctcctcacccagctcagactgaatgcttttgtttttgtttcagggcatttgcacgccaaaggcaaagaagaaaaaatgtccaaatcattaaagaactacattactattaaggactttctgaagaccttttcccccgatgtcttccggttcttctgcctgcggagcagctaccgctcagccatcgactacagtgacagcgccatgctccaagctcagcagctgctcctggggccgggctctttcctggaggacgcacgtgcctacatgaaggggcagctggcctgcggctccgtcagggaagcgatgctgtgggagaggctctccagcaccaagagggccgtgaaggcggccttggcagatgattttgacacacccagggtggttgatgccatcctgggccttgcacaccacgggaatggacagctcagggcgtccctgaagaagccaggagaaaggccagactgaagtgacctgctgaagcctttgtcttttgacattgaattccgtttgcccactgccatcaagactgcttttaaggagcttctgcgacatgatctcttacaggaacctgaagggccgagaagtcctgctgtgtttggtgccatcatctcttactttgaacagttttttgaaactgttggaatttctctggcaaatcaacagttggcaaactctcgtgcgcagaaccagagatgagtccatctcagcaacagaatgtcgccagctctgcacacacgtttatgttcaaagactctcagaatgtgcagaagtcacaggcacatacgtttcaggagacggcagcgaggctaccttgcatggtgtggtggacgagctggtgcggttccggcagaaggtccggcagtttgcgctggccatgcccgaggccacgggggacgcccggcggcagcagctcctagaaaggcagcccctgctggaagcatgcgacaccctgcgccggggcctgactgcccacggcatcaacatcaaggacagaagcagtacaacatccacgtgggaactgctggatcaaaggacaaaagaccaaaaatcagcgggctgaggatggagcacagccatgaacctgctcacgacaagacgcacccatgcttctcagggtcaaggctttatgttaaagcttcctgtcggggctgctaggtcagcattaaagtaaggcaaccaacagtgaaaaaaaaaaaaaaaaaaaaaagaaaaaaaaaaaaaaaaaa

SEQ ID NO: 28640 - DNA, 5038 bp, Homo Sapiens
cataaatcaaagcttgattcactaagttgagtccttttttcagggttatttatttttagaaataaggaagcacaaatgaactgctttgtccatagagaggaaagccaggaagtataaaatgccattagttacctgatagtcatcattttaccaagcaaagagaaggcagttttcaggaaagcatatggaatatggctcttgatggaactacgtgccacttgaaggatacactggataacccagagggacgattcacaaccagtgcagctgtaaacttttcttttaattaggtaggaagcacctgtgtgttattcatcgtttttcctcttcccagtccagtctcttcagggattttaaaaaaagaaaaagacccaaacaatttggaatttaaattttctgtaggagaaagcagccagtgtctaaaaaggggcaagtgtgcagatcatctgctggaagacaaggtgagaagagtaacttgaacgggtgtgaattttagagggcaaatgactgtgcacattgcaaggtgtttggcatggagcgatgtgttagcatcccgttggtgtttggatttatgcttctgaattgagtatttaaaaatatttaacagaattaatgctaaatatgtacaagctgctgttcaaatgtgaacagtcctagcatttgtatctcctgtgggctctgagcattaccatgagatggcaccagcatcctttcatgacctctgtgtggcaagaggctaagtgagactggtcatatgattagcagtttcttgcaagggactgatcaacatcatttaccacacaatttgcctaagagattgactttgtccttgaatgagttgttctaaatgtgcattataatgctagcctaaatatgctttgtaaaaaaattatcaactatcatttattgagtgcctactacatgctgagagctttacaaatttattcctgtgtaactttcactactatcccaagggggtgctattatcttcattttatagatggggaagttgatgctcagaaaagtaacatatcttacccgaggtcatgcagcaggttactctaagcaattgaactctgttgtacagtgctgaaaccctttgtatatgtacatatatcctgtaaatatccatccaccataagcaaatttgtttggcacatttgggttgatactgttctcaactttgtgatttgtaaatttaatatgcttattaggcatttgtcgaacattaggctcaaatcctcttaaggatggtggccttcccagagctctcaaactggtagcctgtgggctggatttggactgcacctgttttgttttgtctgaggggagctagagtcagcactgtgttttaattgaattgagcgtgaatgccttgaggcttggcttgaactctcaggtcccctcttagtctccataattctctactttttcagacattgtctgcttcactagttgaggttatctgcatggcccctgatggcatttgaatttgtgatgaaaccaggaagtaccccagtttgaatgtgttcatttgtgggttcagattaattagttaacagatcgatctttgttctgaaataaatgttgctggatttatgttgctcactatgcaacagagagttgacttttttttccaggcttttcacaggaggccctctgttggtagaagtccccgccgggtttatgctggctgagtatgtatgctgacctgtggatgtagtcatatggtgcatctcttgaaggctgatgtttggttgattgtagtatgccctgaggtgattttgatcatgaagctaaacctaatggagaaaacatgaaagccaattagttgttaataagcattaggggagaaagcagggtctaagatcctcttttcttccttctttgtctccctttgtcctttctaatggtctctctgggtttaaagcaattgctttctgggtccatgtgagtgttttctaaattgccaagaatattcaggagtgttagaaccccttgaattgaagataaagaccttgggatacacagtcagtggtagaattcctccatggtactctactcacattgccttcaaaaaatacgatatgttccgaaggaatttctcctccctgtatttcctctgttaactgtcttctgctgtgttttcagtttgttttctgtggaacacctgcctgaaggatgctctttgcaaataagtttgcaaaatgctttttattccaatactttgttagggatttgaaaggcatctcatggtaaatgctccaagcagtactgtgtttaaggaacctgttttgcccaatgcagcatttcccaaattagtgaactaacagaaccctttctggaatctctcctttctgaacactacctccccatcttccgaaacaacctatacctattagctttctacaggccatactttggggttgcctctcccaaatttaggtcagaatttaggtagaaattacctgaaagcattgaaccatgttttggattttttgggggggttggggaggaggaataatcctaattccatctaaatgcaattttgtcaaatatgaaaaaatggttctcaaagaattgaacttcatggcttggaagtgtttatttattattttttgtttgttttttgagacagtcttgctctgttgctcaggctggagttcaatggcacaatctctgcccactgcaacctctgcctcctgggttcaatctccgcctcctgtgcctcagcctcctgagtatctgggattacaggtgtgcaccaccacgcctggctaatttttgtagtagggttttcaccatgttggccaggctggtctcgaactcctgacctcaagtgatctgcctgccttgcctcccaaagtgctgggattataggtgtgagccactgcgcccagccccttatggcttggtagtatttaaagagatcaaactagataaaagtttactttattcttcatgatgtctgataggttgtttgctgatataggtgctgtgtctggttttcctttcatgacttgtacctagtgtagctatttatagtgtatttgacaaacttttccacttgtagactcaggtaggcctgcttgacctcctctggggatatttgttaatgtcttgtcagagttgataaaattttccatgttcatgctttcttttgattctcataataatcttctaaggtaactaaaaaagaatccttattttcacatttgattaaggaagctggtcctaagagattaagtcacttggtcagggtctcttggtgaggtacttaagtgaaattggttttccaggtgctggtcttccttttccaaactaatcctactttgcgtgtgacctgaaaaacatttttttgttacctgtttttgtttgtttaaacatgtacttgtttattagacgaaacagggagcccaaataaaaccagatgtgagctgcttttaaccatccctgaatcgtaatgatccatgtgtgaattatccctttgtagctagtttttaatcccagactgggctcttccagtttttcagcctgctgttcaagtctccccagcccctgacttggttttgtcagagcagattagagagaaattctacagtgcgagaacacgatgtgtatgatttaggaagcagaactcttttttttttttttttttttgagatcagagttttctttgttttccatttacctgaagtaatgcattgtttcatttaaacttaaatagctttcaagattgggttcatgaacatgtcagtgggcagagtttcatatctagactcgagagatgacaaaataaatatgtctaagatagaattattttcacacctgccttttccctttcaagttctatcatcagtgattgagaatttaggctttcaagggcacacttggatttaaatctcagtttgtccatttagtagctgtgaatgcccttgggcaagttaatctctttgccttggactggttatcctccaaatgggataaccctacctataatgaggaatgaaatgcagtaacgaacaggaagccactaagcacagtgccttacacagaaactttaataatagataaaaatatttgtatcaccttctgggtgccaagtttgatgctaggaaataatccaatgggctataaaagtatgatttggtaatttgtttggagcatgggtaaatgaaaacagtaagaatacataataggcttatataaaagttttgaagagagagcggttatgctgttggggtgtggctttgaagggcttaaaaataatcaggggtgttgagttttgatcccaaggtttaagaatgactttaataagcatgcaagttaggatatagtttggtcctaagtgcaaaaaaaatctaccctgaatccaccctaagcagaaaataaatttgttgtgaacaaacaatagatacatggagcagtttacaggatctgagaaacacctgaaaaatgggatcagaaaggtggacgctgggcagctctggggctgctggtggagggagctgaagccacatctctgtagagcgtcccccggaggatgagccaactccaacccttttctgtctttttctgcttgagattcaaattccatggacaaacgttcaaatgtcccagtttgagtaaaatgtctaaaccagcctatggagataagttattttcatttgacaaaactgggttgcttctatcagaaatggggaaaatagatgttggatagcaaaagtccaccatgtccaggccaggcgctgtggctcgctcttgtaatcctatcactttgggaggccgaggcaggcggatcgcctgaggtcaggagttcgacaccagcctgaccaatatggtgaaaccccgtctctattcagaatacaaaaattggccgggtgtgctggcgtgcacctgtagtcccagccactcaggaggctgaggcaggagaatcgcttgaacccgggaggcagaggttgcattgagccaagatcatgccactgcactccagcctgggctacagagcgagtctccatctcaaaaaaaaaaaaaaaaa

SEQ ID NO: 28641 - DNA, 4492 bp, Homo Sapiens
cactacactggcgctctttagagtacccagctaccaacaacccactgtcatttccatcatgctccagctctctcagtagctctctggaatcaatgttgtcttctattactcaatgagaatcttcaaggatgcaggtgttgagaagccaatctatagattagtgcaggagtggttaatattatcttcttgactgtagtctctctgtttgtggttgaaagggcaggaaggactttacatatgataggtcttgaggcatggcgttttgttctgtcctcatgattgtttctttgttattaaaggatgagtatggtgggatgagctttgtctgtagtggggctatcttggtctttgtggccttctctgaagttggaccagactccgttccctggaatactgtggccacactcttcagtttgcaatagcagtggctggttgctccaactggacctccaactttctagttggattgctcttcctgaacaattattatctagtttaagtgtgttgttgctttagggtcatggcatgcttatgtatttctgttaccatctgaccatggtactatgccaagttctcttaggggacctgaatctttccagtagaccacatttgagagagtatgagtcaactgggcatagttcccaacaacccaaaatacatacgtacttcactgaagcagatctcatgattccattgacttcatttctaaaattggactttgagcagccaatttctaaggattaaaaagaaactttaatgcattgtagacctctgtacacagaaaaatctttgtaacttttgggcttaattttcattcttaaaaaatctggtaactttttcaaatgcaaccactgtcagtttgctgtgaggctaggcaaacaacacaaggtatagaatttcccatcaccaccaccctgaccccgcgagaagattgccttttaattagagacttgtagaactagtgccttttaagttctacactcatcttttccaaagactattagtaaacttgccatgtaatttgacatggcagttccttgctcagctactctaaataaagttggaaattaggtggtctcttagtttgggtaaagtcagtactattgccagtaatatacatggtaattgaaagcccttaaagtggttcagattatttgccaaatattagactctataaaaatttctgaggttttttttcttttacctttgagtgtacatgtgattgctataatgtaaataccagtcccttaaagactgtttctataagcagaatgatgcagcacaaagtggaaaggttttcctcttattccagcagtattcttgccttcaaagagtagtccatcttgccttgatttttaaggttgttttcttggatggaaagcttaactggatagtaatttccatatgttctttataaccactctgtatattataagcaaagttttttcatattgtatctttttctgttgagcactttatgcattttagtctattgcatttgagaatgtagtttagaaattcactgtttaaagccatgtgaaaactgatagaggataatgaaaatgagtgtacattattttgaatttaacttaactgttttgtggtgggtgtgaacaaaacattagaaatatattatctttttgtgataatactctctgacctcacttaaagtgatctgccatgagatatccatgatcaagtttatgtttattctaatacccaaggaattcagccaactttgtttctatcatcagataatctcagaaaatagtgtgttttatctatattactgcctcttttcaatatttaagagaataattgtcttctggtttctactgagcctagtaataatcactaaagacctaaaaaaggaattccttctgttaagagtatttggatagcccattcacgataatggtggtgtgaaaatcaatcatcccagcttttctgacatatctaaattttgaataattaatttccacttccaaaaaattcaaatgttttctcaaagcagtcactacttatttgcattattcctgcatattcagtgaatgtgaggtcatatttggtattgtattagaagtagtgttggtcactggtcttgcctctttgaacattatttttatttgtaaaatgagggagttggtttgttatgatgggaaatgagtcagttttcagggtcctgagaaaattgcttcattcatggctgtgtttgagataactaaagtaaattttttttcaggtatttggtgtcatgttttggagttaatatttagtgcttatataattttaagttattacataatttttattggtatatatttgataggtactaggtattggattctcactaaaccagtagaatggtattctctcttaatatgtgattgcctgtaatggccaggtagatataccttaaagtaatatgaaaggttttatatgtatattaaaatgtttgtacttttaaatctgtaaaggttatctggaatttttactgtgttaacttcagaattatatgggcattatgactttttcattgtacaaaaaattattcataaatgttagaatacagatgttccttgacttacaatagggttatgttccagtagacccattgtaaattgaaaataccgtaagttgaaaatacatttaatacgcctaacctactgaacatcccagcttagcctagcctatcttaaatgtgttctgaacacttaacgttggcctttagctgggcaaaatcatctaatacaaaacctattttataatgaagtgtttaatatctcaaataagagtattgtaccacatatcgttatcccaggataatatcagagtacaaaatttgaagtacagtttttaactgaatgtgtattgcttttgccccattataaagttgaaaaaccataagtcaaaccattgttaagtcggactgtttgtgttacatatatttgggattttttagtggccctttttaaaaagctgtttcttatttctgatcattgtgagtggggatagatgtgggaagaaccatgtctctactaaaaatacaaaaaatagccaggcttgttggcacacacctatagtcccagctactcgggagaccgaggcaggagaatcacttgaaccgggaggcagagggcagatcatgccactgtattccagcctgggcaacagagtaagactctgtctcaaaaatgaatgaatgaatgaatgaacgaatgaatgtactatgagctgatactgggatttcaggtaccgcagtttgtgctgaatgatatgtttggggtaaatcagtttttttcttatagaatttcggcgtttttgctgcaactgccactaattttgcatttaaaagaacaaaagaggaatgtatttttcaaaggagtgaatgaggttaaaatcaagattttgaatggtataaatatgcaactaattcagttgtaggatattattaaattttttattgctaaatatgtttctttcatacgttgcagtgcttacagttccaacagctttccaagaaaacatttccatatttgtgttatttgtaaagtatacataaataatgtaaaataatttgggattatttcaactttacattgtatgtctgaatttcatcgatgttgtacctggctcagtcaatagttgtcacaggtattaagccattttggaatttgccacttttttctgggtaacctgttttagtttagtttacagcatttagaaacagaacgtaactttatagaagtaacaccaatatcctagtctgcttgccccgaatataactaatagtattaggatgtaagcaatattaagatggtttttattattttttatacactgtgtgcttttactttttatttaaactacagcaaaaaactgattttttaactaaaattgaatggcgtttatcttaatgaccagttattgaccaaagtgtactcagaagatgttattatgtcccaatctaaggaatcctttaatttggggattaattttacttacacatgccatttcagtttcagttgcctcattctattacatcattcttgtcaagtctaagctttatcatgtctgaattcttttaacactgaatctgtgatgtaaaaatgtatgatgtgccataaattttattcataataaactaagttatagcctattgtaatctgtaaaacatttcttgtaaattacctaatttattttttcatttatgtacagtatcttatgtaaatttgaaaaatgtttgccatggcgcattctgtaaacattcccgtattcttttccttaatgcttatttgcatgaaggtaacttgggttttgcttgtttgtattggataaccattaagccaacttcagtttctctgcctttttttctgtagtttaaccatttctaattttgttcatattctaaatagatgttagaatcatactttttattttctactttctaaataaattatctaagttgtttactaaaaaaaaaaaaaaaaaa

SEQ ID NO: 28642 - DNA, 2885 bp, Homo Sapiens
ggcaaagagggggtactgaatggtctcataaaaagcctgctcttcagcaccagccaggcggaacgggatacggtggtgtcagataaacctatgacagcagcttcaccaacacacaacacacacagaacagatacacaatacacaacacacacactacttttataacaaggggagcgcagacacaaaacacacagatttcccaaaccgtgtgtcccagtcaagcactgtgggctgcagtgagatgaggacacaggagcaccttgggttagtctgcatcttggtggctggtggcgctggtggagttttaactggagaggtatttctggttgtcacggtactgttagcataatgctttgggaacagaagcttctccctgtggccgtatgaagttccagccacaaaagcagcagggagcatgaagcatagtctccagggccactgttccttttctgctgaccccagagggaggcagggaaaccgctcgccccattgctcttctggaagcctgtggctcccacgctgtcctcgggccatgctgtctctgccgtgttccatcttctcccgagtgacactgcccattccgtgcagccgtctgtccttcccccgctgctgctcccctgcaccactggctgggctgtcctcatcctggtcttttcagttgcttgtcacatctttttaaatcctccaactcacttcctttctttgagggtccttgttctctgtcatccttcctgtgccttccattcagttcacctcaagcttccagtgtctgagtgtcattccagccagcgggctccatgctgggcaactcagttttctcatgccacagctttttacatttctgtgtatcagcaaattccaaatttgggtgtcctggttttgtaacatgtaaggacaaggagctcaacattctttaaaaacaaagtagcttgagaataaggattctaggtgatttgcacatggttgagtgtgtcttgcatcacctgctcgcagaacattaggatgcctgaaacacaaaaccaccagtacattctgattctacctttttaaaatgctgctgcaattgaacagtcattaaagaaaaccagacccaaattaaaatttctgcctgcagcatttttgccatgttgtgggagtttgtttaagctactcccagtcaatttcaaataaacagtagcagagttcgtttaagacgactgccattgctaacacagctgaatgaaatcagaggtctctttgtgggctcccagtagatccaggccctgtaggaccagttcacttgtccactgtagctaagtagatcatacaaaagggccaaatgaacagatctaccagataggaatatgatgaagtggcctgtggagaccgctgccacagtcactgtgtcatgccttctgtataccccagcccaattctaaaggagctttgcaagctgactcatctcacagtattgctgtgtttaatcataattggtctcttcccattcatgtcactgatcatttgtgttgaattctttattattttaagttattctgcatgagcatagaaagtagttaatattcacgagttgcctgtggtgtatacttcatctcacttgagtctgttgagaagtgtgtttgggggaatcatccactggtgacactgccggtctgagtaaccctgtctccctttctcggctctgaaggaactaccttgttctgcactagctccatccctagagccctgcttctccaggcccgagagaccagcaaaccgtcgccctccgtcccgttgggccccacattcccccactgcctcacagcctcagtcacccggagacccgacgtccttggaggagcatggtggcgaggagccgcccgaggagcagccacaccgagatgcaagcttgcatggattatcacagtataattcactgtaatttgcataaccacaccatcaccatgaacaaaactctgcccaacaggagagatctagttttctcaaggtcaaagaatgttttttaaaaacacaaagctgctgaatgttcaacctgtgaaactgagatgtttctagaatgaaacagtaaatgtgcctgtaataacttaatttttttcatagctcagaaaactatttttgtctccatcttttttacacacagtatattaaacgaaaaggtaaataaggtataaatagatttaaaaaataaaagttttaaaaaatgtacattttaagagattctgaacaccctcgctgtcaatacctgactgcctctgttaaatttgcactgttacattttggttcagtttatttccatgttgaattagagtggattaagttaattttattttgtcagtgttactgttttttacgaattttttaatgcttcagactgtctgattcagtgaactttttgtagtgaaaaagccatgaagccagtagacaagacagatattctgtatgctggaggggatacaggatgattttgaaaaggtacaaagtcctcagtgggcttagaaaattcactgtatgatccttatattatcctacttggcttgcacgtcttcgggtgcatgtatataccgctactgtgtcctcgccatcacctaaatgtgactcagtctgttccactgtaatatgttgtgaatttccttgtactgtacttttattgttggtcttcttgcatcgatgatccaacagcaacaccatttttaaattattgtgaaaagattaactggcaatgtacagagtttactcaaatttttcttaagggaaaacactacaaaaagtcacaaggataccaaatggaaacacatgatgatgcctctgggtctgtatgagaccgtgatgaagtagaaataaagcccttctgagatggcaaaaaaaaaaaaaaaaaaaaaaaaaaaaaa

SEQ ID NO: 28643 - DNA, 6010 bp, Homo Sapiens
gggcggtttcctccgctcgattggttctactgtgggtctggactgatctccatgtcctgttgtggggcttttacagcctttggattgtgaaaactgctgagagagacttgcaatccagtcacataagtataataaagaaatattggtcctcatggaagaagagcaagatttaccagagcaaccagtgaaaaaagccaagatgcaggaatcaggagagcaaactataagtcaagtaagcaatccagatgtcagtgatcagaagcctgaaacatcaagccttgcttcaaaccttcccatgtcagaggaaattatgacatgcaccgattacatccctcgctcatccaatgattatacctcacaaatgtattctgcaaaaccttatgcacatattctctcagttcctgtttcggaaactgcttaccctggacagactcaataccagacactacagcagactcaaccctatgctgtctaccctcaggcaacccaaacgtatggactacctccttttggtgcattgtggccaggtatgaaacctgaaagtggtttaattcagactccatctccaagtcaacacagtgttcttacctgcactacagggttaaccacaagccagccaagcccagcacattattcttatcccattcaagcttcaagcacaaatgccagcctgatatctacttcttctacaattgccaatattccagcagcagcagtagccagcatctcaaaccaggattatcccacctatactattcttggtcagaatcagtaccaggcctgctaccccagctccagctttggagtcacaggtcagactaacagtgatgcagagagcaccacattagcagcaaccacataccagtcggagaagcctagtgtcatggcgcctgcacctgcagcacagagactttcctctggagacccttctacaagtccatctttgtcccagactacaccaagtaaagatactgatgatcagtccaggaaaaacatgactagcaagaaccggggcaagaggaaagctgatgccacttcttcccaagacagtgaattagaacgggtatttctgtgggacttggatgaaaccatcatcatcttccactcacttcttactggatcctatgcccagaaatatggaaaggacccaacagtagtgattggctcaggtttaacaatggaagaaatgatttttgaagtggctgatactcatctatttttcaatgacttagaggagtgtgaccaggtacatgtggaagatgtggcttctgatgacaatggccaagacttgagcaactacagtttctcaacagatggtttcagtggctcaggaggtagtggcagccatggttcatctgtgggtgttcagggaggtgtggactggatgaggaaactagctttccgctaccggaaagtgagagaaatctatgataagcataaaagcaacgtgggtggtctcctcagtccccagaggaaggaagcactgcagagattaagagcagaaattgaagttttaacagattcctggttaggaactgcattaaagtccttacttctcatccagtccagaaagaattgtgtgaatgttctgatcactaccacccagctggttccagccctggccaaggttctcctatatggactaggagaaatatttcctattgagaacatctatagtgctaccaaaattggtaaggagagctgctttgagagaattgtgtcaaggtttggaaagaaagtcacatatgtagtgattggagatggacgagatgaagaaattgcagccaaacagcacaacatgcctttctggaggatcacaaaccatggagacctagtatcccttcaccaggctttagagcttgattttctctaagaactggaatgaggagccttccccttgagctccttttcactcctgaagggagctggagactggaaccaactgagaactttctctgtctgtctctctctgtgtctctgtctctatctctctctctttctctctttctctctctccctctctccctccctcccttcctctctccctccctctctgcctctctctctctctctctctctgtctttatccatggaatgctggcgagaacacaatcagaaccaacagctgcaatttttgctaagagtgagctgcagccccgtgttcatctccatacagaagcagggacagttggatagagagaacaatggactcactgcagctacagtgcttttaatttttctgtgttttgtttttgtttttttgttttcaaaaaatgaaaaagaaaaggaaattcctggggcagagttgcactcttagtccatgaccagattgagaattactgataacttgtggtgatcagataaatgcagcagacttttatgataacatctcttgcagtcttagagtctccttagcttagaatctcacttatttccagcgaatgtgtatgttatttttataggtaagggtctgatctttgacgcaggtttcccccactttctttttctagcaagaaggggtgtttaaagtcttgaaaatagtaattgaaatatctaaaatacctccctgtggcagtagcacctctatagctgctccagtggtctgctctctaggatgatacctttcctgttcttctatctcctagctggtgaactgtggggcactggacactgagtaacttaaactttggcatttcccatctagaagccttagtcttctttccagtcccttttccctttagtcaaatggcacaaccctaaaaactccttctgcttgactgtcattcagactgtatcacaggaggcttagcttccaaactggagagaaggaactaaagtgtcttatgaatttcagcttcttggctcttgagaccgaaaggttctacctattccccctgcagagaagcacccatttcccatcagatgctcgtccctgcagcttcttccttcttggtcatcataatgctaggttcttacccctttcctgccctctgcacctcatgtccacctccaggcagctctggccagtccccgggtattagacccaagaattcaaatcaaatctaaaaacatgcttataactacattttggccaaaactgccaatgtatttgacttcctttgtggaagccctaagccatatgaaggatgtcccaggtatgtatttacccagatctctgcctgaaactgaagagcagattgctgtatttaaattttcccatggaaaaccctgcttctcaaatcccattctaaagtaggaaaccagaaagactttgctgattgtggggggaagggagaaacagacaggttttcacattgttgccaaggctggtcttgaacacctggcctcaagcgatcctcccacctcggcctctcaaagtgttgggattgtaggcatgagccactgcacccagccagactttcctgatttaaatgagagtactgcatcattccctacttcatggcccaaaacttaatcctgggccaaatgcaggagcatctctcgacctctgggcagattggtgggtgcccaggcactagtcacagccttccagcccagccatgattgttggatgccccatccctccaagagcaatttgggcatctactcaggcaggataaaattccctagagctgaggaagttcagcctctcccaggctacacagagagagatgatacaagcacctcagattgagatgcaggattggtccgcagaaggaggcattgttgaccaaccccagctataattgcttgtcaccagagattctgcatacccatttccagagatgttgcagcacaaagaggcaagactccttccaatgccaggccacccagatagcaagagagagaggctggtatacacattccttcagaactcattgaaaagcgctcataactcgtgattttaaggagtaagtttttgctgagtagctgaagtcagtgctcctttacttagctgcctctttggccttgtttcctgtggggttgggaggagggagatgtagtgtgaggtaggccttcccttggtctgtattcagcatagttgcctagatgctgctctgccttgtttgatggttgatcttaggaagctctaggttttactctgaggcctcaaaccctccccctatgcagtatagctgttgggtttttgtcctggacaaaggccacggctgttgtgctgcgcttcaggtttgtgaggctgcggagtggtacccccaccatgcacgcaagcacacacacacagatacttccctctccacccttttgggagctctttattttagaatgtaacttgaactcacttttatcattggcctttttcctcttactctgacttcctagcttagctctttccaaaaggaacttgaacttggccaagagaggtaaggaggctgagcagagcagtctttgctcattcctggttgttgccaccctcatttaaatggaagagagaaaacaggagcttcttggctgtttgccaaaatgaattgtccagggaacacagtgctctctgtaattaccctgcctttttctccaccccaacacaaaaatctggaaaggaaaataagtgggtaggattaagagctgttagaagctggggaccaaaggacactgtgggtccattcatcaagggggagaccctcttcattagagtcctcatgaaattagccaaatgatgagtccttccctagctgggcatggtgggttctctttttttttttttttttttttttgttgttgttgagatggagtctcgctctgtcacccaggctggagtacagtggcatgatctcggctcactgcaacctccgcctcccaggttcaagcgattctcctacctcagcctcctgattagctgagattacaggcgcccaccaccacgcctggctaatttttgtatttttagtagagatggggtttcaccatgttgaccaggctgttctcaaactcctgacctcaggtgatctgctcaccttggcctcccaaagtgctgggattacaggcatgagccaccatgcctggccaggcactgtgggttctacaggatgggtctgtaatgtcacggtgagggctctctctagtagtagatctggagtgaggtgtgtcttgggttgaggaggtggcttgactttcgaatgtaaaactgactgtgccttagcatcaccctgtccagtgcccctggggcagctggtagtgtccagaagaatggacacctgctccagatttagatgcccatctgggcttttgtttgatttgcggcgttcctgtcttctgtaaagctagtgagttgtcccaagagactgatgccacagcatgttcgcagtttacacaaactcagctttaaaattccaaatagaatctgacttacaaactctagctgcagcatgtggagcttctagatgtttactaccttgaatggttgtcagtgtcactgaaccacaggggagaggagtatggggtagagcaatggtctgggccaaggaatggtgagcttagggtcttcctctgactccttactcctcaaggaggcagttagggtccctcttaagcaggcttctatttcttaccactaaattggtttcctttttcatccagaagttagaactccccagatattcacactataggatctgaattccgagattctaaaatatcttaaaccacaagagagaaaatctagttctgcctcagctccagtcagcaggccatctgtcccttcctctcctctgagtcagacagctctggcaagcaaggctccttggctagttcctaatgcaccgacaggagccctcccattaaggacgacttctactcaaaatgcgactctccctctgaacttcagatgcctctgttagcaggaaaaggcattgattggattggatatatttatgtgactgcgggcatttgtggctgtagaatccgtgaccgtaatgttatatgtaatgggaactatcttataaacttgaaaaaaataaagtttttattttctataaaaaaaaaaaaaaaaaaa

SEQ ID NO: 28644 - DNA, 5000 bp, Homo Sapiens
tgcccagccggacactgcgccaggccagccacgagtccattgaggacagcatgaacagctatggctcagagggcaaccttaactatggaggagtttgcctggcgtcggacgcccagttcagtgacttcctgggaagcatggggccggcacagtttgtgggccgccagaccctggccaccacacccatgggggatgtggagatcggtctgcaggagcggaacggtcagttggaggtggacattatccaggctcggggactgacagccaagccaggctccaagacactgccagcggcctacatcaaggcctacctgctagagaatggcatctgcattgccaagaagaagaccaaagtcgctcgcaagtcgctggacccactgtataaccaggtgctgctgtttcctgagagtccccagggcaaagtcctccaggtgatcgtgtgggggaactacgggcggatggagcggaagcagttcatgggtgtggctcgcgtgctgctggaggagctggacttgaccaccctggccgtgggctggtacaagctcttccccacctcctccatggtggacccagccacaggccccctgctccggcaggcatcccagttgtccctcgagagcaccgtggggccctgcggagaacgatcttagtgctggaatggggaggggctccccaagatggcctggagaccacccagccctgacctgggaccccaggcccaggggcacattgaacaggaggacggggccctcccccacagtggggaagcagaacggggagacctgcccccccttgggcccctcctcaccccttctttgcctcctacccccgagacctcccctctcccaacgggattggctacacttttgacttggccggttcttgacctggtggatgtggctgcagtccagagaaaggaaagattgaggtggcagagcagaccactctcccttcccaaactgtccaacttctccccctttttgcctcctcggaagctcgctgcccagagccatgtccagaacccagccggccatctccatggtgccaattaccagcaagtgtctttcctgcggcaccgggttcaggcagctactcctgccccagagatgaaggggcagctttgcaaggatccggagccagctcccaggggcccagagccccccacttgaagaggagcttgagcttccctctgcctgcccgtggaaggagctttgccgcagcctgtccgagtccatccgtccgtcccctcctgcctgcccctcttctggtggctctaggaattggggttcagcagggaccaaaggaaaggaggaggtgccgggggcctggcacagacccctaggtgcctcgctccatgggattgcaacaagctagtttaggaaccgctggcggactagaaagaatgttgtcgtctgtgttccggtggaggagctgtggaacctgagtttccagaaccccaaccctagagagcatttgggggtgctgtattggagggggaggctaaggaaagttgggattgggactggtggtgccaaaataagggtttctcaaattggagaacccctccttgttgcatgaggtcaatggtcatcctgtctacccaccctgcctccaggccagggggctggggaggcaaatagagcccccctattttagtctttttaaaaaaaacatcctatactaagggcagaacccactgccccggcctcaattaccttggctgaaggaaagatggcggtaggagagaaaagtgaagaggcgtgagtgtaagaactgggagattccttttccagcaggcctgggtagctttcccagcccagccctccctggggcctgcgggagcccttttgcatgcaagggaggatggaggctggcccctctttatagaagcacatttctgccacctcccctgggaggcacccagaagcctgccactctttacctagtccctgctgtgtagggcgtagtccaggttagctaggtagagttagtgctccaagccctggggcctgttcttagctcatgcatagtccttacagagtcccaggaccgggggtggagaggagcctcaagtacattccaggagaccactgtctcctcgctggcctgggcctagatggggcagcctggctcacaggaggccagcccctcctcctccgcccccttccttcccttgtccccgtagggttatagctggagctgcctgttatactcggctgttctgatttattattcttggtactgactttctttatgagggactcctaagggttgtaggaccttggcagagggggcctggtctccattagagggtgttgttttctcctgaggacacccaggctgcctttggtcccaccctgttcctggtcccggtcccggtcccagtcccaccaggcaactccttccacccggaaattcttcccttcccttagcctgtggaaaccctgggtattctttaaagttctggtcaatgtatatcacctccacagagctgcttaccctgcactgggaaggggagatggagacgccccctttacccaggaggtcttcagagtttcctgggaccgcggtgggtggaatcccaaggctgggggtggaaggagcagggctctggagggattcgcattcaaggcacagaattggccccttgcctgtttgtttttctaaccagtgtgatttctctgctgttcgtttattacttaccattggaatattttgagccaggagagcgccttctctctccagccatcaccgctgtggttgttcaggggtagcttttcaaaaacagggcagagcctggctgtcccaaccagggggagcaggggcttggccctgacagcctgagcccttcccctggtgtctgcacagcctttataaagagagagagagctccgaagcaatagcaacacctgggggtggtcagtgagggccccctcaatgattttcttgtttgttctgtgaaatcccgctcacctcctggaggggtggagcagctgggggctggagccctgtttctttgtgtcatcgtgagcatgtgccccttcccaggggctgtgaccattgggtgtgggaactacggtctgtcctcaccaagggatgggggtttggggaggagagtgacattttcatcattagcttcggagaagcttcaagcccatcctgtccccgctactgcctggccccttgctgactcaggctgcactgtttgaagaggagcagagaggctggcactaggggccactggggggctggggtctccaggggatgactgttttcaatctctgggccaagatcacatgcaggataccatgggaaggagccatctccactctccttctccagaacccccttgaagggcctttggggccattagtccatttccattttacagacaaggaaatcaagacccagcttgggggaaaagccacccctggagtcacctgtgtgttcagtggcacccccagcctgggtcccctcctcccaatagaggctgagccggagccagggcagtatgaggtggggctgccactgcccatacctcctcctcccttctttctttgaagcctaatggccccccaaaagatgggcaggacaagctgtagcccatctgagaggttgggaaactgaggcccagaaacaggaagtgactcacacaagacccctcagcaagggtgcaaagggggaagaactaggggctccattgttcttcaggcgacaggagaccgttgctccagtgcatgtctgctgggacaaggattcctggcctcgaagccctgggctgcacagccctactgggctccacctctataaaccagtgacttctctgggcctgggtctgggggagagggttgccagggagactcagctctccttgggggctggcccagctgactgagggtacacaggattgggtctagaccttgatgcctgggtggagggcccttgtaaggggccatagcctcttcaggaccaactggagggagagttaggaaacaccagctcctgcctggggcagtgagggaatgggagcagctgtgggcgcctcatttcaggcaagtcctccccaaaccttcagatgcagtgagacctggccttcctgttgtgcttttcagactttgttttcagaatgcttttatctcgagtgtgcccttcggccctcacaagagcccctggggagtaggtggtggcctgtgccgtcatccccatttcaaagcagggagctgaggtcctgggaggggaaagtgcttgcctgaggtcccactgtgttagtgggtgggcaggactggaactcggttctccaacagcccagagctcactcttttacacccagaggtggagcaggtggcttagggggtggttatgtacttcacaagccaattcccttcagccaggagctcctgggtgcatttccgtgtcagaaacagtaccgagtcccaccccctctggaggcacagctgttgcgtcaggcaaggtcacctgcatttatttattgagcagcagtgctgtgtcaggcccagggaccgagcccctctccctgttcccctatggtgtctccgaggccctctgggagggccccacatctggagcagcacctcagagtggacagaaagcattagcgtccacgagctcacccgacgccgagcctgtgaggtgggctgatggtgcccgtctaacccagcgcttcagggaggtcagaatggagccgaacccagggctgtgagcatcacctctggagccctttcactttatgactgcttcctggacgggtggtgggaaggcaggagcctgggtccttaggctgggggcctctctccatccacccacctttccctcattccctctcttggagcagcagccgcccaggcctttagggagggagggtttctggggcccttgggttggagtggggtcgcgttgcattgtgttcatgaccatgtagctcatgttgaaattaaagtttttggcttttctaaaaaaaaaaaaaaaaaaaaaaaaaaaaa

SEQ ID NO: 28645 - DNA, 6418 bp, Homo Sapiens
gggcaaagcggtgtatggatggatgatgatgaaagatgagaacatccctggcacggtcgttcggaccagcactatcccagaggaacttgggcgcctggtgtatttattgacagacaaaacaggaaccctcacccagaatgaaatgatatttaagcggctgcacctgggcaccgtgtcctatggcgccgacacgatggatgagatccagagccatgtcagggactcctactcacagatgcagtctcaagctggtggaaacaatactggttcaactccactaagaaaagcccaatcttcagctcccaaagttaggaaaagtgtcagtagtcgaatccatgaagccgtgaaagccatcgtgctgtgtcacaacgtgacccccgtgtatgagtctcgggccggcgttactgaggagactgagttcgcagaggctgaccaagacttcagtgatgagaatcgcacctaccaggcttccagcccggatgaggtcgctctggtgcagtggacagagagtgtgggcctcacgctggtcagcagggacctcacctccatgcagctgaagacccccagtggccaggtcctcagcttctgcattctgcagctgtttcccttcacctccgagagcaagcggatgggcgtcatcgtcagggatgaatccacggcagaaatcacattctacatgaagggcgctgacgtggccatgtctcctatcgtgcagtataatgactggctggaagaggagtgcggaaacatggctcgcgaaggactgcggaccctcgtggttgcaaagaaggcgttgacagaggagcagtaccaggactttgagagccgatacactcaagccaagctgagcatgcacgacaggtccctcaaggtggccgcggtagtcgagagcctggagagggagatggaactgctgtgcctcaccggcgtggaggaccagctgcaggcagacgtgcggcccacgctggagatgctgcgcaacgccgggatcaagatatggatgctaacaggcgataaactcgagacagctacctgcattgccaaaagttcacatctcgtgtctagaacacaagatattcatattttcagacaggtaaccagtcggggagaggcacatttggagctgaatgcatttcgaaggaagcatgattgtgcactagtcatatctggggactctctggaggtttgtctaaagtactacgagcatgaatttgtggagctggcctgccagtgccctgccgtggtttgctgccgctgctcacccacccagaaggcccgcattgtgacactgctgcagcagcacacagggagacgcacctgcgccatcggtgatggaggaaatgatgtcagcatgattcaggcagcagactgtgggattgggattgagggaaaggagggtaaacaggcctcgctggcggccgacttctccatcacgcagttccggcacataggcaggctgctcatggtgcacgggcggaacagctacaagaggtcggcggcactcggccagttcgtcatgcacaggggccttatcatctccaccatgcaggctgtgttttcctcagtcttctacttcgcatccgtccctttgtatcagggcttcctcatggtggggtatgccaccatatacaccatgttcccagtgttctccttagtgctggaccaggacgtgaagccagagatggcgatgctctacccggagctgtacaaggacctcaccaaggtacgggcctcaggcaagctgtctgcctcacgactagcacccacatctagcattttacacgagtgagaaacaggccagtcaggaggcatttccaggcattttgtgaaaaacgattctctgtccttgaagatgttttttatgtctcctaattgttgttggcattttctctttgagttaaacttcaaaaggggaaaaacatctcagggaaaaaaatttctcaaatgtttgcaataaagctctaatatcatacatacaattagaattgtaaaagatgttctaaccatttgtggaacttttgtgaagtgagctcaccaaatgtcagagaagatctcactgtgtaatttctgtagaaaggctcccccggacagcgtcactgcacctgctgcagaaatagcattccaaagctggggaacccatgggctgcatgtttcctgtgtatttccaagtttgtcagtagttgtggatttcagaattatccctgaaaagtgataacatgtgtctgtccctagggtccatagactatttttgcagtgatgtcaccaagaaaaaaatccaccccagaaaacttcagtcacctgaaactctgagaaagatggatttatttggcttaaaactgtgctctgttaggattaaaggaggctttgaatttatcatattctttacgacagcatattttatagcatagaacgtgtaaggatacggggtagaagagaggctcagctctgcagacacaaatcatggtaactctggtattttccacaaagctagctgttttgaatcaacattgaaaacaaaatccactaaccgcaattaaatttagatttacaatcaataaatgacaggtgtctgaaattatcaactcagatttttaaagcagtagctgtatggtaaagaaagaattagattaggcattaaaaaagaaagctaatgactacctagcaaacagattctagtccagctaaccactaattaaccaactagattcttacctagctaaccacaaactgagaaactagactcctgtctgtctaactagtaactaacaaacgatactctatctaatacagctaaccactaacaagctagactcttatccagctaaccactgacaaactagactctagtccagctataaccactcattagccagagaggtgctgggtaagtcatgttaactttttgatttcttgatgttattgaaatgaaataaagactttaaagtttcttgaaaaaaataaagaattctcattagtgttataatcaagacaaataaagctagttcaccagtatcacatgaaatataaataccaagcgttattatcatggtggcatcatcgtgactactgggaaacatcgtcccaggtcacacctactataactagaagcaagaccgcttaagtatcttaaactgatgaaaccattgtgataaagtacagcagagtaaggagcaaagatccaaaaacttcgggaagctagtgtgaataatgatcattttagtagcatatgcatttcctcattcccagagactctaaaaatgtttacctaaatgctgccttacaaacatacgggaacaagcttttcatgtacgaaggtaaacctcgatgcgctaccctcaaccctaggaaaccggcacgcaagcagggcagaggtcaccaggggtcttgtagccccagccggtgctcccggatcgctgtgctgggagaaacttgtcataggactgtcatgccacagccatcttgaccggctattggagtggggcagtaacacgtttttactgttttcaaggatttagattgtacgcaccagtctctttctttgtggatatctaaatggctctagtaacaagaggttcatagggccacaggtgtctgacggagcagctaattatccgtaactgtggccatggaatccgtaagttctgtgttactggtgccattgaaccctgttcacttctgattgtgttggatctcattaagggtattaaatttccgttttcgttaaggtgagcaacaatttagaatgttttagtatcctaaagtcaggtcaccatccctacattttttttttttttggtcaagaatgcagtcactcattttctctaagcttcttttcttcaacatcttatctgcattgtaacttttttttaaatctactacacttcaaattctttgaaaagaaaatagcactaaagtactgagccactaaagttaatttagttattttttcttattgaagctaaagaactattttgaagctttctgttccttctgaacagttcgccaaggtagcgcagactgcagcactctgcgttgttgtctgatgatcggggcagctggagactggatgtgccaacgcagtttatccacaccggtcagtgtcagtggacaccaagtccccagtccgtcggctcaagctcctgcgatgtaggacaacatagccctgctctcaacgagtctgtattctagtcaggatgagaaagcagtgaatcagtggcatagagcaacagcataaagggccgcggcctgcagtgtgagtaacaacagcataaagggccgcggactgaaatgtgagtggctgaccggcgagtgccggtccagtcagttctgagtcacatatctcaggtcaccgtaaatttataaaataccttcagaggcgagccagggaggcaaggcatgcattccctgcacacaggagaagactcaattggaaagaaaatctcctcttttttatgtgtatttgataaccagtctttataatctaaaagtacaaataaggcacgcattataaatctcacttattgtcctaatgagttagccaacctcaagtataaacatttgtcccctgctgtgtctcgatggcctgagccacacgtcgacacagtatctgttaagtaagtatttgataaacaaatgaggcagtgaatgaatcagttaaaccaagagtcaggatttccttcgctttcctaaaactatgtagcttttattctttacagaaaatggtatatttgcaacactattttgttattcttttgaagctcaaattctgctttgaattattaaactttactcacgatgagttcaggcacttaattttctggatgccagtaagacgggaaactgacctactcatctctctcctaactctgcacatgtcttcattcattctgaatggtgtgtaaccgcttagggaagctagttactccaagatccaggcatcaggactagtaaggtgaccctggttaagtgagccagctcacgtggtcccaaaatatctcagactgtggctgtgaattttgttaccaattcataatcttacattaccagctaactccagagacatttgatttgtagttgtgctaattgtaaagatgtcaagtaggtaatatacagttcttcatgaaatctctggtgccattaggtattgaaccattcggaccccttcactaatttttattttctgtagaatactctcaaatggttttatcttttgaaatgtatatttgtatacttatattcttttcaaaataatagtgaataagacaataaaaggaaatttaaaacattgagattaggaaggaggaaataaaaatatctctgtttgtggatgctataattttctatgtagaaaattccaaggaatccacacacatacaacctcctatacttgtaaacttcataaagtttcaggatacaaggaataatttttcaaaatcatttttgattctgtacactagcaatgaataattggggtttgaaaaaatttgtaaacatttataataatacatttaagcatttataatacaagaaagtgagacactgaagtgtacctctaacaaaatacacccaagatctgtgtgctggaaaccaacaacattgaggaaagaaactgtaaaaggcgtaaacagatgttcctggattgagagacgtaaacagatgttcatggattgagacacgtaaacagatgttcctggaatgggaggcataaacagatgttcctggatcaagaggcataaacagatgttcctggattgagagacgtaaacagatgttcatggattgagaggcataaacagatgttcatggattgagaggcgtaaactgatgttcctggattgagaggcgtaaacccatattcctggattgagaggcataagcagatgttcatggtttgagagacgtaaactgatgttcctggattgagagacataaacagatgttcctggattcggaggcataaacagatgttcatggattgagaggcataaacccatattcctggattgagaggcgtaagcagatgttcatggtttgagagacgtaaacagatattcctggattgggaggcgtaaacagatgatcctggaatgagaggcgtaaacagatgttcctgggttgggaggcgtaaacagatgttcctggattgagcctcaattagatgttcatggattgagagcctcagtgttgcttcacattgacaagctcactctagaatttatatggcaaggcaagggaactcgaattgccaaaataatttagaaaataacagagttgggccgggcgcggtggctcacgcctgtaatcccagcacattgggaggccgagacgggcggatcacgaggtcaggagatcgagaccatcctggctaacacggtgaacaccatctctactaaaaatacaaaaaaaaaaaaaaaaaaaa

SEQ ID NO: 28646 - DNA, 5655 bp, Homo Sapiens
gtctgcagtcacttcttaaaaggccctgggtggtgtgtccttcaatgatgaccattgtccacaatagtgagttccagagggtcgattgggacagttggatagccaaggaccagagtcaggaggcaaggctgatgagcaagaggctgttgccattggccaggcgaggcgtgagggaggctggtggagcgcagcagcagagggatggagaggcaggaatggcatctcctcacaggccaggctcctctgccggattgggtagggacgggaagatgatggcccccaaccctgggccaaggaacaatagcacccatccgggggcgggggacccgctggagtacttctcctggaccactgctcagtgggcaatagagggaacaatggtgtttctgaccaggacgggggaaggcaggggaatggaggaagatactgacagggtacagaggaggtagaatggagcgagggccatctccaccgggctaggaaatggggctttggtgggccacactccattgtgctggagcactctggcatctccattggcagtggggaggggcttgtgacctatcagcatcttcaccctttctgagtttccgccgggctgggctctccagccaggagtcacaggtaccgggtggttgttcatgctgaggccttttgcttggcaaaaagttaatccatttgtgttcatttttaacctaagcaagggttggagcttgttggattcagcatctgtggaacacagtctgtagcccatgggaagacgtggacattctttcccaagttcttgaaggacggaaaggaccatgaacttgtgaggtgaccggaggattggttttgggtgtcagttttgtgtctgtcccagtgctgccacttttgctttgaaatggacggggagagctgaaggccagcatgggtttctgcacctgtttcctacagctctgctggggactgtggctcaggtggcagctgtggacacggatcctgtcagcctttgggtggccagagctccaaggccaggtgtctcttagctgcaagcagccttcactgttaatcaacaggctacacaaatctcacctctaaagaggtgaaatgtgaaaatatatgggaagcgctgccttagccctgtgtccacaaatcctttctgtaaagggccaggtagcatttcaggctttatggaccatgtggtctctgccacaactgctcagctctgccactgtagcacaaaagcagccagagacagtgcgtaaatagatagcatggctgtgttctgatgaagcttcacttacaaatacacagggctgtagtttgccaacccctgcaaagtagggagtattttgccaaacttggctgtatttcaccaaccccttagactatagagatgacttaccctttggcttaatcatgactggaaacttccttcccatccactgcctggatccatccacctccccacaaaggcttcctgagcatctcctccgtgtgagcactggctcaatgcacaggacgatgtagttcctgcccatatggaacttaggttttgagtgacacgtgggacattggaagaggagagcaggtggctaaagagcatcatacagaacagggctcagggaagtcccaggtgatagaatctcaaagagaagggctgagggtgaatcaggaaagccctgaaggcaggcagctccggagtcgggtttagacgaggaggctgcagttctccaggaagggaagcaggaccagataacggatgagattgtgtcaaacaatgaggaggcctgcatagtcacacaggcgcatgaggtctgctcgtaaaggaccaggagggccaggctcaggggtgtggactggattctctgggccgtagggagccactggacagctgtgctcaggagggtcatgtgatcacaaatgcttattagaaatgtcactggctatggaggaccatgtctgtggttgtaagttacgcctttccgtttagtctggacttcctggtcaaggtacttttggtattagagtggggaagagaggcccagagagttggacaggttttctgaccattggcttatagtcagtgagcaccccacctttattttgacatgacagagctttacagaatcttccttcttcaggcgttttctttcctgctatcctaaagattcacgtacgagggcaggataaatgaagcattctgtctccaatctaagttcggcttggggcctcagaatatgaaggtaaaggggcggggacggactgactgcccctgccccttgcttcagaatcaagtcacatggcgggaacgctctatggagcagattgcttcctttgtacatgccctaggcccgtgttcagcaggcctcagagaagcagaggtgctggcctctcgtctccagaggctgccagctactaagggaggtggaagcaactacccctgggggtggactgctctgggccgggcccgacgtcaggcgtaggggactgaggtgaatcagacgtggtggctgcattgaggaatgctcagtgtagttggggtgtttgtagcgctttctgctgagcatggtctttcctctcagaggggtttctaggcacgttgaagggagctgccgttcagagcatcggagaggtgccagggacgtgagctgctgccagtctgacgtgaacagaaggtgggaatagctggcgctgccgtgcgttgataggagcacagtgtccgctgcgaaggggcggctggggctggagaaagatggtctgatagaagcgcctccacaggcgccgattcagcgaagccccagcagccccgcggggcgggcgaggatcacatgcagctcggagaagaggaggcacttgcccctctgcctgagctgggaggtggtggccagctgcacacagggctgtcccaggatgctgacgaggcgggaccagccacaggccggcagcgctgcactgtgactccctttcacggggcccagccttgtctctggccttccgggactgagtcaggaggcgagggctacgttgctgccccagcacagtcgggccaggtgtggggaaaggcgggagggaggtgtgctgtgctctgagcagcctggcaggccctggagaggcaggaagccactgcaaacttcagaaactgggtgctgcttcctctcggtgaagttgtgttttgctaatctctgataatcaggtcagggatacagaaggaagagttgcccctgggtggctgctgtctttagacttgtcgggctccctctggtacagaagtgcctctcggattttgctgcctggtcttctctcttatggacatggagtagctctcaggctcttatggtacagctctaagaaggaacacttcttgcattgtctagtgaagtttctgggtttatggaaggggaactgacaaactggagccggcacagatggacactgggtaaagagaatgcagcctgtccctggctgcagtgccaggtgtggcctttcctgtgacagcaagtcacgtgctgtggctccagcttcataggaaggctcttgtctgtcaggcagtggagttacttacagacaagagccttgctcaggccagccctgcccctgcctacaggcacaggtgctttgccatctgtcccgttttcctgcttagggaaccaagatggtcagaaagttgcttgactctaacctaaatatttctgccgcttttgcgagtcagactctttttcttttccttgttcatggaaatggatcaaggagtaggagttttagatagctagggaggtggtgagaagttccgtctccacctgtaatttacaagtcgtgtcttaggtttccagcctctttcctctgttctgggtatctcgtgctctccaccctttagggattttggtgtggtgggtccgtggcaagacactcgatccagacacacgcatttccgaggcacttccatgtcacttaccaagcctccttgtgtgtggatatcacttcactggctccctcaggctgcagccctgacccccaaggtagtgatggcagctggtgcatgaggtttgatttggaagtagccaggcaagccctggttgcaaaaaatacctcttctattccgacagcgggccagaggccgctgccattagacgcatccctctacttacccccgatcacttttcatggtcaggccggccttgcacaagcaggttctgttcactgcgcacccccatttcttagatggggtactgagcactgcttttcccttagctcacttcatgtggcagcttctcagggatgggacctaccatggctgtgggagatgctttgctactacttactacctttccgagggaggagggctcatttttagaaatgttactggggagccaaattgtaggcctccgaccagagggcctcgctctctccatctcccaggaaccaagggtggctctggctctctgaggagctgtctccagcctccaggtgggcgtcctttccagcataccagggcttatggaggcaaaatgaaagctggtccacgtgggaactccctactgttgtcctttccttgggcagacaccatatactttttagctcctagcagtgtttatcccgttttccccaaggcatccttggactcaggcctttcatcctggacccatctgtctggcctgttgtgctgagcctttggtctaagtggttggttggtcccagccacttcttcaaaagaaggtttcctgaggtaaccataaattagggcaatcgtacttccaggaacagtgaggctgatgggcctgttcccaagggtactttggcagggggtgctggggaaggggctggcctagggccaggttcatcataccgttagccctgcagccccatgcctgtgtgtcctggtttacccgccgtgtagtggtcctgcaggagtggagcctgtaggacttgcttctcagcggctccaagcagaactctgtctgggaaggtgggaggtgcagccagtctagacctgaagccctcacactaaggactaaggtaggcctgctcagccttagcccttcgtcaggcccaagggtgggggaggcaggaggaggctgagcgtagtcgtggatagaaacctttccctaccgcacggttacacacatggcatgggactcctggctgtagctcactcgggtctactgaagaccaagttggtttttagaaatctatttaaaatatctatcatgtatctatttactgtgtttttctgaatacgcaagtgtaaatagtataatttgcagtgcaaaatccttggcaataactttgtgtattatgtttaaaaacactggaaaccgtgaccaccatggactgcccttcccctctgaggcaattattacatgtaggactctgaactttaaaccttcagcgtgactgaagcagcagcctgcacatgtggatggtcatcagtgcctcgcccagagatacctggccttcatccaaagggaccctgctgccacaagtcctccaggcagcacccgcactgtggctccttcgcactgagtatgttggactctgccatagactgaccctcttgtctggctgctgcagtttgtctgtaatgccctgacatgttgcattctccccatttggataaataaaaacaaacaaatgcttctgtcacaaaaaaaaaaaaaaaaaaaaaaaaaaaaa

SEQ ID NO: 28647 - DNA, 6188 bp, Homo Sapiens
gtcaaaaaaaaaaaagaaaaaaaaagaaaaaaaggaaaagaaaaatagaaattgcaccaaaccagttaaaccatcacaaaagactttattcaagatccatgcatgcagttgttgaaactgttttctttgggatcctatctttatgacaactggaatgattgtagatttatgacctcaaagagtagagcattccttttcctattttcccagctgctaaaatatgactgtctccattagaatttagaatccgtcttaagcttagagatggtaagagctgactggatgagtctaattctatgatttgtgagacatgcattaaaaccgtcagcagaacattctgatgatccacctacactcaaagaaaacacaattaacaccacagttaaaaccttctaatggagcccctgtcttagggatcaaggtattagaggtgctgcttcagggatggtgctacttcaaaagaactgaagttggagagacacctcccttcccaaatgcttctgcaggccactctggtgattcagaaaaccccaaccatatattcctttaccagcagcgcccacccttttccgtaactcagcttaccaaaatcagtgaaaattgagacagtgcttacccatgaaatatgtggtttttgaacaaaaaccccagaagttagttattcttataggaaactaaagatgccaccattgtaaatcataatactacagagacaaatgcacaggtctcccaaccacctcaaagtcaatacagcccatgttttctgagcacgtactgtgtgctgggcaccgtgctggacatgtgtgctgcctcatgacccgacaccaagcaagtcaccttgcccttggcaaggcaagtctcccctcatttctttcatttcagtaggacgttcatcttcaaagaacagaccacataggatggtctgccctctctgaacactaacctggtttgctttctcacgcagcagtgccaggtagcctcccaggcgcactgtggcatcgcccccgcctctgtgagctgaactccctccgtgagggtctggacgtgagggcccctccagagtcttcctccctggtcagtgatgatgacaggagtgcagggaggtgccgcagtggttgacagggtgggaagcctgtgtggccgaggggaacttgaactccggcaccccttgcctgcagttagccaaggcagagaccaggaaaccctcttgcacttcccatcttctctctccagctcttgtagcgctaccctggccgttccttcggggctcctgctgtgttcaggagcatcttgctcagctggcccctcctcctctctagaaaccgggggtctggggttctggaattagatcagtgtctgctctgcctcaggcctccctgcctcctcatgggccctgactgccaagaaataacagttgctggagacatatcttgatttggggtcagcgtaagaactttctagaacccagaatccagcaaaggcatgagctcctttgaggtagaggtctggttcctgtcctgccacatttcacgtggaactgtggtaacttgtcagggacattgaacaagggacatgggtaccaagctgacctgaggactcagctaactaaagttccacatttcttccctccttcccttgtctacctcttttccgtcaaacgtaagtggtcctctaggggttggctctctcatggtctttctcttctgatctgctctgccccgtcgtgggcatcttggaaccacctcagaagcaaggccacagctgtggactggtcctcgtgagagtctccctggatcctctgtacctgtaataggtacacagttacgttattatccaacctccaatccccaaaaagcctccttaatttgaaagagaaaaggtatatgtgccttgcattttgttatcggtccagattttgcatctggtggtggctggggtgccattgggattttggaatgggagcagtttgattcctccctcggaaggaactcatggctctcacaaaccagtgtctgtggcagtgacaagtcacagaatttgtgtttcaaggcttattccttcttccctttaagactttttcaacttcctgtcacttcgggctgagtctcaatttcagtcatgttttgtggcttcctttgagcacagaaacctctccttttcttccgttactggaactaagatcccagcgtaaactcgtgagagtcatttttccacgtcatcattcgttggagctattaagcccgaacacagaatgacattagtgttatactaatgtaagcagcagccactctggtgatgttgcattgaactcttttgttcttaaaccagattcacggcgggcaggcacagagttagaagagtgggctgcaggaagacacgtgctcagcggtggctgctttcaagcagcattgttttttgccttgaaaaccacatttcattatgttagaatcggtgatccccttaatactgcatctctgaaaatgggcaccatgaaaccaaaaccaaagttctggatgtgggggagtggagcttttctttcgaagcactgggagcttgggcagggcgtcccgactgcccctcagttttgccggagcactcggaagggcctcctcttttcctagtagttgcctcatggtgactctagaaagcaagtgtgtgcagcctgtgcctccccgacccatggcgggcgtctagatcaggccctaggagcctccccatccctgcctcttctagccacttcccggggggctgtagagcacggtcacaggaaggcctctgctgggccgagtctgcggtccctgagccatcacagcactggcgtcttcagacacaccccggctgcaaggcaggacactccccctgccgagagacaccaggtgcgtcatcattgcctcccctggaagagcccacagccttctatgatctcccccccgggctcgccctgccttccacggccatggtcacgttgggtatgcagtacttttcaaggataaatttttgtttatgttttttaagtgcctaagcaagatacagacctctggaacctgccagagagtcggcctatgccctgtccccatccctccccaccctgcactggcccttgagggtgggcacagggcggctgcccctctccagtgtccctggcgttctgcaggcagaacaaggcaaggacaagctagcgggagagatcgcttcacagccatatcaggctggcttcgtcactgttttccagcgtttctttctttagggccgtttctgtttatgtggtttggtcttggttcatagagaatttaagagtctgcttagggaaatctcagtagccactaagaagataggagagcaagacagcctcagagcagcattccagctctggctttggtaggagttggaaatgtgtccacatccaagagggcgaagcgtcgaatcatcctagctcatgagcctgctgactcacctgccagcgtgagccaccggagccccagctgcctttccgagccctctctgcctagactagagggatcagggtgtctgctcgggagggcttgggaaagccagcaatcaggcgttcagatcccaagtgtgtctttggaaatgagtgtgagagtatttgtttcttttttaaaaaataatttaagtctgacctaaatacggggcctttattctgtgatgggtgtacgacagattattttgtgactgcagtctgttcaaatcacatcactaagcagcgctgagatgatttgttggtgcattaaaaggttttgcatcatggaacaatccatacccaggcactttattttcattaataatccagcatttttgttcagacaatgtaataacccaaacactgggtattcatatttgacacatgggcaaacttgccagtggaatggaattgtgacctgacagagaagggaaggcaggctgacgaaggtgatcgaatgggagaacagtgctgtggtgatcatgagaatgaggcttttctgtagcatgtaaaccaaaccggacccttggcagttcgtcgtccctcagttctccagatgctattttttgcaggttctaccaagtgcttgttgattaccctagttgtaattatctagggaagagatgaatgtaagtgagagtgcagagcactggggagggtgacagtgaaatgcaattagaggcagcaagagagtcctagtctgttctcacataaccggacttgaacgctccagtgcgagcagagtgctgggggtggattccactgccgaaccacggcagctttgctttactcttcagcatgggggtggtaactagctgcacagcaagttatgaaatggaaagcaagcttaacagctgtaatctcatcggataccctggagcaaatgccttgggattgcctgaagtgaagtgtttagcatccaccaaatagttgagtttctaagatgggccatgcgggatccctgccacacgggtgtgggggcagcgcgctcctccctgcctcggctgctgtgtgtcttagtcttcatgtttccccttggcgtctcctctggtccctgtccatcttgtgcaccatgtgtccctgagggcgagtcacacctgtgtcttgagtctgctgtaaggtgttcagtctacctcaaggggtcatcatggtaagctctatcccacggcatcctccgtccatcaccacacacactggaatgtatcccccccgccctgccccttcgataacctcctgaccttgtctttcctataatcaccacaaactcctagtgcaaattggatgctgctttaaatgtgaaaacaattgttcaaaagctataaaacctgaatgaaagctgaagctgaatttataagccttgttgcatatgagccaaaagtgcaaaaagctctatataatgaactacctgccactcgtatatatataaatatatataaatatattaaaatcagactgttctacaaaattgtgtatttgtatttttgtgtacgtacaattttctgctaagcagaaggaggatgtagtataggatgctgtgagaagagatttggtttaatcctatttctttgttacttatttttgttaacatcagatgcctgtctttgtcttatatgtgtatgacactgtttggaaagctgcagtatctctcttcctgaggtccagaggccattaaagaataaacatggggcttagaggtgtcttggccaccaaacacaggtaagccaacagagttcggctcccgtacgtggtgtggtgggacctggggcctggagccacttgtactcctggggtgggactgagggagggaaagggctcccccacttcaggctggtcactgtatgttgacttccctctgggaagcaaaattccacttgtaaaaatcagcttccaagacaaaagatgatccgatgtcacttctgggtcaccaggaagggacacaggatctctctgaactttggaacagaccctcatattctggggccagaagtttgcccagaaagcagcaggtggctctgcctggctgtagagcccagctcattggctgtccctgggcttcgtctccctcttccgagtagttgctgcctttcttcagatcaggttaccacaatgcctccccactgctgacgcttcatcccccacacctccagccccagttacctggagcttctcagaacccactttgccggtgctaaaacacaagagggggtgaaagtggctgccagtaatggccagaaaccaaccaccagaggccaggctgaaagacaagctccgggtgtccaggggctgacgggccaaccatgtggcaggtcccaggccccacccactgcgccatccgcctctgagctccacagtggtcccactaatgggaacctcctctagggagagtgatactgcaccttcacccgtaggactcatatttataacaatgtgtaatggctgtagcaaaaagcccttgtttctagatgtaaatggtcaaagaaacaagcgctctattgttttgaataaaatagttcaaatgagtcctgtatcattgtatctcctattctggattagtgccttttggacagtagactgttctgtaattaaaatgtagtatactgcttttttgtacagttttgttttaataaaacttttttttaatttgtgtttattttagtattgtacctattagagaataaaatgtataactaaaaaaaaaaaaaaaaaa

SEQ ID NO: 28648 - DNA, 2181 bp, Homo Sapiens
gacttgaatttttgatccctcaaaccaaaaccaccctacttttaaacaatccttctttagatttcaggggatgtgaccccctgatttcaaggcaagatgcagccatagtgattctttgcctcaggaatcagattttgagccttaaattagtatgcctttgaattcaccatggctgccaacttctctactttctccgatgtgctgcatatttttgttttgtgtgtgggttttgtttcttgttattgttgtcgtttctttctcagattttaataaattctcaattttctttctgcatggattgttttttaaaaagatgttgaatgggcatttctttcccctgttgtgtggtataactcttctctgctttttcaaacagtaactggtattcataaagtgatgttcttctgggaccctgaaagcccttggccaggattattttgttcgtcttgacaataccactttgtactaagcaagttcttgcttcttctgtaacatcatggcccctgcctctttggatactctaagatgtcaaatcgactgaggatgactcctgaggaccctttgagatgattaccatcgttgtagcccacacatcatgttcctctctcagagcatcttgacaggagggaaccatctctgtgggacccgcctctgccatgaaattgcccatgcctggtttggcctagccatcggggcccgagactggacggaggagtggctgagtgaaggcttcgccactcacttggaggatgtgttttgggccacagcacagcagctggccccctatgaggcccgggagcagcaggagctgagggcttgtctgcgctggcgtcgcctccaggacgagatgcaatgctcccccgaggagatgcaggtgttaagacccagtaaagacaaaactggccacacaagtgactcgggagcatctgttatcaagcatggacttaatccggagaagatcttcatgcaggtgcattatttaaagggctacttccttcttcggtttcttgccaaaagacttggagatgaaacctatttttcatttttaagaaaatttgtgcacacatttcatggacagctgattctttcccaggatttccttcaaatgctactggagaacattccagaagaaaaaaggcttgagctgtctgttgaaaacatctaccaagactggcttgagagttccggaataccaaagccgctgcagagggagcgtcgcgccggggcggagtgcgggcttgcgcggcaagtgcgcgccgaggtcacgaaatggattggagtgaaccggagaccccgaaaacggaagcgcagggagaaggaagaggtgtttgaaaagcttcttccagaccagctggtcttgcttctggagcatctcttggagcagaagactctgagcccccgaactctgcaaagcctccagaggacataccacctccaggatcaggatgcagaggttcgccatcggtggtgtgaactcattgttaagcacaagttcacgaaagcctacaaaagtgtggagaggttccttcaggaggatcaggccatgggtgtgtgcctctaccgggagctgatggtgagtgaggacgccagacagcagcagctcgcccgtaggtgcttcgagcggaccaaggagcagatggataggtcctcagcccaggtggtggccgaaatgttattttaacgaggaaagaccacagcaagattctttcattcgtctcctcctagcctgggggaccaggctcgaactgaccctggacatcaaaggagggattatgtggctgctaaagccatcggcccacagccctgttcacgtcttggtgcttctctttcccagaggctggtcccagccaggcacacacaaaaggcagattctcgtaaacgcagcctccctccctggaggctgcctcctgccctggatctggagtggagctgctctgagattttgagttcttctgcagagatgattaaatatatccaagagacattggaaaacctgctgaacattttacattggtctgctcagcacatggctggatgcggatatttctataattccagaaagtcacacagctcctctgtatgagaccagtgggcgccatttaaaagaacaggatgagaatctaagatatattattaataaatgtaatggattttttttttgcaaaaaaaaaaaaaaaaaaa

SEQ ID NO: 28649 - DNA, 3779 bp, Homo Sapiens
ggctgcgtttccagggcagaggaaacgaggcgccgcgttggcgcttggacggcgggaaccggctccggagcgagaacgcgcgtgagagagcccgagagagacggagagcgagcgagcgcgcgggagagactgagagcgggggggtgggagagagacttccagagagacagagcgagaggccgagacggaggctgtccctagcacaggccagggtgtcttgggactcgaatccctgggttgggctggccgggagtggggctttcgaaggaagcgggtgattttccacgtcgtccatatctccccggtgtgggaatggcggtcgtgcactctgggggtggcgttgttctcgttccctacttgggggtggcctttttcagcggagaaagaggatgccgcgggcattggtagccggcgggactacacttgggctaggatcagtgttcagcgggttcagaaatcaccgtgtccttggcatcacctccctccccacctcctctcccatcgcacagcaggagacagtgactggagggttttcaaggaggactgcattgcccctattgaaaccgtccgacaaaccctttctccgacgtgtgacagagggacggtcgtaatgtgaaatacgactagacatgcgtttaatgggcggtgtgattgctgcattcgtgcgcaatgaatggtccaggccatttgtgtccagtagccgcacaagctgcagggtctcatgttcagagagggagggcctctccgccgtccaccttgctggagtacaggcgaccctgggcggtagccctctccgccatcagaaatgtggtgctctgagtagccacagattcccatctgcatctccaataccatttccctctactcactgacccgttgggtgcgttggatttgtgcgtgggtgtgagggtagtttggtgtgtttgcttgcaaatggaaaagcgaatggccttggttggctgagcttatcagggcactagcagtggagagagaaaggactactgtattcttaggagcagaatctcaacaacttcctataaaacgggcagtgtgtcttacctggaatgctttggcatttaataaaatgtcctgtgaatacttttcatagggaagcactttgtttttactgtttctggttggacagtggttacatttcaaatcgtagttcagaattcgtgaaatacccaaattaaatctctacgtggcagtaatccattttctttccttggtgtgtggttggaagattaatttgagataagtgttcagttctgggctgggcagtcgtgccgggcacgggaaattcaggttctttaagggaaaggcctgatgtgctaagacgaaatctataccgtgtgtagccgcttatgagaatatgaaactaaggagagccacaggtaagtatacgtctatgaatgcgaattaaaacgggtgacaatataaagagagattggtgtcacaaatggtggagtgacttttgtatttcagcagacctcagtgagaaatggtcaccaccactccctagatgtgtgaccttgagtgagttgcttaacctctctgatcctgttacctcatctgcaactggggatgagaatatatatcatagcatgccctgggagaagctgttcctgaccacctgggctatggtgattttgacttcctctgtgtcagaagtacccccgtctcatgcctgccatagttgtctttttgttttgttttgtgatttcagatggactcaccctgtcacccaggttggactgcactggcctcaacctcctgagttcaagtgatcgtcccacctcagcctccccagtagctgggaccatagctgtgcagcatcatgcctggctaattttttaagttttttgttgagatggtggtctcgccctgttgctcaggctggcctcaaacccctgggctgaagcagtcctcccacctcagcctcccaaagtgcttggattagaggcgtgagccaccattcctggctccttggacaatattttattcctcagattaagacacgtccttgggatggggctgcattggataattcaccgaaggcaccgctgaatggagtgggccctcagtaaatacctggaggaatgtgacctggccagtgaggttattttcttttgtaggtgaaaggtgtagcagtcactcggcctacacccacagcatcgaccttgtgaacccagcgacctgactgccttgggagaattgaagcgaatgagagtggggagtgtgagaggtgcgtttggtgcagcatttctggcatgggaacagaactggccaggaggaagtgacgtctgggttctgcccgcacacattcctcgccaccttcttggtgtctgagaacctccagcttcacctccttttctggacccgagggcctggcggagcttccagctgggaccagacctccatggatccactccagaaacggaatccagcatcgccttccaaatcttccccgatgacagctgcagagacttcccaggaaggtccagcgccctctcagccttcgtactcagaacagccgatgatgggcctcagtaacctgagccccggtcctggccccagccaggccgtgcctctcccagaggggctgctccgccagcggtacagagaggagaagaccctggaagagcggcggtgggagaggctggagttccttcagaggaagaaagcattcctgcggcatgtgaggaggagacaccgcgatcacatggccccctatgctgttgggagggaagccagaatctccccattaggtgacagaagtcagaatcgattccgatgtgaatgtcgatactgccagagccacaggccgaatctttctgggatccctggggagagtaacagggccccacatccctcctcctgggagacgctggtgcagggcctcagtggcttgactctcagcctaggcaccaaccagcccgggcctctgcctgaagcggcactccagccacaggagacagaggagaagcgccagcgagagaggcagcaggagagcaaaataatgtttcagaggctgctcaagcagtggttagaggaaaactgagacgtgcacccccatgggatggagacccgaagggactcagacggagccgccgtgttggcagcgcctgggtgtgggcccattttggggaccaaacagcaagctgtggtcggatgagtgccaggacctgtgtaccgggacacgtgggagtcctcccagcatgatgcttgactgacccgaggaaggtcctcatgtttcgtgcctgtcattctcggatggctgtgaggcattccttggcaagggacgctgcgtaccagcggtcctcaccgcatctcacatggctcctgtgatgcatgctgtcgctttcccacccgggatctccatctctcttcccttcctgctgtcagtaagagatcacatgtctgtgtagtgtgaatgccttgtcgctgtcctgtgcttttgcaccattgagttgactgcctctgagaagcagcactaggcctgttgaaatgcaatgtgctgccctgagatccagtttcaagaatgggcaggtaaacgcagtgtgggaaaggaatgtggaatgagaacttggtggttcaccgctgtactatttgtgtaaatgtttacgtatgtgataagctacatgtatgtaaatgttgcaatacccctaacagtcgagtagtagtctcccttacaggaatttttgacggggttcctcatcatcaataccaaataaatatatgtaggaatggaaaaaaaaaaaaaaaaaaaaaaaaaaaaa

SEQ ID NO: 28650 - DNA, 5257 bp, Homo Sapiens
cgggacccccaggtagggccactcccacacatgtgcacacccacactcataccccacataggcacaggcaggcttactcccacctatgctcacacacacactcatacccccacaaaggcacaggcaggcgcttacacaccccatgcgcgcacacacactcatacccccacataggcacaggcaggctctactcccacccgtgcgcacacacactcatacccctcacataggcacaggcaggtgctcacacacacgtgcgcacacacactcatgccccccacgtaggcacaggcaggcgctcacacacacatgcgcacacacactcatacccccacataggcacaggcaggctcgctctcacccatgcacgcacacacacactcataccccccacaaaggcacaggcaggcactcacacacacatgcgtgcacacacatacacactcatacccccacataggtacaggcaggcgctcactcacacatgcgcacacacactcatacccccacataggcacaggcaggcgctcacacacacatgcgtgcacacacacacacactcatacccccacataggcccagggatgcagcgccggcgccgacgagtcctggacacatctgtggcctatgtccggggcgaggagaacctggcaggctggaggccccggagtgacagtctcattctggaccaccagtgggagctggagaagctgagcctcctgcaggaggtggagaagactaggcactacctgctcctgcgggagaagctggagaccgcccagcggcctgtcccggaggcactgtccccggccttcagcgaggactctgagtcccatggctcctccagcgcctcctccccgctctcggctgagggccgcccatcacccctggaggctcccaacgagaggcagcgggagctggccgtcaagtgcttgcgcctgctcacgcacacattcaacagagagtacacacacagccacgtctgcgtcagtgccagcgagagcaagctctccgagatgtctgtcaccctgctccgggacccgtcgatgtcccctctaggggtggccactctcaccccctcctccacttgcccctctctggttgaagggcggtacggtgccactgacctgaggaccccgcagccctgctcccggccagccagcccagagcccgagctgctgccagaggccgactccaagaagctcccttcccctgcccgggcaacagagacagacaaggagccccagcgcctgctggtccctgacatccaggagatccgagtcagcccgatcgtttccaagaaggggtacctgcacttcctggagccgcacacgtcaggctgggccaggcgcttcgtggtggtgcggcgcccctatgcctacatgtacaacagcgacaaggacaccgtggagcggttcgtgctcaacctggccactgcccaggtggagtacagtgaggaccagcaggctatgctcaagacacccaacacattcgcggtgtgcacggaacaccgcggcatcctgctgcaggccgccagcgacaaggacatgcatgactggctgtacgccttcaaccccctcctggccgggaccatacggtccaagctctccagaaggaggtctgcccagatgcgggtctgaacctgagccctcccgtgacagccggcaggcccagcccatcccctccctcatcctcgtctgtcctgtcacctgccgcccagcccctctcctgccagacagcccacgaccgggtcgaccccccaggggacgcccatgccaggcccggggacctgtgccacacgaccagctgtgctcccagcagaggctgtgcgtgtcagttcttcttgcagaatgtgctctggtggaacaagttgggagaggctgggggggccaagggcacaggttacgggggttcttgctgccgttctaatatttttttaagcatagacagacttataattaatatacgttagttagtgacattgaaacagtcaactcggaaattaactataagacttgttctatttataagtatttatttctaatgcctccacatagccctgtaatattcagatggaacccccaaccacctccaccctgtttgttcccacatgtgtctcccaagcctgctagggacaggcagggcagggacagccaccttggaaggccgcagtgaggagctgtctggaccagtggggcaccttggggctagcacacgggtgtatcgcctgggccccaggcttctccatggccacatgggtcctgggtgtatgtgtgggagagtgggggggtgtctttggtgcctgaagtctgcgcggcatggagggtggtgtgagttcctctggtgggagggagaacgcacatctcttctgggcggccacctgaggagtgactccaagaagagttccggcagctttccccaggaaagggtgaggggtgacactcggctctggctctgagatgaggcagacggcacccaggctgtgatctgtcctgggcggggaccaggagggagcggggtcgggatcacctgccagtgtgcagactctgggactgcgtgctgtctccggaccatcagggtagggtggtgggttgagaccaggaagtcagggaagatcggaattcagggcgacggtctaggtgtcgagggctgtggcgcagcctcttcagctgcggcgagaaatggagtgagtcaaggtagcttctgggaagaaatgctgccattagcaggtttcttgcaaagactttcctctctttgttcccagggcagagagtttctgtgagtcccactgagaaaatcccatggggtgggggtatcctggtcggtcggcaatggagggtggctggcttggtggttattgtcttcaaggagctcttcgctgctgcatctgcggtgtccctttgttcttgtcccatttcaccccctctgcagacaccaatgtccgagggccacccaggacaggacgggggtcagccccaagctgagagtctggtcataggagtcatgtccagaggcctagggaggttttagggccctccccacccacacccacaggtcgatttggtctctttttagctcaaggaaagacagtagccaagcaacagagcccctctcccgccgtggcccgtgggagcagttacatcgggtctggtgctccagacctagggcccagcactttcatcagatcctgcctcctggagtgggggaaacgcagcaccccactggttctgaggcccctaccctcccaggctgtcccacgtgatgctgacatgagcctcagagaccccaatcccatgcctgggggagagacagcggctcaggagtgggggagcacgggccttctacaccacatgggaaggctctggcatgaggttttcctttgggaaggttgtttgggcccctgaagttccatctccgagagtggtgtgcagggcaggccagggcccatgctggctgcagtctttgtggctgcctgcctgggccagcctgtttgggagctgggactgtgggctcgccttttcgtacctgggctcaggtgcggtgtggccaccgccaccctcatcccctgcctgggaggctctcccaggggctgatgggggggttctgtgagggagaatcagggctcgggaagccacgcctgggaaggcaggacacaggacacagcagctttctttggaaatctcccaggtgaggattcacatcccaaaataaaattcagaagccaggtggcctgtgctccccatgggtgacctctggaggcagtggaccaagatgcagcaaggagaggatgcagaacagcttcttgcagaagcacctgctccggcatccagcgctgcctggaggcaggaaggagaggcagggcaggacacgctggtctgagatgagggggagccccatgggccccaggcaggctagaggaggcacaggccctgccacggccaactcaggtcagccagcctgaggctgtggcctccaaagggtctgggcgcaccccccaggtcgcaggtgtctgaagccagccaacctgcagagcactcgcggcgtgggtgggctgagtggaggtgcctgggagctgcctaaattcagaagcctccactgccatggagactgcctggctgtgtcctctcagccaggtgccgtgttggccttggctaggacccagagccacactgcagcctccgccgactccctccttccgggcctgctctagtgaggagtgcctaagccaggacccagaaactcagagttgatggtgagaggaggccgcctgagtcaggacacctggcttcttgaaaagttcgctctgccagaaaccacctagggaccacgttagctgccttccttgagctccccaggagtcggtttccacatctgtgaggtggagggctggtgtggaggtgctcatggggtgcggtgcttgggagacagccaggcccagggtggctgctgcttcctgctaagtgggggaggtgagacagatctggaaagccgtctccctcagatggtttcatttaatgctttatactgccgagtctgggggcttgttttggtttgggggcagccatcctccaccagaaagggggagctccttccgctgcggctccagatagatggggatgccgggctccaggccgaccagcacttgggatctgatgggacacggccagtgcctaggggtgccaagtccaaggcctcccactgggagtcatcgctgagaagatgccaatgtttcatccaccggctgcacaggcacaaactcccccacccaggacggctgtgatgaggtggccctccctgtcaaccctggtccctggagtccccagcacctggggccctggtggggctgatgtcacaggtgtttactgtgctgctgcactggtcctatgccagcctcacccatgtggggaccacggaaggcacactcccttacccccggtgccgggccgtgcggtcccccagacggacagcagctgtggcgacctgcgtttctccctgggcctgtgcttcctgtagttagtccgtcccctggttcccctgtggctcggaggccgcgtccctggcttgtacatatgtgattgctgtgggcacaccccagaccccatgtcatagctgccgtcccgacgtcacgacgcctgtcccgatgtcttacacccgagtgttagccctaggctcctgtactgtgcgtgcacttgaggctctgtccaattaagaaataaatgtggctcttactcaacacagaaaaaaaaaaaaaaaaaaa

SEQ ID NO: 28651 - DNA, 3264 bp, Homo Sapiens
ggcggcggcggcggcggcgcgggcggcatatgatgctgagctggctgctccagaatgaaccacagctctgagaaggggaagtagaaacagctggcgccctgccatggcctgtgaaccacaggtggacccgggggccactggcccattgcccccctcctcccctggctggagtgccctgcctggagggagccctcctggctgggggcaagagctccacaatggccaggtcctcactgttctccggattgacaatacctgtgcacccatctccttcgacctgggagccgcagaagagcaactgcaaacttggggcatccaggtcccggctgaccagtacaggagcttggctgagagtgccctcttggagccccaagtgagaagatatatcatctacaactcgaggcctatgcggctggcctttgctgtggttttctatgtggtggtgtgggccaatatctactctaccagtcagatgtttgccttggggaaccactgggctggcatgctgctcgtgaccctggccgcggtgagcctgaccttgactcttgtgctggtctttgaaagacaccagaagaaggccaacaccaacacggacctgaggctggcagctgccaatggagccctcctgagacaccgggtgctgctgggggtgacagacacagtggaaggatgccagagtgtgattcagctttggtttgtctacttcgacctggagaactgtgtgcagtttttgtctgatcatgttcaagaaatgaagactagccaagagtccttgctgagaagcagattgagccagttgtgtgttgtcatggagactggggtgagccctgcaacagcggaggggcctgagaacttggaggatgctcctctcctgcccggcaattcttgtcctaacgagaggccactcatgcagactgagcttcatcagcttgttcctgaggctgagccggaggaaatggcccgccagctgctggcagtgtttggcggctactacatccggcttctagtgacctcccagctccctcaggcaatggggacacgacacacgaactctccgagaattccatgcccctgccagctcatagaagcctacatcctaggcacagggtgctgcccgttcctggcgaggtgacctagggatgaaggtactcatcttccttcaagactgagcagtcaggaaggcttcaggagcccaagatggccaatggggagccccaggtgaggagagaagcatctgggggcactccaaaaggggcctgtgatgtcagccactggggtgttgtgctcacttcagggcccagcacaaaaatccttgtttgacatctcatgctgaccccctggcctttgcagaagctgatggttacagagctagtcccaccaaagctactctctctgctgcttagaactgtggacacgtatggaaagactggacccccattgctttcattgttcagagaacccaggagacatgaagatgaccagactgggcaaattatgtgtccaaaacttggcctcagatgatgtttccatctccaaccccttcatgccagatggggaaactgaggctcagagaggatactgctctatgtggcattgccttgaacccctaaaattatcagacttcctttttccaatataaagaaaaaaagtaagttttcagaattctctcaatttttaagtttttctcccccatattttgtgaaaagcagtggtatgtgtacgtgttgtctaccagtacacaggctgcagaagacagagacagaagaaagagatcaagggcagataactgttgataggaatatttgagaaagattgatcctgtttgacttgaggacttattttgttcacaggcatgcacgcttgtggttgtggttttatattacagatgtagaacaatggttatgtttcccgacatgaacattgtcctggaatgaagtgtgatcagccacttgtggaattctttgaagagctcagaggcttccaagtgatctgctcctgaacaagtttgaagacctattgtttcatagacccaagaccaaacgcatctaaaggatccccagcccccaagacctagcctttgtctgcgattttggcttcatctcccacaaaacccctttatgagttcacgctctttcctggactgacatacctattcctttccatttgttggactcctattcatgcttcaaagtccagctttcttaagcccttctttaggaagccttcccacacagccaaccctgctgctctctgcctcctttaaattcttgatacagctgctgcttgttctgatgttttatggtattgattctgttttcctgtgtatatgccagtttttctagctagactgtaaactccttaaggacagagactacaccttgtactttttgtgcatgacctggacctgctaaggaaaaaaaaatcttgtggattgattgctttgccatccccacagcagcttttgcaaattgctttccaaactcacttgaatgatgacattgctgtggacctgggttctggacctgatctgccacttcaagctgtgtaatttttggcaagttgctttctttgcctggtcctcagtttgcccatcaatataatgggtggattggatgatttttttttttttaattgagatggagtcttgcactgtcacccaggctggagtgcagtggcgcgatcttggctcactgcaacccccgccgcctaggttcaagtgattctcatgcctcagcctcccaagtagctgggtctacaggtgtgcaccactactcctggatatttttttgtggttttagtagagatggggtttcgccatgttggccaagctggtcttgaactcctgacctcaggtgatccacccgcctcgggctcccaaactgctgggattacagacgtgaggcaccacaaccagcctggatgattcttaagggcccttctaggaccaaagttctgggaatttctagcttattctgccccctcatagcccttggcctatctatctttatccacatgcagaaacatctggcaaccccacatggctgagatgacctggtcctaggacacccttggacagaagactggcctacctagcagacctggatttttcttcctgatctgctgcttccaagttgtgtgaccttggctaagtcacttaacctttctgattgtcatttcgctttttaataaagtgggtctggtgaacaagaaatgtaataaacacgtggcttgccattcaaaaaaaaaaaaaaaaaaaaaaaaaaa

SEQ ID NO: 28652 - DNA, 3350 bp, Homo Sapiens
ggcatcggagcagtagtactgcttgtactgtgcgttttccatatgtgggtaagctggaggttcatggttttggtaagtatgtgcctaagatgcatggcaattaggtaaaactaatttgcagttttgtttttgtttttatttttttaacgtttgatgcctcttgttaaagttttgatctcttttctgaagcagagaacactacttttctggtattgggtttctatattattaataattgaccaactaacatactttatataaaagttttaagtaagaaggaccatgtaactgaaatgttgtgttatgtaatttaccaaaatggcaaacattttcatagagccagcttcccccaagaagagcttctgtcattgtttcactacagggctggtggctgctctgatctcatagaattcattcctctgggtagcaccatatgcaggctttgcgaataaagtgatcatgggctttcttgattccatttggccaatgcaagaacttcattggctcccctctaaaaaaaattccatggattgctgggatttttattttttattttttgaaaaaaatggtacctatccgtattcagcttggtggcttcacagtccctcccctgaacatccgtatattccttattctctcatttatggtgcagaacactggggtactaacctctaggaaactgttctagctgccagggaaagctaagagccctcctttaacaggaaagcagcagcatgctttttcttctctctgccgtttcagggaagagcaccttaaggccagtgttatttcatgggattctgtcctagagctgagaaagtaatggactcatccataatctcttttatagatttgaaagtgtaaacaatacacacttccttttttggaactccaattctaatatgtttctttttcattggaaattgaaaaaccaggctggttttgagattagtactagcagtgagtaaacctcctgtctgtggacttaaatccttttgaggaacatttcgttttagatttttacaagttttctaatctggcacgactttcaaactagcttaatctgttcttacagaaacctgtgtaaggacagactgcccacatacgggctccccaaataaaatggcatttttatttcttgtccctgctcgggtttcaccgaaccttggtagccataatcagaacaaatgaaacacagtcaagttgttgtgttctgtttgtttttacctgccagccagctgatgctgacatttatacaccaagatgatccaaggttttggtgacgccggtggggactgccgctatatgtgcagggtgcccgggggtcatagtaatgttaatggagtaccagaatctctaacagtgtggtcctgtgtagccacattgctacacttacagagatgctttggggcctttttggattaagacagttctaaaagaccaggcctcacctatgatctgtgtataaagaattagcatcgcactgtagatctgcaagagaaggccgcctcctgcagtgctctctcttggtgaatgctaactctgctcgagggccttttggggaaaggacagtgtaaaacccttagagaggtaagtttcccacccttccaacctctctccacctgcagcttgcttggtgctgtcaggatctggatttggggggagtctctctgtagtggaaccagtgacagaagctgttctttagaattttcaggatggctgtattctgcggtcagaatgagagagtcaagctgggcagaatctctcgccaagagttcaggtaaggtaatgtttattcactgggaatgctttccacagccagacagctatgctaacagtctcaagttttcttccagtttgtttagatttaaatgatacatttgtaactttttaaaaactaaattttggttggatttttcatgaaaacctcttttttctttatcccctaaaaaatggtttgaaatgtcattgttatttaaaaacccgatgtgttggaacttctttaatctgctgtttcctctttttccccccctttgaaagtttcgcatagtgtaaacattcactatgtcttttaccttccctgctcctcccatctgggaggcgctgatgctattacccagtgctgaaaaatggcactctaaaggtatgggaaggaaggagcccaaggcaaccacctgctgtcctttcagccttcctttggagactgctccatcagtgccgaggtgtgtgggaacaggcttcactgcaccgccatcttactgagttgcttcacgtgaggaaaagggggctttggccctgtgactcagttccacattttggattgcatactggaaaagaagccaatcttcttgctagtaaaccagcaacccggctgtatacagtggtgacccaagcaatggatataaacctaaaaatctgagggaggggagaggtggaatacagtagttcttggaatctgaagtctcctatttgatcaggttatttcctgggacttggcaaaaatctgattggtggggatctcctaggacctagtggacatctggtattaatttaatctcaggaaaaacaagaaattaacccagagagagtctgggttctggaattcagcgtagctacctccagaccgtggtgtctggcctccatttttgtctgtcattcagctctgacttacagctgcagtcacctttgctataaggcacctgggtagaagggtggatgggcttcacatcaatttttttcttcctttagggtgggggattggtttggctttcttttgttgtggctttttgttttatttttgtcaagattgatttttagatgcaaggacttgaaaagacccagaaggatgccacctgtttttccttgaggcctaggattttttattctgtcccgagcagaggtaattcctcacaacttagtgcaccagtagcaccagccattttgagcagagtacctctttggggagcttttcgttttgttttgtttttaattctctttccttagcagcaaggtcttttttcctagagaatctactccgttgcagaatcattgcaacctcaggagccctcactgattgagtgctgtcagcctgatatactactttggactctggaaacagatatgggttctattctctatttctactgtgtgtcgttaaacaaccgtcggagaccagatgacctgttagatggctagtcctgtataactcgactctgtatgtttcaatgtatgttactgcaatgcttcacctgctgtacagtgtttgtgagatgctctttgaagatggtacttttatattttttcattttcaataaaagtacattccttcccgaaaaaaaaaaaaaaaaaaa

SEQ ID NO: 28653 - DNA, 2977 bp, Homo Sapiens
acaaataaaaacaaacaaaagaaataaaaaattcccagagtaacaaagcaggaaataataattctataatccaaaaaacactgggtgatccttcagttggagagaggaggagtcagttaagtagctcacacagtagatatggacaaaccagagttgaggttggttgatgtggcttctaggagttaagttctccacctaaggcaattaagggataattaattgttcttgagggataattagtcatcttgaaaaaaggaaaaagtttgattgggagaaggcacctagggagggaggatggtgcatcacttaatattaaattgcctccctacactatgtggctgagtgtcatggaccttcctccctctctgcgcctttgaactcccactgttagcaaagctggaaagcacacacttgtatctcattcttacaggcatgtgtactacccctcagggtccatagctgttcagtatggcaaagggcagacttgctttctcttccactttgctgccttgatgaggttaacatactggaatgaaagaggagggcaggacatctgccaaagtgcaaggaataagagttattgaaacaattgggaaaaggattgacacttcaggaagctgacctcgaagttgacctcgaactgttcactggtatttaatctgatgcttccctcaagtcctgaatactctttctggaagcagagaggtgaggccaagagttgttctggctcctccaggccacccctccccctcccccagggcccatcaggtaagtgcctgcagaagctagaggcaagtcccagctctcttgtatagctgatgtatgccctgagacatactccatttgtaggattctcctgtgctccaattcaccaaattctgctgatggctcagagcagggtaaagcttctcctagataatccctcccccaaaattgagtcctcggggacagttatttattgaataacctccaggttatctactttgggaaatgcagaaatgctataaactgaatttttttccagcagtggcagaagccagacaccttgaagtcaattgtccttcattctccagagttcccaagtggcatttcagagcacaggaattcactcttccacccagatattcctctcacactgagtcacgcaccccagtttctagcagcagatatcttgaagccaaccaccctaatgaaaaatgcgggtttccacaccagttttccacaccagctctccaaccattaagagtacacatgcccccatggcacacttgggttatcacaataaaaatacgtttatataaagtaaaaaacataatgtggagcaaatatatacatatacatgtacattgttagagttcaagtgaatatacagtttttaagtgtgtaaataaatttcatagcactacaaaaatacaagtcatctgagagacgtttacagtggtccccaaaactataggagagaataaaataaaatagctataggtaattaaaagctaattagataaatcaagtcacagtttcatccttcagattaaggtgctccaatataatccataccacagcaaacaaaatcctgaagaattctgctgccaatcatcttgcctcttaacctcaatataacaagaacatacataaaagagattaccgatttagtaaatgctatcatctcataccccattcacaccactggcctgtgatattcttcccctgggagagatgtcaagatttaatgagattctatcataacctgtagaaaaaatgagcaacatggaaacattccaattccagtcttaggtgagttccaatgaaattacctgaagaactgaactagtgcttttagttaaggggaaaagtgccctagcttttaaaaaatatgtctataaatctagttttaaaaacatagcaattggctgcatgtggtggctcatgcctataatctcagcattttgagaggccgaggtgagaggactgcttaaacccaggagttcaagaccagcctgaacaaaatagggagacccccatctctacaaaaataattttaaaaagctgggcatggtggcatatacctgtggttccaggtacctggagggctgacgtaggaggattgcctgagcccagcaggccaaagctacagtgagctgtgattgtgccactgcactccagcctgggcgaggagagcaagactctgtctcaaaaataaatacataaaatacagcgtccaaaagtgtgtcatcttctttctcttcacaattttataataagggggtaaaatgcctgtgagtctattcattatggaaaataaaaaagaaacaaccatttaaggctgaggcattttggttttctgctggcttttagattattaactgcattaagcccctcactacaacttcaccagtatcctagaaacaatttgggtttccttttaggcagggacaggaagtattcaaaggacagacatatggacagagttaggcccttcagggttgaagtctgtggtttcttgtgtctcaagactcaatgtcttgagaagttggtggaccctgtcctccatccaagaagtgctgccaaggaaaccaggggacctagcaaagagtcaggagaaaatggccaaaggaattctgacattccatacctgaatgaactgttttcgcgagtgctttgatcaccctatcccctatcaaggcgctgaacaggtggcccgcaggaaatctgctgtcgcaagaggagggctttgacttacttcccctaattgttgagtaaaaagtgattctcttaatttctgtattctgtttttcatatcaccagtagaagggtcctgtggatctaaatagagcacattttaaggctacagagtagtagaaattgatgtttagacaaggcagcttgttcaaaatctgaaaggcacacccagaagctttctctaaacattttggctcccattaaaaaaaaaaaaaaaacaaaaaaaaaaaaaaaaaaa

SEQ ID NO: 28654 - DNA, 4199 bp, Homo Sapiens
actgttacaagcatcctcagttttggggcagtgccgtgacaatgttgagccaaaaaagttgccgatcagtgaagaggagcagatttacccttgggatacctgtgcagccgttcatgatgtgaggctttcattattacagcgttattttaaggatagttcatgtctcttggcagtatcaattggctgggaaggaggtgtttatgtacaaacctgtggtcacacattacatatagattgtcataaatcttacatggaatcattacggaatgaccaggttcttcagggcttctcggtggacaaaggagaattcacgtgtccactctgtaggcagtttgctaacagtgttcttccatgttatcctggaagcaatgtggaaaataacccttggcaacgtcctagcaacaaaagcatacaagatctcataaaggaagtggaggagctgcagggacgaccgggagctttcccatcagaaacaaatttaagtaaagaaatggaatctgtaatgaaagatataaaaaataccactcagaagaaatatagagactatagcaagaccccgggctcaccagacaatgattttctctttatgtactctgttgctagaaccaatttagaacttgaattgattcatcgaggaggcaatttgtgttcaggtggtgcaagcacagctggcaaaaggtcttgtttaaatcagctgtttcatgtattagccttgcacatgcggctttatagcattgactctgagtataatccctggagaaagctcacccagttagaagagatgaatccacagctgggatatgaagaacaacagcctgaggttccaattctttatcatgatgtaacatcccttttgctcatccagatcttaatgatgccacaacccttacgcaaagaccactttacctgcattgtgaaggtactttttaccctactgtacacacaggctcttgcagcactctcagttaaatgcagcgaagaagataggtcagcctggaaacacgcgggagctctcaaaaagagtacatgtgatgcagaaaagtcttacgaagtattactgagctttgtgataagtgaactatttaaaggaaagttataccatgaagaaggaactcaggaatgtgcaatggttaaccctattgcttggtctcctgaatccatggaaaaatgcttacaggacttctgcttaccttttctcagaatcaccagccttcttcagcaccacctttttggggaagatttacctagctgccaggaagaagaagaattttcagttcttgccagctgcctgggacttctgccaacgttttaccaaacagaacatccattcatcagtgcctcctgtctggattggccagttccagcatttgatattataactcagtggtgttttgagataaaatcatttactgaaagacatgcagaacaaggaaaggcctcgcttatccaagagtcaaaatggaaattaccacacctactacagttgcctgagaattataacaccatttttcagtactaccacagaaaaacctgtagtgtctgcaccaaggttcctaaagatcctgctgtttgccttgtgtgtggtacttttgtatgcctgaaaggactttgctgcaagcaacaaagttactgtgaatgtgtactgcactctcagaactgtggtgcaggaacaggtattttccttttgatcaatgcatcggtaattatcatcattcgaggtcaccgcttctgcctctggggttccgtgtatttggatgctcatggagaggaagaccgggatcttaggcgaggcaaacctctctacatttgtaaggaaagatacaaagttcttgagcaacagtggatttctcatacttttgatcacatcaataaaagatggggtccacattacaatgggctgtgactctccacctcagcattgcatcgtatcatcattttcgctacgaatttatttttcaacaataagctttaacttaatttgggggattaacacttttgctgagggagaaaaagaaaacatacattatgaagcctttccaaaattaggtgcttggtaatcacgttaatggtataattttttttttttaatatctggagaacattaataacaagttaaattattctttagtggtcattttttaagtgcacaattaataagaagcacaacttgttcacaaactcattcagaaatgattctcccaacaatgcatatcagctattcattgatacttagagtgggtgtgatttatttgacattttactgcttctttctgtctgtgtgttttaatttgcatctgccaagcataatgcatcttttttcctctgccattcttgtgttgattggagaatttttctgtatgtaattagaaaaaaatgtaaaacatgatttatgtgaaatactgtatagtaaaagttggtctaatagtagaactttaaaattttttcttattgtgaggaatctgttaaaagtttaaagctttgctgaaaactgaattcattctcaggaatttcataaatcttctccccaggtaaataattgaaatagctgtaaaataagtagatagctgctgttaatataatacagtacattttggggggcatatgtgtggttggggggtccttaaaaatcaaaatttgccatttcagttggatgaattactagaggtaataacaaatcttactataaaatcaagaggtttaagaacatacactgggcagatgttgattccgtgcatgcccaccttttattaccaaacaaggttttgtttatatgattgtattagaaatgctcagactcccccagaaatgaaccataaattttggaacttcctttcagctcaagaggttcagctatattgtatttgtgcagtgtaatcactactatttctgctcggtttcctaaaaggaaaaaaaaggcgcagtggtgatgaccctcatgaatgagccacgcttctgcattcttcttagaaactgctgtgaaaaacaatttatgtttgcagggtttaaaaatcagtaaaaatgggaatgattgagctaaaacccactctatgagaaggaagattactgaaaagcatgtgacatattgctacaaagattttttttcctaaatgattcagtaattgaatgattatttaatatatagtgctatcaagcaatccctggtactttggacttccatggcttgttatataaaattacatttttacatgtaaaaataaactaaacaaatctaatgataaaatataatgtcagatccatgttctaaaaaatttttgtaatgacatgacattacaagagtataaaaatggacattaaatcatggccttgcattaaaatatggaaagcagagcagtacatattcaaatgtattcagaaagtcaaaagattacctatcgttctacaataaaatacatggaaatagcttgctatttttatatacatttccaaaatattaagataactttctgtaagagtcaatgattctgttcgactaaatagctgtcctttccaacacattgctacttttttaaatactgtatcataagttcagcctgtcatactttttgcattgatcgttatgaataccagaccatttgtaagtgtggttgaagagcaaaatgctaattgacatctctagtaaatactgttacaggattcatgaacttgaataattctacagtttgaaactctgatgctatatatacatggtataatgtattcagactttgattactacttatttaaaatggaatgttttatggttgtgcatatggatgtgaagtgaaaatattagccttaactttaaaatttgggtgtttgatagtgtttattttgatattggtgaattagtcaccagtaaattttaaaaaagcacttggttgaaaattgtacttgaatacatacatgcatgctgctaaactagaactttaatttttccccataacttttataagtcccatttataaacccacttttaaaaataacaggtccaagttagagtgatgtgtgtatattattcaaaaaaatgtactggtgtgatatcttgtatgaatgatcatttaaatacagtacattactgtagaagctaaattgatctttataattaagcagaaattacaaaactaggaataatcaacattgtaagatatgttaataaaaacctgctgtcatttggtttgtgaaaaaaaaaaaaaaaaaaa

SEQ ID NO: 28655 - DNA, 3299 bp, Homo Sapiens
gtatacagagcagagccaaatctgtgggggctgtgggaagaccaggaaaggcttcatataaaggtgactcttgagtggagtcttaaaagatgaatagatgtatgtggaaggggaattaagtaggtactctagggagaggtagtgttaccaaaggcttgactgcttttgatggcctgggccagggtcaataacctgaggtgaagtagggctgggaagcctttaagacagacatggacagatggctcttctggccttgagtcttggccttgagactcattagctgtgtgagcttaagcaagtcatttagcttttctgggccttggtttcatgtataacgaagaggtctggccagagggtctccagagttccttctagatatgacatcctttaattctaagtagagcactagtctggataacctccacaagttgcttccatgaatccacttacagcctgtgcttttccaactgcaaaactgttacagcaatactctaaaccattagcaaaatgatttatacggaatgcctaacattattaaggtacccatgtggcctggtggcattgcttggtgtagttgatgtgttgaaggatgtagacacatgcacattttataccattctctcattaattcagagccgcaaggttttagcaggttctcactgcctcagtgaatgatgatacaaaatttctaatagtgatgaaaagaggatgagattttctgttagggatggacatggattggcactcgtgtgctcaattttgatttgaagtatttagaatgctttagtccaaaatactttcattccccctcatattgtatcaatgagttgccaaataacttgatgcacaaccccctcatgacttgtagtttttagatctcataacacccttaatgacttcgtgattataaggcactttcaagtaattaaaccatcaatagttactattctgggttatttgtaacctgtaaaatgaaaccccgccaggattacaggcacagaatttagggctcttcacggtttttaactattttgtacatgggaaacatttgagactctttaataaaaagaataaccaattaactgtggtattgagattgtatttcttatctctgtagtttaaccttaagtataatttcattaaatctgcttggatattttgcatatgcaaaaagaaatatctgctgttcggcaagcaaatatatgcttactactacataggagcgttgttggtggtgagggtctagaatggggtcattacaacctctgctgctgggtgcagtggcctctgatattgcttcggatcttggtcctgttgctcactttgcaaggagaagcacagaactactgtgtccattttgttcctctctacaacaaaggcagacaagtgtagcagctggttacacaatttttctagataaattacaaaatgtctgttacaacaatcatgataataataaccatatcatctttgtggacagcagggaagagttaggaactccatatgtgaagaactcagtctcctttaaggagaaggtgacttcttgttttagaaaacttgcccgttactgtttaacatcttcgagttgatacttcgagtatggcttgagaaattcagttttgatctgtgcatcacattcagggaggtggtatgaggctcctagctgaatttatcttactggaaatctttttagtggtacctctttctcttatcgtagaacgtacatacagtaattacccccttagccattttaagtgagcatacaattcagcagcattaagtacattcacattgatgtgcaaccttcaccactacccatctccagaactttttcatcatcctcaactgaaaccctgaaccagttaaatattaactccccataccctactatccctcactccaccccatgccctgatctctgtttaaaaaaatactgttagtaaacttaaaacttaattatagaggtggtggtttcctgggtcatgtcctgcaacactggatctgcaacaagcttgaaatgggtctgcatgtctgtctgtccttatgttggcgttcctccaaggtacctcaccaacagcccactttattatctgcaggtgactgaccgccccacaactgcagggctgcatcttgttctaggaagctgaaaccagctgaagcccttgatttttctaccctgtttatatctaaataaaacgatccttctcaggtagaagtccacaaaaaatacgcaagcattttgtatgaatcctaaaagaatattgtgtatgttttctgatatggtttggctgtctccctacccaaatctcaccttgaattgtaataatccccggtcaagggtggggccaggtgtagatgattgaatcctgggggcagtttccctcatactgttctcgtgtagtgaataactctcaagagacctgatggttttataaaggggagttgccctacacaagcgttcttgtctgcaccatgtaagatgtgacttcgctcctcattcacttccggccatgactgtgaggcttccccggccatgtggaactgtgagtcaattaaaccactttcctttataaattactcagtctcaggtatgtctttattagcagtgcaaaaacagactaatacattttctatattaaaatgtctgggctgtggttatttttattacaattttacaaatgagatttctctttaccttaaatgtatcaactattttttaaagcagcaaaacatttttcccccacaggaaactccagtatttgacacaatagcaggatgttctgggaggatagttaggatctacctcatggagccgtccctttgccgacacaacactccccgatgcacctctacctccctccacagagtagccccacacttggagctccagggagcacagttctacatccccagtcacaggttcctatgacatgacctctgcctccccctccagcctcatctacggcccatcccgattcccactgtgtccatctatggtagcacattgcggggcattcgtgcacactgcacacggtgtctgtttatccgtgctgtgcccttcctcaccccctgttggctagcaaccatactatatccttaacacttggttcaggcagcacctgcccaatggggtttgatggttttccctgcctcttctctccgtactctgacctgtttgtaatcctctgtctggctgtctcctattccaaactgagtcagggacattaccttactgtttctctagtaccaatacagagtaggtagttataaatatgtaccgaaaaaaaaaaaaaaaaaaa

SEQ ID NO: 28656 - DNA, 3967 bp, Homo Sapiens
gtacctgattcgcctgccagaacacctcagcctcctgaaatgaatcctttgtcagcagttaacatgtttcagaaacaaaattcaaaacccagcgtgccagttagtattccaaaaagcaaagaaaaacagggacgtccaccaggtgcattggtgccagcatcttcactgaaaggaggtaatctgggctctatgtcagtccgttctaaattgccaaattctccagcagcatcttctcatcccaagctcaagtcttcaaaaggcataacgaagaaaccgcaggctccttcaaacaatgcatcatcttcacttgcttcattaaatccagtaggtaaaaacacttcttcaccagctttaccaagaactgcaccttgtatatctgagtcaccgagaaaatgtatttcatcccccaatacccccaaggccaaggttattccagcccagaattcagcagatctgcccgagtccacacttttgccaaataagtgttcaggaaaaactcaacctaagtatttgaaacataatcatatttcttccagagataatgcagtatctcacttagctgcacattcaaattcatcctcaaaatgtcccaagctgcctaaagcaaatatacctgtaagacctaaaccttctttccagtcctctgcaaaaatgacaaaaaccagttccaaaaccatagccacgggtctaggaacacagtctcaaccatccgatggagccccacaagcaaagccagtcccagcacagaaacttaaatcggccttgaatttaaatcagccagtttctgtgtcctcagtttctcctgtaaaagccacacagaaatcaaaagataagaatatagtttcagctaccaaaaagcagcctcagaataaaagtgcatttcagaagacaggacccagctccttgaagtctcctggccgtaccccactgtccatcgtgagcctaccccagtcttctaccaaaacacaaactgcaccgaagtcagcacagactgtcgctaagagccagcattcaactaaagggcctcccagaagtggtaaaaccccagcttcaatcaggaaaccaccctcatctgttaaggatgcagatagtggagataaaaaacctactgcaaagaaaaaggaagatgatgaccattattttgtcatgactggaagtaagaaacctagaaaataaatacatactcattataaaaaaagagaaaaggaagaatgaatgtgttagcttcacatcttaaaagtttctcctatttgtgtctgtctaaataggtgctgacactaaggatagtgaggatggaggctgggatgaggaaagggttcatcagaattcacatatctgaattcactggaaagagcccttctgaagcaaacagttgtaaaatcactgcaaggtttttattaataatagacatgtatatgattttcagtctatagcatctttgttaacatctgccttttgcaggaaatgtaaaagttatttaacactacaagaattttaacaatagttgctctatttttgaatatgtattaaatatggagttcatatacctgctaacatcaacggtggtgctcttactattagttaattgcattttggttaaaaaaaaaaaagcaacagtttggcacttgtcctacaaaaggcacctaatttaattttctgatcaggattgcctgatccaacagtgctaagtcatggctgctgctgactagcttggcattattctgtgttaggtagaattcttattatttatttttttaagctttccaaattggaaggaactgattgtttcatgtggcttatatttacattggtaatattttgtcaccaatatttttggttaaaaaaaatccaacaaattaacttactgaaatataaacaaattttgtaaacaattttttatattatctataaaaacgtagacaccttatgtttcacatgttgtgcaatgtgacaggggaagctgatttagtagcttttagcatattaaaaataattttttataatgtaatttcctgtgagtgcagacctgacattttacattaaaataatgtgaaacatcagaattatgttttaacaactttaaaattaagatgatgttaaaataattttagagttatgctatgtaaaaattctatcatgaaattatttttctctagatagcacaataccaattttaattaatttcttccaattaggttacttttctttaataaagttatgctgccttcagttttccaatggcaagtagacaggatatgttcaaggttttctgcactgtaggcacagtctctcaagcatatcctgatcatgtaatgactgcataaactccatcaacctaaggtgatacttgtaaataatttatttttaagggatggtgactttaaaaattattaatgaactttgagaagttttaagagtgcttttaaaacttcacagtattgccaattatcttaggttattcagtattcaggtttgtgtttctctgttttaaactaaaatgtgttttctgaagaaaaaaataatagtttacacaaatgtacaatcatagaataagcattttaagctggcgactagtgttctatagattacaaagcaagaaaactttctatgaagataaatgaccttttgcctgaagagtacagataaaatcaaagatgtgtgcaagctagtttttggaagaagtgatgcttctcttctttaaagagacagtcaccaaatacttggtttaactcgactattgacttgggcattgagagagatgatatatacatctttggaaagtgaagtcaatgttcaagaggtgatagaagctttactttttagtgatcagaaatatttagtgcatcttttcagacaggaagaattttatcatcaagtattcccttataaaaccaagtaacgcttctttatcagtaacttttagaacttaaaagaaagcaaaaagtaaatggaattgtaggcaatttatgaatcctagtagattttacaatatgtaatttatgttgtttacagtatataaacactaagttttgtgttaaatgtgatcaggaataaaagtatcccacaggcatctgacacaaattccagaattagccaaagaattgtttatttgaggccaggcaatcccagcattttgggaagccaagttgggctgatctcgaactcctgacctcaggtgatccacctgcctcagcctcccaaagcgctgggattacaggcatgagccatcacacccagcgaaaagttttgtttgaataaacaatatccgaaagacaattagtttcttcagatgtgttttgaaattctcctaaagagctagtgtttctattcattttcacaatttaaaaacagctcttaacattgctgaagttgggagaactttccatctcttcttaataacagtgcaagattttgtaaattcttttttgtgtttaatgtttaataaaacgagtattaagcttaaattactgaagtacctgggagaagtaatgatgtgtactttcaaaaaaatggaaaatgcttttattttattttctataatttgttaacatgatatgtaaaattaaacttcggagcacaatgaaatgccgattatttttaccttgtttgggcttaaagtaggtatttaaggtttatgtgttcaaaatgccttggtaaattggatgacctctaactttactgtccatatggagtttgtcattctttatggataagagaacttaaggaaaagttactgtttttcttcagtctttttatatctatctgatttaaaatctgttactttattaaaaggcttcaacaacaggttgttaggatgtagtcttacatccaggttcacataataaccccatttgaatccaaatttgtgtatattttcttatgccagcagtatttgtatccaattttaacttaggtttgttttcttgagtattaaaatttaaacatataaaaaaaaaaaaaaaaaaaa

SEQ ID NO: 28657 - DNA, 3967 bp, Homo Sapiens; identical to SEQ ID NO: 28656

SEQ ID NO: 28658 - DNA, 2267 bp, Homo Sapiens
tagagactttcattcaggcttcattctgtccttgtgactggtgtttccaatccaaactcctccatagactgaaccttctgtcaggctgttgacccgcagcatgggggagggaatctaaagctctgacttcttagaccaaccatcagccattcattccattgaaggaaatacctggaaccttcagttccagagcctttccagagtgctagaaattaccttgcttactcaaattcacccgtagatctaggtgtttggctttctcctccgattttagtagccatcttttctggtcctgaaatgtggccatctcttctgcgttttctctcttgaactcctcattatatatgggctttgttgttgttttggtggggggatggctttgaaaatcccttaactgtaattttattgggaattgggacataaatatatgtgtccaacctgccatgtttaaccagaaaaaagaatgtcctgcttaggaccttttaataaagcttccgatccttgtgcttttaaaagtctgtatgttactttcacactttattagtgatggctgctatcgaatgttagtttcacattcattttccctcagagcttggaggctttcttctgttagatgttaagcatgcactgatgctgatgagaagagtgctgtcttcatggggactcctgttcctttacaggtaatctgttgttctctctctggaaggttatatggtctttatccttcattttcaatttcacaaatttgtctctagggctgagagtctttttattcatcctttggtgcttggtgggactgccccaccaagaatggctctcatctctgattccagcttcttctgtaccccgtattaaaggatatggcccctttattctggttcatctatcataggttatcatttgctttcaatcgtaaaaaaaattattcgaactgtaggctgattctgcccacctcacttctcatctgctgtggacttattctcttctgtgaatcgtgtctcttcagtgggatatgaggaaggagagagggtaaacgtgtgtctgtctgtctttcaccctgacctagagtgtgacctccctcacggtgctctttgtctgattgcttggacctcagaaggcccaggtgtttgttttctaagccaacttgtggttgtttgtatgaaccttcactagaatattcttagagggcaggaaccagttttattaacatcaattttgtgcacatctagaaaagatagctaactgaaatttttatgccagatgataaccaaacactttaaattattgctgttgcggtttatgcttaattgtaacattctcgaataaaaaccaaagcaaaactccaaaaagaatactgtgattatagttcaccttattcctttttctattctttttttccttcacttgtttttcacttttctcttcaaaaatggccattatcccttgcttcttttcccttctttcctggtggctgtatttatttttgttcgaattattttccatgagcacttttgaaaatcagtctattaagggattttagagttcgtaaatctttttagagtgcctggggatagggccctaagactaaggtacttattaaaaaagagtgccaagaggtcttatatactttgatttttaaatttgaaaataaaaagttttggtttttcattcatcacttggactacatgtttcagttctgaactatttcccttgggctttgctaaaattaataacaagcttttcaaaactgttatttaacagttaactcctctagcccataaaattttctcaagaatagaaataacaaaaatttaacttcaataagaaagcaattactggtcatccaccaaaaattaaatgcataaggtgaaaaatttattttatacacctcaattatgttaaatgttataacacatatcggaactataaaagcaccattgctttattgctattagtagttgttgtacctatacctatcagttctgaaggatttttttgttttatttttggtgaaattttatcattctctgactggtccagaaaatttgggttattttctagtcaaacaaatatagagcttctataaatgtgaacaaaaagtttatttactagtataaaaattttaagtaacaggccaggcgcagtggctcacgcccataatcccagcaccttgggaggccgaggtgggtggatcacgaggtcaggagatcgagaccaccctggctaacacagtgaaaccctgtctctactaaaaaaaaaaaaaaaaa

SEQ ID NO: 28659 - DNA, 3885 bp, Homo Sapiens
gggcgacgggggaggaggatggaggcggtggtgttcgtcttctctctcctcgattgttgcgcgctcatcttcctctcggtctacttcataattacattgtctgatttagaatgtgattacattaatgctagatcatgttgctcgaaattaaacaagtgggtaattccagaattgattggccataccattgtcactgtattactgctcatgtcattgcactggttcatcttccttctcaacttacctgttgccacttggaatatatatcgtatgatcttagctttgataaatgactgaagctggagaagccgtggttgaagtcagcctacactacagtgcacagttgaggagccagagacttcttaaatcatccttagaaccgtgaccatagcagtatatattttcctcttggaacaaaaaactatttttgctgtatttttaccatataaagtatttaaaaaacatgaattgagtttctgtagatttctagttctcaactttagcctgaacgccaacacttgaaggtgtttttcatcctctgtatgttgaaggtggttatttgtatgtaggaacaggactgccatcccagctttgcatgccaaagaaataaagaacacactttaaagggcaaactgaagagatgagcgagcaaaggtgcccttcaggtctactgaaaagttagagtacaaaacaacactgttgatctggacaaaggaagaaaaattaccctttttgcttgtgttgtgacaacttcatttaatatggtttaaagatttatgagactgtcagctaaaagtcttttcacaagaatgtcaacagagaatggcatctcaaaatatatatatttctttgcacaatttgtgaaaccttataagccattttccccaggtacaatgtagttcctgctgatagaaaggaaatattttgtcaagagctttcatttaaaagctactacctccacaatcacccccaaacccagaaaatccccactggctcttgccagtctggttttcgtattgcagttattccaattgtatttgatctccctgataacgtattttcatgggtttgggtagaagatgctaatcagattagaagcaggaatagttatttgctgtctgtgaaattgagccttttggtgcgccacgtggtgccagatcaacacttctatccctctgcactgaccacgttgtgaactgggagaccaaatgcaagccatttcatggacatagcaatatacaaccaaactctgttccttggagttatattgtaaactcttgcaggtgggagagcagttcacctccttagctctgtttgccagctcttacagggtaaaataaacctggcaatttatcctcagtcctagtttgtggtttaatgttgctatcttaagcactggcatttgggcaaaacatgactgtgttctgtgggagaatccaaaggccttattcactctagttgagatagaattgggtggctaaacagggtgtgtggtacccaaaagattaaatgttacatgtccttttagtccttgaccaggtctagccttggcagaagcaagggagccactaagccaaactccctgtgcagactgaccatgtttcaaggctggaagtagtgccctggcaacacacaaaaggaacggtgaaatggtaggcaaagtgaacttggctctgctggcctctttggggtcacagaaattgctccttgtggtaatcttatatttctgtcaggcacagggccaagaagctgtgtaacagacattactttgcttgcatctctttttcataccttttccctctgaggcagcttttgcttagaaaacagtcccttcactctgcctttcctcctaacttcctgtgcctcttcatgttctgctcaagctttttaaagcaacgaagctgttggagaacttaaatccttgcaactgagagataagctacttaaaggcggtagagatcttttttttttttttttgagatggggtcttgctgtgttgcccaggctggagtgcagtggtgtgatctcagctcactgcaacctctgctttctgggttcaagcgattctcctgcctcagcctcccaagtagctgggattacggctagctactcctggctaatttttgtatttttagtagagatggggtttcaccatgttggccaggctggtctcaaactcctgacctcaaacgatctgcctgccttggtctcccaaagtgctgggattataggtgtgagccactgcgcctggccatgtagatgacttttgaccaaaatgtttcaccttctcattcagatattcttagtaaccaaaacagtgactcatgcagttgagagagcctttgggctgtcagtttacagtacatcaggcttgctgaggctaagcaaatcagaaaggtgccatgtttataacagaggtcaaagctccttacttctgaaacattagctgtggttaaaaacaaaaactcttccttcttgtattgcttgtcaatcaaagccaggaaagtgggggatcactgtagttaaattttttttttttttaattagagacagagtcttgccctgtcgcccaagctggagtgcactggcgcaatcgtggtacactgcagccttgaactcctggactcaagcagtcctcctgcctcagcttcccaagtagttgggagtaggtgcacaccaccatgcccagcgaattttttgtagagacagaggtcttgctatgttgcctaggctggtatcaaaattactggcctcaagcgattctcctgcctcggcctcccagatgttgggattactggtgtgagccaccacgcccagctcaaaaacaatttttttaggggcacttctacaaatcatgaaagggggataaaagcactgactttaaaaagccatgtttaagatgctataaatgttctccccttttcattgattggagagttgtagaggaccttagagatcattttgtctaactccctcatcccaaagataaactgaggcctagagatcgttcagggtgttgtaactgggaacatctgaatgctgaggcctagagatcgttcagggtgttgtaactgggaacatctgaatgctgaggcctagagatcgttcagggtgttgtaactgggaacatctgaatgctgaggcctagagatcgttcagggtgttgtaactgggaacatctgaatgctgaggcctagagatcgttcagggtgttgtaactgggaacatctgaatgctgaggcctagagatcgttcagggtgttgtaactgggaacatctgaatgctgaggcctagagatcgttcagggtgttgtaactgggaacatctgaatgctgaggcttagtccagtgttctctctcccttaccactcctcttccccttccctctataatggcagtacccagggcccggtccatagactactatcgagtgctcctatgtgcatcttagtacgtatcattttcccttgcctttttccttctatcctttcagtggtagcaactgcccttgctaatcaccgtaacctcggctgagaaagaagaggaagcgaaatccaagatgcagctcagttcatcaaagcctagcaggtcccctcagctgccttttcatgcctgccacagactacagtaggacaaaacctgacctggtctttgaagttaagagctaagaaagcttcctatagtagtatctcccatggcacttaccacattctatctggtattacaattatttgtatgcaattaatcactcttagattgtatgttcctggagggcagaatatgcccattcatatttgtatcttcttccttctgctcttggcacctaacacagtgccttgcacacaaacaataaatgattgttgagtaaaaaaaaaaaaaaaaaaa

SEQ ID NO: 28660 - DNA, 4312 bp, Homo Sapiens
gagtcccagaagaaagaggagagacttgctgaagatctggatgggacaatagaagtttggggcacattaaaaagaagcagcaagaacatcaacaaaaacctcagatgattcaaacaggcttcttcttggctttgtggaaccttttgcagttgctcagaatttgagtttttgcttcagaggatgatgagacaaggcaatagagggtgaggaggatcatgttggattcttgcttctctgtctgcctctccttccagttggaaaaatcttcagtccataagaagcattatcaacaagcctgaagaacacatcttaccctgatcctggatgctgttggagttgagaattacatccacttcaccaggactttatggaggctgttcaagaaaaatagaaggaagcaatacttaaggatttctctgtttgcattagtcctgtgccatgttacattttggagattgtttggaacaagtgagggagggctctgtcatcttgatctaggaggatacctgagtcccttgactacacagatgatatttggaaggtggctaaatgtgaacaataatgtcttggaagagaaattatttttcagggggtcgtggtagtgtacaagggatgtttgcacctcgaagctcaacctccatagcccccagcaaaggcctcagcaatgagccagggcaaaacagctgcttcctcaacagtgccctgcaggttttgtggcacttggatatcttccgacgtagctttaggcagcttacaactcacaagtgcatgggagattcctgcatcttttgcgctctcaagggaatctttaaccagtttcagtgtagtagtgaaaaagtgcttccatctgacactctccgcagtgctctggcaaagactttccaggataaagaacgtttccagctgggaattatggatgatgctgcagagtgctttgaaaacctcctgatgagaattcacttccacattgctgatgaaaccaaagaggatatatgtactgcccaacactgcatttcccatcagaaatttgcaatgacattgtttgagcagtgtgtatgtactagctgtggtgccacttctgatccgctgcctttcatccagatggtacattatatctccaccacttccctttgcaatcaggctatttgtatgctggaaagacgagagaaaccttcaccaagcatgtttggtgagctgctgcagaatgccagcaccatgggggatctgcggaactgtctaagcaactgtggagagaggatcaggattcgccgtgtgttgatgaatgctccacagattatcacgattgggctggtatgggactcagaccactcagacttagcagaagatgttatccacagcctgggaacctgccttaagctgggtgatctgtttttcagagtgacggatgaccgggccaagcaatctgaactgtacttagttggaatgatctgttactatggcaaacattattctacattcttttttcaaacaaagattcgcaaatggatgtattttgatgatgcccatgtcaaggagattgggcccaaatggaaggatgtggtgaccaaatgcatcaaggggcattatcagcccctgctgctgctttatgcagatccccagggtaccccagtttccacccaggacctgcctccccaagctgagttccagtcatacagcaggacatgctacgacagtgaagattcagggagggagccctccatctcaagtgacactcgaacagattcctcaacggagagctatccctacaaacattcccaccatgagtctgtggtcagtcacttctcttctgattctcaggggacagtcatctataatgtggaaaatgattccatgtctcagagcagtcgggacacaggacacctgactgatagtgaatgtaatcagaaacacacatccaagaaagggtcactgatagagcgcaagaggagctctggtcgggttaggaggaaaggcgatgagccccaggcctcgggataccacagtgaaggagaaacactgaaagagaagcaggctcctagaaatgcctccaaaccatccagcagcaccaacaggctgagagatttaaagagacagtcagcaatatgatccataacagaccatccctggcttctcagaccaatgtaggctctcactgcaggggcagaggaggagaccagcctgacaaaaaacctcctaggaccctgcctttacactctcgtgactgggaaatagagagtaccagcagtgagtcaaaatccagttcttccagcaagtatcgtcccacatggagacccaaacgagaatctctgaatattgacagtatctttagtaaggacaaaaggaagcactgtggctatacccagcttagccccttttctgaggattcagctaaagaatttataccagatgaaccaagcaagccaccttcttacgacattaaatttggtggaccaagcccccagtacaagcgctggggcccagcacggccaggctctcaccttttagagcagcacccccgactaatccagcgaatggaatctggctatgaaagcagtgagaggaacagcagcagccctgtcagcctggatgcagccctgcctgagagctcaaatgtctacagggatccaagtgctaagagatcagctgggttggttccttcctggcgtcatatcccaaagtcgcacagcagtagcatcctggaggtagactccacagcatccatgggtggctggacaaagagtcagcctttctctggtggggagatatcttctaaaagtgaactggatgaattgcaggaagaggtggccaggagggcgcaggaacaggaacttcgaagaaaacgggagaaggagttagaggcagcgaaagggtttaaccctcatcctagccgcttcatggacttggatgaactgcagaatcaggggaggagtgacggctttgagaggtccctgcaagaggcagagtcagtgtttgaagagtcactacatctggaacagaaaggagactgtgctgcagctttggctctctgtaatgaagctatctctaaactaagacttgccctgcatggtgccagctgtagcacgcacagcagagccctagtcgataagaagttgcaaatcagtattcgaaaagcacggagcctgcaggatcgcatgcagcagcagcaatcaccacagcagccgtcgcagccctcagcctgcctcccaacacaggcggggactctctctcagccaacaaggtagtgcttgggaaccatgttagtttatgaatgccaggggaagaaatgaccatgagtattctgtagcaagagctctcattgtcttggcgactgaaggggagagaggagtcctctgaaaagattttcttctttcaggtcagacatacagtgaaaagctcattgtactgctggtccttatcttaataattcctaggatgcaaaaagtacagcataataagaccatttgtccacatttcccatgggtaactttagccctggacttgtgtaataacgcgattattatatttgtatatattatgttcttagacatggcaatccaggctacatttcatgttgtagtagctaccatgtgatttattttgggatttcagtgcttcctatccttatggaagcagagaaagcagtctttcttgctctgattgcaccatagagaagagacacaaagattccctttgctttgcttctttatggtcaggactaggaaagaagttccagtagtcattgttgtagttctcacatcttagccctggaatttggcttttacttagaatagatgaatttaaataaacattaatttggaccgttaataattctgagtagttttcaaaatataaattagtaaaagcagttaacatttttttttttttttttttttggagacaggatcttgctttttcacccaggctggagtgcagtggcgcgatcacagcttactgcagcctcaacctcctgggttcaatgttcaaaaggcaaatgttcaaaaatagctaactgctaggcatggtagctcacgcctgtaatcccagaattttgggaggccgaggagggcagattatttgagtcaaggagtttgagaccagcctgggcaacacggtaaaaccctgtctctacaaaaaacacaaaaaatttagctgggcatggtggtgcatacctgtggtcccagctacttaggaggcttgggtggaagaatcggttagcccggcaggtcaaggctgcagtgagccgtgatggcgctgccacactccagcctgggtgacagagcaagaccttgtctcaaaaaaaaaaaaaaaaaaa

SEQ ID NO: 28661 - DNA, 10520 bp, Homo Sapiens
catataatagatcagattctggggcaagctttagtattctgaaaaacttctgtgccatccacttccctccatactcccagagtctcaggtatctcccattgtgagctgtggtggagtgataatgacatttctaaccaccttttaattcagcttattcagaatattttatagagtaatggcaaagcaaattttagttgttctttgacttgttgaagtaattatgtctaattataagaagacagattttatttataggtgggaagactcctgtggcagtgaagaataagcaattcttaaccccttcagagctttaggatggaatctgccatcactgattccaatattttgactttattgcattaattcttataaatgtatgttctcataactctcagaaatctatagctagtattgtgttgttctaagtaagtgaaactttttcttggtcttgtataaagttgaatttgcctccagcaaaaaatcattgagtagaaggagagatatatgtgttgtgtatgtcaacagtgttacacaaaacaaaaacaaaataaacaattttttaaagcataggtgaaggcgcagattggaacacttcttaatgaagaacttaatagagagcattgcttacaaaataccaaaacgtcaaggaaaactagcaatcatctgggtactggttttacattgaagatgatggatttactttggagatggttggaaccctgaagtgctgtgggggcaggcccccacttttcttgccctagtcagtatccttggtacccagcatgcaagtataaaacactaataattttgttgtgggaaattttgaaatctcacccttaaaaatatactctgcatcctttgatttactttttttggaagttacatattatattatttggcaaaagttcaattctttttaaagaaacattttaaatttcatgagtttaaatttgattaaagatgaaagaatttgagatttagtgaatttggcttttttttttaaacggctgcaatgcttaggtatagtggcatcacagtaactaaaccagattcagcaaaagctcaagcaagagataactgttaagaggcccatcaggaattattcattttaattgtgtgatttgatgcttctctgggttaatttagaaacaggaggccagtggtgactcatttttaaccctttttagctccctgtgaacactgcctgcctgttttgcatttggctgtgttcagagacaggctcaggtgcaggttcccctttagagtgttacatttcaaacttgcctgctagtgcactaatcagctatgcacctttaattaaaagtgtagggaaaactatagccaggaatgatgattatggctaaatttggctcatctgaggaccctgtgattctatttatcctgtcactacaactgtatcatttaacactagaaatacagagaggctgttctgcctttgggctcatgcttcggtcttctggtgggttgactctggctttttttccccaatctgttttgtccttgaaaggttggtttataaattgttccacaagataagttttctttaactataggaacaaatggacatggtggatggaatgagattgggaaagagaggcctgaaatatgcccttcctatgctaatgttcctgttaacctgggcaaagaaactgcttacttaatctataaagtacttaagctaaataaataaattgataaataagatgaaaatcactcaaaatcattggtgggtgtagaactttgttttttttcaattcatgaaaaatttaataaattaaaatgtggatcttgaaagaaatataactatcatattcttatggcacacgtagttatttttctttcgtcaagtataatattactgaataacttaggtaactagggcagtgattctcaaactaggctcaaagtaagaaaatgtcctccatcccacccctagagatgattattcaaaaggtttgggtggagcctggcagccttcctttatatctttttaaaacaagggtcgtggtctgtcacccaggctggaatgcaatggcgtgatcatagctcactgcagccttgacctcgtgggttcaagcgattagccttctaagtagctgggactacaggtgcgtgctgccacacctagctatttttaattttttttttggtagagacgaggtttcaccatgttgcccaggctgatcttgaatttctgggctcaagtgatctttccacctcagccactcagagtactgggatcacaggcatgagccactgcacccaacagccttccttttaacaatcttctcaggagattctgatgcaggtgctcagtaaaccacccttttgagaagaatccgcttaagagctaaatctaatcttatattcaaattctttcttctacttttatgttttgaacatttatttctcctgatttcgatagacagtttcatgtaataatatatatgccagtgctgccttggagttctcataaaggtacgatatattgcctttcctagtcttaatatgatctatcttttgatgggtggaatcaggaaaccacagggttggtgggaatttttagagataatgtacattcttctgagtgacagatatttggatagggcagagatggatttgatcaaaggaaagtaagagaagacattagtgagtagtggaagacacagagaaggggaaaggctcagataacagagggcactgaagggctggcgagggtttagacctcttctggcaggcgctgagttactatggtgcagtttttgagccggggactaactggatgcaaacaagtgtacacctgagctagagacacacagtaccttgtccagaaacagaggatcaaggaacaggtgggtgaagcaggctggtttgtcaccataaaggcagaaagaaacaagggtgaggacttggggcccagaatttggctggactgactttcaagggtttatgcagtagggttctccaactctgtgttcctaaaggtctatagctttttggtaaattgctttttcctactattgatgttatggtgtatacatgaaggccacctagctcagcttcaggccaggatttaggaagtccttgaataattgctacaactaccagtaccttaatattgtgaggcaaggaaggcacaattattcttaactttggacaagagaaatagactcagagagttaagtaatttaccagaatttacacatgtagaaattggcagggctaggattcaagttcagggcaacctattcaaaacttgtaggttttataaaaaagtataatttgtctgattacataaagtgatacatacttataacaaattgtacagcaatgaataaataaaaagtgaaagtccctcatgatcccacccttgagagaacagctgagaaaaattcagtaaatgttgttccagacttgtttcttaaaaaattccagtatacttaatgaatacatttgtattcatattacaaggatggagctatattttatatgttattccacagctagctgttttcacttaatgctctaacttggatgacatcctggttcagtacaaatagatgtaagtcctttctaacagtttcatatgctatagagattctttattttaagtattcctcttttgatggctatttattttaaaaccatgctgcagtgtgtgtgtatatattaaatggtcaaggaaatctatggggagatcttaaaattggaattgcttagtcaacaggaatgcatattattttaaaaactgacatttttttttcaatcctcatccatattgagttggaccaatcatatacattttaccaatcaaatacattaaatacctggcttaaattcagtttcttaattactagtgaatttagatgtttatttcttgtgacttaactgtttatatttctcttaattacttgctcatgtcacttgcccatttttactctttttcttactgttatgcaaatgtttcctatagtttacagataataaatattatagctgtcagtggtgcaaacttttttattcttttacttgttgaaaagatttttaaaagtactattcaagcatttacagaatattttattttaaaataattttagactttcaaaagattgtggaaacagtacacaaagtttttatacaacctttaccctgattcctcaaatattaacaccttgcaaaaccacagtagtcatcaaaatcagtaaattaacactgacacaatactattgtctaatctacagatcttattcaaatttcaccgaagtccttctgggcaaggatcctttctgggatcatacattgaattcatttgttatgcctccttagtctcttttaatctgcaatagttcctaagtctttctgtctttcatgatcttgacactttttaagagcattggctgattgtttcctagaaaatcccttgatttgggtttatttgatgtttcttcatgagtatgtaatcaagagagtgacctagtctgatgatggtcaaaaataacttgcctgaaaaagagatgcttaagctaacaccagaaagatgggtagaaagtggaagtatgaactgaggatggggtgcctttgcattgactttgcatagtgcatctaagcaactgaaagaagccagtggaggaggtggtgtgaaagaaggctctaaggaggcagtctggtcagacccagctttgtgggacttattaaggttataggatattaacagcaatagaacatcattcaagggctttaagcaaaggaatggcaatatctgaatcaggtttttaaaagatcactacaggtagattcttcaccaggtagaattaatcaaaggggagcaagatagaaacaaatacaacaactaggaggcagttctagcaatgcaggcagagaaaagggtggggtgtacattaaggagcctccccgcaaagacggtgaaaacctgcagttttgagagatgttttggagggtgaatctgaatctgcacatgcaggtgatagattggatgtggggttaagggaaggggtaggtgcaggattgctaatatcagcgtttgccagatatttgtgtaagtgattggatgttggtaccatccatggagatgaaagagacaattcttcacctctgatagtgaagtcagaagcatcaccatctccaattcttttagatgccaacatttacaatatatttgcttatttatgcttctgtatctcattatagccacttagcttccaagttctatggtttttcctcagaatctttcccaataactgtttgtccttctccatttctttcactgctcttcagtttggacaagggtttcctcattccagtgttgcatacttgcttcctctctgggctaccaattcctctattctctgtaactttatccatcgcttccagagtatgtgtgtttaataaatatgtactaagtgcctcgtttgggcagatcactttgttgggaagagttgggaattaagtaagttaagtatatttcatggaactggagtcaattccgagttataattgaggcagaaggaaaaaggccattctgcctagcggtcaagaaaggaccatattcttctttcactccttacaaaaaataaattccacacaggtcaaatgtatttatccaaaaatgactaaccacagaagtaccagaagaaaagatcagtagacatattttaaaattgtttatgatgagtaagtttgaagaccttttaaagaatgttgagaaacctagataccataaagaaaataggtccacttgaaagcttaaattttaaaaattccatgtaaaaattaaacagctttcaagcaagaatgtcagctgaactaataattatagaaggaaaaatagaaatagaaaaatggccactttcaaacaccacaataattgtctcagggaaaaaaatcttcaaatgctaaaattagtgggcaatggtatatttgcatagtttccctacaagatacttttcaattataaagagaaaaatagtatcgtggagaaacctgaccgatataacttaaacaaatatcacgattaacatcattaataattgaacaaatcaataacatatgtctcctgatacatcatggaggatacaccatcacttataaggtatttttttgccaaaaaaatgcataactctcattgttttctgtatttcatctttctcacagtcaccacaatctttattagataattgtgtagataattgtttattatttttacacctctctgccccattcctggtccttagcagaatgtaaggtccataaaagcacaaagtaggggctttataagtaacattgaataaatgaatgaataaataaatttatttggagctatcagtttttacaggaaagatccatttagccttggattgtattgaatgaaaaataacagttgggtatcctggtggaaatggatggaggacatttgaaggtacaatgctaaagctcaaattaagctgaagccatgaaaaaaaaaggtgtcttatagaataaagatatatcaagaaaaaaagatgaaatattaatatttgagatgcagggtgagggaggagaaaggaaacacctccacttcagagaggccaaggcaggagttgattttaaatagggaaagttcagctgatcagggccaggtgcttagtgggggtttgtaactgtttaatgcagtgagtctcaagttttaatgtgcataaaaacatcctgggctggagatccctggggcacccttcccagaaattttgactcagtggggcctagaaatctgtggggtttgtgtatgtgtctgtgtgtgtgcgtgtgcgtgtgtgtgtgtgtgtgtgtgtgtggccagcacacccctcctccaccaagtcattgtaatgcaggcaagttatccaggaaccactcccagagggaacatggcatccaaatcagggggatgtcagctctagggtaggaaggtaggaaggggatgaatggtgagcaaatttggacagcagatgaccacttgctaacaactttgccagaataaggagctcttcaagaaaactctttaaaatggattgccagggaaagttaagaaggaaacttttttctgtttctgcctactgcattgaagagattgtccagtgcaaaaccaaatgtatgaatacagcctctgctgtgacatgttaaacagttaagattcttgtggttggagaacactggagaagcagtggatgacaagtacttcaggatggccctcttttgcttttgaataatagtgctggactcagtccattttgtagaactactgtccttaagaaagttatgaaaattaaataaaattgattaataatgcccaaggactaactacatttctgagctttcaggcaactggcaggcaggaaaatgatgctatttcaaacatttatttgtgactcattatacttcattgaactaagtatcttttggatagtattttcttaaaagcaaaattccaataaaaaaggaagtatattaaaaggtacattaaagtttagtgccttatgggtagcttatctttagaaatgcattatttccaggaatgtttagtattttaacaggaggagagcaaattagcaagttcatatgaatttgtggtgaaaaaatatctgtgtacaaatatgaatctctctccagcatctcaaattcatttgccaagtgttttataatgcatattaattgaatcatcacatttagaaaagaatctaaaattagcacattgatgagcatatgaaatgcctttgatatagcacaaaaatgtagaatttatattaaaaaccagcaaatattttgaattgaactgtgtctagatagaataattatggatttgaatttcttaactacatataccatgtagtcagtccacaaacactgaatcattctgccgatgaaaaaagtgaagggagctgggcacggtggctcacacctgtaatcccagtactttgggaggccgaggcgggcggatcacctgaggtcaggagttcgagaccagcctggccaacatagtgaaaccccgtctctactaaaaatacaaaattagccaggcatggtagtgcatgcctgtaatcccagctacttaggaagctgaaagaggagaatcgcttgaacctaggaagcggaggttgcagtgagctgagattgcaccattgcactccagcctgggcaacaagagtgaaatttcctctccaacaaaaaatgtgaagggaatgaatgtccttttatttctttggcagggaggagataatgaatcagatagttgtaatgctgaactgaaatcttcatttccacagtaaattttttcattcttgtccaaggcccaaggatgtgaccttctcttggattttcctgattattatgagaggcaagtcgttagtgttgcagtgtgactgtgagtataagccctgaactcctgtgcacttagagtccctgctctgtcatttgcttgaattacttatctcttctaggctttagttttcttatctgtaaaatggaaatcatggtcgtaatcatttgagtgtttcctggcaccaagcattgtgctatatgttttacaagcattatctcactttaccttctcagtacccctattcattatcaacctcctttgcagtttgggaagctgcagttctgctgttagtggttcctggagccagaatttgaattcagatgttctaaccctggagactgcatgtctaatcccaaggctcaactacctcctattggagaaggctaactgagatcatgtgtgttcatgcatccagttagccagggaacgaaagcattctgctaatgatgaagtgattgagaagaaacagtgaacatcctcatttcacagataagacaacatggatcagccttttactgtgaattctctgaaaaagttagctgctatgcctgaccatacagatgtttccctaagcccagaagagcgagtccgtgccctaagcaagcttggttgtaatatcaccatcagtgaagacatcactccacgacgttactttaggtctggagtagagatggagaggatggcatctgtgtatttggaagaaggaaatttggaaaatgcctttgttctttataataaatttataacctaccagactactctctgcccccctgtgaattcaactattttagattccttctacattcttatttgtagaaaagcttcctaaccatcgagattaccagcaatgtgcagtacctgaaaagcaggatattatgaagaaactgaaggagattgcattcccaaggacagatgaattgaaaaacgaccttttaaagaaatataacgtagaataccaagaatatttgcaaagcaaaaacaaatataaagctgaaattctcaaaaaattggagcatcagagattgatagaggcagaaaggaagcggattgctcagatgcgccagcagcagctagaatcggagcagtttctgtttttcgaagatcaactcaagaagcaagagttagcccgaggtcaaatgcgaagtcagcaaacctcagggctgtcagagcagattgatgggagcgctttgtcctgcttttccacacaccagaacaattccttgctgaatgtatttgcagatcaacctaataaaagtgatgcaaccaattatgctagccactctcctcctgtaaacagggccttaacgccagctgctactctaagtgctgttcagaatttagtggttgaaggactgcgatgtgtagttttgccagaagatctttgccacaaatttctgcaactggcagaatctaatacagtgagaggaatagaaacctgtggaatactctgtggaaaactgacacataatgaatttactattacccatgtaattgtgccaaagcagtctgcgggaccagactattgtgacatggagaatgtagaggaattattcaatgttcaggatcaacatgatctcctcactctaggatggatccatacacatcccactcaaactgcatttttatccagcgttgatcttcacactcactgttcctatcaactcatgttgccagaggccattgccattgtttgctcaccaaagcataaagacactggcatcttcaggctcaccaatgctggcatgcttgaggtttctgcttgtaaaaaaaagggctttcatccacacaccaaggagcccaggctgttcagtatatgcaaacatgtgttggtaaaagacataaaaataattgtgttggatctgaggtgatatgttctgaatgtaagcaccgtcaacatcagacacctactcatggacatgtggttgccggattttcttaagatgtttccagaaatgactgatattttatatttatacattttagatgacaaagcttgatatttattgctgttgcacattttaaagttttctttttgggttgctctgtgtcaagagaggttacatggtgttaaatcggtacctgataatgtacccaaatactatggccagataataaattgtgctgcaaacaaaaaaaaaaaaaaaaaaaa

SEQ ID NO: 28662 - DNA, 8174 bp, Homo Sapiens
caccgcccaacttttacaaggtccaataccatttccaaaccatatatttccaacaccctgccgtcggatgcacccaagaagaggcgggctccactgcccccgatgccagcatctcagagtatcccccaagaccttgcacacatccaggagaggcctgcttcttgtatagtgaaatccatgagcgtggatgagacagataagagtccctgtgaagcaggaagagtgagggcaggttcactgcagctcagcagcatgtctgcagggaattcatctttgagaaggacaaagcgaaaagcaccttccccaccctccaaaatacccccgcatcaaagtgatgaaaatagtcgtgtgactgccttacagccagtagatggagttcctccagacagtgcttcagaagcaaactctcctgaggagctatccagcccagctggaataagctctgattatagccttgaagagatagatgaaaaggaagaactgagtgaagtgcctaaagttgaagctgaaaatatttctccgaagtcacaagatattccttttgtatctactgatataataaatacactgaaaaatgatcctgactcagcccttggcaatggtagtggagagttctcacaaaactccatggaagaaaaacaagaaactaaaagcacagatggacaagaaccacacagtgtagtatatgatacaagcaatggaaagaaggtagttgacagtataagaaacttgaagtcgttgggcccaaaccaagagaatgtagttcaaaatgaaataattgtctatccagagaacacagaagacaatatgaaaaatggagtgaagaaaacagaaatcaatgtagaaggtgttgccaaaaataacaacattgatatggaagttgagagaccatcaaactctgaggcacatgaaactgatactgctataagttacaaggaaaaccatctagcagcttcatcagtaccagatcaaaaactgaatcaacccagtgcagaaaagacaaaagatgcagcaattcagacaaccccttcttgtaacagttttgatgggaaacaccaagatcataatttatctgactccaaagttgaagaatgtgtgcaaacttcaaataacaacatatcaactcaacactcatgcttaagttcacaagattctgtaaatacctcaagggaattcaggagtcaaggcaccctaattatacattcagaagatccgcttaccgtaaaagatccaatttgtgcacatggtaatgatgatcttttgcctcctgtagataggattgacaaaaattccactgcttcttacctaaagaattacccactttatagacaggactacaatcccaagccaaaaccttcaaatgaaattacacgagagtatatacccaaaattggcatgactacttataaaatagtgcctcccaaatccttggaaatatcgaaagactggcaatcagaaaccatagagtataaagatgatcaggacatgcatgctttagggaaaaagcacactcatgagaatgtgaaagaaactgccatccaaacagaagattctgctatttctgaaagcccagaagagccactgccaaaccttaaaccgaagcctaacctgagaacagagcatcaagtgcccagttctgtgagctcacctgatgatgccatggttagtcctctgaaacctgctcccaaaatgacaagagacattggcacagctccttttgcaccaaatttggaagaaataaacaatattttggaatcaaaatttaaatctcgggcttcaaatgcccaggccaaacccagctctttttttttgcagatgcagaagagagtatcgggtcactatgtgacatctgcagctgccaagagtgtccatgctgcccctaatcctgctccaaaagaactgacaaataaagaggcagaaagggatatgctgccttctccggagcagactctttctcccttaagtaaaatgcctcactctgttccacaaccccttgttgaaaaaactgatgatgatgtcatcggtcaggctcctgctgaagcctcccctcctcccatagctccaaaacctgtgacaattcctgctagtcaggtatccacacaaaatctgaagactttgaaaacttttggtgccccacgaccatactcaagttctggtccttcaccgtttgctcttgctgtagtgaaaaggtcacagtctttcagtaaagagcgcaccgagtcacctagtgccagtgcattggtccaacctccagccaacacagaggaagggaagactcattctgtaaataaatttgtggacatcccacagcttggtgtgtctgataaggaaaataactctgcacataatgaacagaattcccaaataccaactccaactgatggcccatcattcactgttatgagacaaagttctttaacattccaaagctctgacccagaacagatgcgacagagtttgctgactgcaatccgttcgggagaggctgctgccaaattgaaaagggttaccattccatcaaatacaatatctgtgaatggaaggtcaagactcagccattccatgtcccctgatgcccaggacggccattaaatgttaccctgccacaccactgcacttcacttccacttcagaccaacttcatactaatggaacattttggcaaatgtatattcagatgtacactaatatattatctattaaaatattagaatttgtgttgtggcttttaatgccagaagaaaagttaccagaatttataatttatagtaattttttgatcttttttttgccttaagagttgaatatgctgctttagaactttaaaacaaggtgtaaatgattttcattttttacaaatgaaaaataattcctttgtattgatttcacttaccagcacattctctacaatggtgacttagacaaaagtataagattcatagactttatatttgtatgacatacaactaggacaaacatagatatgacatttgctgcctcagtgtagcaattggaaatatttataagttatatgaaagcctgttttgggctgaaagaatgatttagaaaactagtgataccaaataagtatattcagttcaataattattttcaatgatgaatcacttagtgtgaaagacttgccttgtgtattctttatgtaattacaaatcactgtcaattttatgggaagctcatagtattttaatattttattaacatggaactcttgtttttttaatctttagaacttaaattctacaataattttaaatattttctgtatataattatgacattgtcacacagaaattacacattttatgtgccagaagccttaaacatctttctgtgaaaatgctgatatattgtgacagttatttcacatttgatatgtagagaggaataggggttagtttatgtttatattgaaaaactttaaagactatttggaagttccagaaattctggttttaattcaagtaaaatgataaaatagtcattatatagttcagatgctaatattctaagtaataatatatatttacattgaagctaaaactgttacgcaaaacaatgcccatttgtcggcttacagctcttccggagtctagagcctgttggtgttctgtccctactttaagaatttaattgctcacttattctgaaagctttgttcaaacaagatgatattaaatttgttttcactaaaactactgggatatctgcctcttggggatttttttttcaatttaataaaagcaagttgtatatttggggtgctttttaaaatatatagtttgtgtcaaccagtatatttatttcccttacctgatgcatacatttctattagccagtgaacaaacaagaaatttgtaagatttaccatttatcagggatccctagtgtacatttaagccctggcattctgactccaaaatgcatggtctaagcatttaaaatgtttagcatagttcctgatacatggcatggccatcttaaatgctaaatgttgctgctgttttccttgaatcagttggagagaccctcatatatagatacttaagttatgttgttataagcaagtagagaaaggagtgaatttttttttaaaaaattgtgttgtcataattatctacttataaaaatataaatttggatccctaatttaaaccttcatatattttgagttggattgaagacttaaagacaagcgacatgtaagatgttttcaatatattaatatataagaaaggcttaatttatgaagatatgaaagttcctacaactcatgataagtctacctaatagaaatatcagcacattattcttacaagaggaaattcaaaaggccaacaaacatggaaaaaaaatactcttcaccgataatcagggaaatacaagttaaaaacatggaaaggtaccacatcaaattagcaaaaacggaagtttcaaaatagcaagtgttgtcaggaacatcaaacagtgggaactctactgttggtgggaaaatacactggcataactaccagttctgcaatatctagtaaaattaaagattccttaccatgttaccttaaataagtacttatgcacatgcataaggagacatctgcaaaaatgttcacggcagccttgtgtaaaacagcagaaaggggtcctaacccgtgctcagctttagtaatgcatatattcatatgatagacttccacacagcagtccaaatgaacaagctagagctatatatgtcagcatgaatacatctcaaaaacaagtgacaagagtgagtggtggaacaagtcgtgttttatgaaattagttacataaagtataaatataaaaaatgatactataaattatggctgtatatgtaggaaaaaaatttgctggtggttacctgtgggaaccaagaaagactgaattgagatttataagaggcatcaattgtgttcgtagtattttataaactgctgtttgaaaacaagtgcttattatattctaaattctagtatacttgtagtttataattataataaaataatgttttaaaggtcacataggatttagggggctatgtatataaaccattaatacatgtatgttctgaaaagttgccttatcgacaccattttaggagaacatgtgctatcctgtcaatggggaaagaaatttgtgacaagtagttttcactcatcatatcctaaaataacagcacaaggaagatacaggaatggtctagaaccaacttttgactttcatgtataatttttagcatctaggcattttgcttttccttctttcctccaatcaagttatttatttatataatattaaaattataattcagattacatatatatgatagagtataaaatacattctttttcgtccccagcatcccactctcctctccaaagatagctgttaatattttgatatgaagccctatatagatgtatttatatgaagtacatgtgtgcaggtttgttgggggcttttgtgtgtgtgtgtgtgtgtgtgtgtgtgtgtgtgtatgtgtgtttcttaacatgaaaggaggtcacactctaatactatgtaacaacttgccttttataccagcagtgttctggaagagcttttctttttacacatacagatcgatcgtatttctgttagccattctattgtttcttgctgcggtacataatgttggctggagtgaagagattggggttcagatcacaagtctgccacttatgagtcatgggatcttgggcaaattactttctctatgcttcattttctcttctgaaaaatgaattaatatgaataaaaatgaaccttattttaaaaacggcaggcaattcatcttttaaagttacctgatgtcaatactataagtgaacaggtattatttgcctaatatactccctattctttgaggggtgacccttcttccgatttcacctcttcatgaactgccagatctggccttggccactaggcactggcaacagcatacacactctgtcatcttatccaagtccttgaaatgagaccaatctttgtcctgagacttagttacttataggtgcttaaaacccaaagcgtcccaattgatacaattatgtatgtgtctaattccagtttactttgtacccactaccagtagagaaaataagtatcaaagaactaagaatcaaactcatcatttttaaaatctactgattttgataactgacttgaaagaaaagaacttgcaattagaggtcatagtgaagatttccagggtcaaagtgatttctgaggttttagatgtaaaaatatctcctatttatttgctatttcagagttgacaacaagatttttatttgatccacatatttaaaaggtgtgcaaagattgctactttacaaaggtcacagaagcagaggagtctcagagtcccacatccaattactaatttgttcttccccatgactaaatgtagcaaatgatgaagaaactggtgctagatttcaagggataccagaataggaagttatttgttctgaatcttcagttggttttccttttctcttaaatgttaccactttcctgcaaatttccatccttaatatgttagactgttcatatagatacattgtgtttacaacaaggaaaaaatgccaccatgtgctcagaacttttttgacaggtattttgagaagagttgtggaacattctggtaatttgtagagatctgttggcatctctgcttcacaaactggaaaaaatcatttgtaagtcttgctaattacttttcttggagaagaaaaaaaatgctacagttgcaaacaaatgtatagttttcaaaaagaagcaacttttttgctccccagtttattcttagtttccagcccacgccttgcgatagcgataggcatagtgatggcctcaattctttctctcttgcatccataccttttgctgtgatagcagtgatggcctcagttctttccctctcttgcatccgtaccttttgctgtgtgactttgcagctcctctcattaaagaggcagagccccctctcccacccataggagcaggttttgagagtaacagaatgaagtgaaaatgacactgtgccagttctaagaccagccctcaaaggttcatgtgtttctgcttgctttcactgtatttgaaatgttgctgtgagaaagacatctctgaaacagctgaatggtcctaagaaaaggatgagagatgcagggagcagagctcccaactgaggccagcctagatcacctaagagccaggcccccagtttactctgatgtgtaagcaataaatgcttaccccagcaataccaccaaggtttgtggttggtttatatacagcattaatgtggcaataggtgcaatacaccctgttaaacaaaccatacacatatgactctaaccctaatcataaattgattcagtctgttcagttccacaacgctgtttcctccagaatctcacagatgacttactaaatccaacacaaatacacctcagactttctgtctagctcccaaccagttaaaagcaattctaaatattttttttcttagtcgtagtgcaaaagtatattctctccctttctctatagttttctctcattttgtcttcagacctagaagcatgagagcccagctgtcaaagtcatcctgtatttttcttagctaaatctggcaactgtgctatttcatcgaaaacctgaaagtgtacaaagaaggaagaagcagaatctgccatatgagtaatagaagtgagcaggcccaggactccctaagtcaagaaaccaagaggcgtcattacggaaaagagtaactcaccctgtgtgctccttggtagttctccctcagcgatgcccccatgttatgaatggggaaaagttcactgaagggttcatagtgaagaaactttttggatgatttctgttggtgggttttggataccttcaagggatcagaaaataatatacttaggaaattttggtaatgtcatcattactctctacattattattatgacggttacaattgttaaatctaggtggtgggtatgtgggttatattgtacatgatttttaacttgtctgcatgtttgaaattataataaagtcaataaataaattattgagacaaaaaaaaaaaaaaaaaaaaa

SEQ ID NO: 28663 - DNA, 8310 bp, Homo Sapiens
gtatacttgagagtatattggacttggaaacaaaaggaatcgagaatgcacgtccggcgggtgttggggcacgcggcagtgagatccagactcgtcggcagcggctccagcaccttcgctacctttaaatacagtcagtcaaggaaaagcaggataaatgctgtttccttccctgtttattaatttttggaatgatgaattcatgcccctagtagcctctaattcttgtatttgtttttatttttggagtgtcattaggagctcaggtattttaaaataaatgttatgtgttttagtctattgcagtcattattcagtttgatattaaaattaacacctctgtagattcaagttgttgtgtcgacatggcctttttcattttaacaagttaatatgattaaacttccttgttttctggcacagaagaatgtcccaggcccaccttatgcaattccttccccaaacctagaacctaacttccctcccaagaagaccttatatccttttaaggagatgatagtatttagagactacaaatctaaggactaggtatgtttatttctcctgggttgtcatttcttctcagccttttttagtggacaaagctaggaaataagtatttttttagaaagacaagtcatgagtttatactttcactttttcttggattcttttatttgtatttcttactaatgttgatatcttggttcctaacattaacataatcacttatttgccttgtctttctacatatataacattttcaaaataagatgatcaacatgatcactaataacaatcctgctgagtgcagttgaagatgtctttgtggttctttttttcttagcatactattatggttatacagtgaaaatactgtattataaaagcacttaaaatagttttctttatttggtcaggctgccaacttcaaccaattagataggtaggtaggcttttttttccagtttgttttatagttttttgggattcctttgggtttttgtttgtttgcttaattttgtttttaatcatgtgaaatgtctacatggttctaaaagcaacgttgtgaaacagcacattcagagaggttctagcttttatccctttccgctcctcttattttttccctctctgtgtaggtaactgacttttttttttctgttgaagatacaagcaaatctatgtatacatgtatttacacatgtaaatattctgtcccctacttcataacacaaagaaagatagcaaagtatacacactcttctgcaccttactttcttcacttagtatatcctagagatcattattacatagtagtacagagtgatcttctttatgccttttcacagctgcatacatttaatttgtatttcatttggaatgtgcctggattttttaagccccagacttctttgccattacaacttgattctgattaactctccagcctgctgaccctcttcttttcaagataatcatatctttgtgtcttgcaacctcttcacatcctgtttatttttacagtcatgctgttttattcatattgtccaccagcacagaacacctctctctcctttgtctatctatatcctcattctatccattcatttggccatgacccagatcactctataccttctttaaaacctttctccctttctgtagtctactcagaactcttccttcttagaaccttctttgaaaagaaatattttacatattttagcactttattattttctaaggattcatgtttaacagattcaattccttaaatcagttttttaagggctgaaaataagagttttttgttatctattcccagtgacaccttttatagtccctgaaatgatcatcagtaagtgatcagagggtattaaaatgagatattagaaacaacttaagcgtttaagaaaatcatgtgtttcctttgatattcacaatgaataaaaacatttctgatagtttttcaagataatttttgaatgtcattgaataccaaactgaaatatttttaaagttatatcaagatcattacctttaagacacacttaggaaagtcttttagtcatgtaccgtttttatttatttgccaactctttaggccttttactcacagagcttctgttcattttttctcttttggtcaggtagcagctgtctctgactaatttaaaatgttgcattaaaatgagctgtactattttcaccattgcatatgttcatcttttgcttttgggaaatgacacgatgtgattcagcatgttaatttaaatatcacccaaaatgtaatcatttccagatccatttgctgacatttaatactattcacagtttaaaatgtcataaaactaaatacagtgatatttgtgtcaatgctgatttttaaagtaaaatatatatgtttaacttgttggcaacattattgtctaaataatacatactgtacacagtagaatcaggtgtaatatctacagcatgtaagggccacttaaaaaaccgtgaatgaacgtttggtttaggtctgtgctgcaaaggccaattgtcattatcttaagtaacactgtgaattttggttttagggcctgttaataaaagattggctaaaacaactctgccatggatacatacatagaattgtctgcgtggggtttgcgagtttttcgccttttgttctagggagtagtgaatgcttacaaactaaagataggttttagttccagaaatttcaccaaaggaagaagagtcagtaagttttaaggtctaaaggaagctttcccttctagttcagtttttctgtgagaaaaactaaaaattatcttcctttatcccagtttctttcctgtattcctttagcaagtcctttccaaaattctttccccaaaagctagctggctagtttgcttgctttttaaaatatattttatatgaaaaaatttcaaacatacagagactagaaagaatagcgtaataaataccatggaaccatcacctagatttaacagttgttactatttttattatattgacatcatttcttctttttctgaactattttaacatatatatagaaattatgatattttacctctaaattcttttttttaaatgttttcctatgtaacataacattattacatctaacaaaattagcattaatcctctgtcatcaaatactcagtgcataatcagatttctgtacttatcctcagaatgtcttttgtaggtgctttatttaaatcagatgcaaccaaataaatctagcaatataatttaattactactaagtaatttaaatgtaagaattaaaattctaaatgactaaaaaattattactttttttaaagcatggagccaagttagttttgtatttgtcagagttgatacataatcaccaaggtgaattgactgaagaagagctaggcacagcagaactgcttatgaatgctttgaagttatgtggtcacaagtgcatccctcccagtgcatcaacaaaagcagaccttattaaaatgatcaaagaggaacaaaagaaatatgaaactgaagaaggagtgaataaagctgcttggcagaaaacagttaacaataatcaacaaagtctctttcagcgtctggattcaaaatcaaaggatatatctaaaatagctgcagatatcacccaggcagtgtctctctcccaaggaaatgagagaaaaaaggtgatccagcatattagaggaatgtataaagtagatttgagtgccagcagacattggcaggaacttattcagcagctgacacatgatagagcagtatggcatgaccccatctactatccaacctcatggcagttggatccaacagaagggccaaatcgagagaggagacgtttacagagatgttatttaactattccaaataagtatctccttagggatagacagaaatcagaagatgttgtcaaaccaccactctcttacctgtttgaagacaaaactcattcttctttctcttctactgtcaaagacaaagctgcaagtgaatctataagagtgaatcgaagatgcatcagtgttgcaccatctagagagacagctggtgaattgttactaggtaaatgtggaatgtattttgtggaagataatgcttctgatacagttgaaagttcgagccttcagggagagttggaaccagcatcattttcctggacatatgaagaaattaaagaagttcacaagcgttggtggcaattgagagataatgctgtagaaatctttctaacaaatggcagaacactcctgttggcatttgataacaccaaggttcgtgatgatgtataccacaatatactcacaaataacctccctaatcttctggaatatggtaacatcaccgctctgacaaatttatggtatactgggcaaattactaattttgaatatttgactcacttaaacaaacatgctggccgatccttcaatgatctcatgcagtatcctgtgttcccatttatacttgctgactacgttagtgagacacttgacctcaatgatctgttgatatacagaaatctctctaaacctatagctgttcagtataaagaaaaagaagatcgttatgtggacacatacaagtacttggaggaagagtaccgcaaaggagccagagaagatgaccccatgcctcccgtgcagccctatcactatggctcccactattccaatagcggcactgtgcttcacttcctggtcaggatgcctcctttcactaaaatgtttttagcctatcaagatcaaagttttgacattccagacagaacttttcattctacaaatacaacttggcgactctcatcttttgaatctatgactgatgtgaaagaacttatcccagagtttttctatcttccagagttcctagttaaccgtgaaggttttgattttggtgtgcgtcagaatggtgaacgggttaatcacgtcaaccttcccccttgggcgcgtaatgatcctcgtctttttatcctcatccatcggcaggctctagagtctgactacgtgtcgcagaacatctgtcagtggattgacttggtgtttgggtataagcaaaaggggaaggcttctgttcaagcgatcaatgtttttcatcctgctacatattttggaatggatgtctctgcagttgaagatccagttcagagacgagcgctagaaaccatgataaaaacctacgggcagactccccgtcagctgttccacatggcccatgtgagcagacctggagccaagctcaatattgaaggagagcttccagctgctgtggggttgctagtgcagtttgctttcagggagacccgagaacaggtcaaagaaatcacctatccgagtcctttgtcatggataaaaggcttgaaatggggggaatacgtgggttcccccagtgctccagtacctgtggtctgcttcagccagccccacggagaaagatttggctctctccaggctctgcccaccagagcaatctgtggtttgtcacggaatttctgtcttctgatgacatatagcaaggaacaaggtgtgagaagcatgaacagtacggacattcagtggtcagccatcctgagctggggatatgctgataatattttaaggttgaagagtaaacaaagtgagcctccagtaaactttattcaaagttcacaacagtaccaggtgactagttgtgcttgggtgcctgacagttgccagctgtttactggaagcaaatgcggtgtcatcacagcctacacaaacagatttacaagcagcacgccatcagaaatagaaatggagactcaaatacatctctatggtcacacagaagagataaccagcttatttgtttgcaaaccatacagtatactgataagtgtgagcagagacggaacctgcatcatatgggatttaaacaggttatgctatgtacaaagtctggcgggacacaaaagccctgtcacagctgtctctgccagtgaaacctcaggtgatattgctactgtgtgtgattcagctggcggaggcagtgacctcagactctggacggtgaacggggatctcgttggacatgtccactgcagggagatcatctgttccgtggctttctccaaccagcctgagggagtatctatcaatgtaatcgctgggggattagaaaatggaattgtaaggttatggagcacatgggacttaaagcctgtgagagaaattacatttcccaaatcaaataagcccatcatcagccttacattttcttgtgatggccaccatttgtacacagcaaacagtgatgggaccgtgattgcctggtgtcggaaggaccagcagcgcttgaaacagccaatgttctattccttccttagcagctatgcagccgggtgaatgcgaatgaacttcacgttctccaaagcactttaactccaaactagatttgttgacttcaccagttttaggaggttgaacctaaagaaatggatgactggacaaaccatccaaataatgataaagtctattcatctgcacaaaattctgaagagtcacatgatcctaagaggaaagttctgttctattttagtgataatctggaagattgtgtcaatatgcactagccaacaagttttaagcctcgcatggtacattaaaatgatattcttaaaattttttcccaccaaggtattccaaagaaaatattaaggtctcccctttttctatgattccaaaaggaccagtagaatttaaattggttggttgattgtttatataaaacacactaaaattatattttaaaagtttactgccatgaaatactcctcccaccacacacacatgctccaaaagaggaaagaaaaaaagataatttttaggacttgataattgctttctttgagaagcaaattattcagtaggtgcctctgtaccaaatattttatggaatatctaaatactaaaataaactatgaatgaatctcaaaattaggcagtttttgccagttgctttcttagctcaaaggagaaccagaatttttttgacagccacaaacaagaatacaggtatcttggatttcagacacattctgtttcttcataaaaattttacttaaaatctgtaacgctagatattgactatccttagttgagtcactgaggtttaaacacaatggtaagtcttaaagtctgctatttacagagcattgaatctgtaccaatttgcaatagaaagccttcagtatgcaagaagtttgcatgggtattaagaacacagcctaaataaggcatttgatctaatctgcaggaagaattttcttccccaaaacagaattataaaagcttactttaaacaggaggcagaataattcttttaggaaaccatttcattctgtttctactaacctataccatctgagaattctaggaagaataataaaatctcgtgtattccacagcaaacttacataccataaagacagaattcctaaacatcttggagccgtctgtctctcccatatgatggctgtctgtatatttttacttggggtgctgctttattggctttgaaaacactgtcagataagctcagtaatatgttaccatgggataaaaatatgtatccctgcctaagaataacttgtgcatttgttatggaaatttaattcatatggtgtttacagtactacttttgtaacttccagactttctaaaacattctgcttaaaaaccatataaaatataattccaaagtctctgctgtcaagatagattcgagagaaagcacgtggccatgtatgctttaaccttaaactgcatacacatgtagtgatacctaggctgcatttagatcaccgtgtgctcaggccaggtgtgaatcctgaggtccatggaggtgcagagatgagattactcctattcacgttgaagtgatttgctttgttaacaaaaaattgcagctattgtctagctttcatttttttactgagaactttaaattagtcccctattagaatagggttgctactcatctttttttaaaaaccgaatttcatcatttatctaaagagaaaatatgcagaataactggtcttgttaagagtgcaatattatatttttatgtaaaaataaaaattaatttggggggattatttattcagcatgaaacctaatatgtatatgtttgaaatacttcataatgtgcatgttgtagcaaacatttctgtaaattatcacaagctctgttacctttatatacactgcctcttcaatttggaaataaatttcataaaaaaaaaaaaaaaaaaaa

SEQ ID NO: 28664 - DNA, 5026 bp, Homo Sapiens
ggtgtgcccggtgtctctggaagtgtctatacagatgtgtgctgctgctgctgctgctttctgccttaaaatttctggagccaacacccacccactcttacagcctctgtctctttattttcaaggaaaaaagaaagaggcagactgaaatagaaggcaagcgacaacagcttgacgagcagatacttctgctgcagcattccaagtccaaagtgcttcgggagaaatggctgctgcagggcatacccgctggaactgccgaagaggaggaagccaggaggcggcagtctgaagaggatgagttcagagtcaagcaacttgaagataacattcagaggctggagcaagaaatacaaacgctagaaagtgaagagtcccagatatctgccaaagagcaaatcatcctagagaaactgaaggaaacagaaaaatccttcaaggactttcagaagggtttctccagtacggatggaggagtcgggtgggagaatgtgctgctaaaggaaggtgagtcagcctcgaacgccacagaaacatccggcccagacatgactatcaagaagcctccccagctttctgaggatgatatctggataaaaagcgagggagacaactatagtgccaccctcctggagcctgctgccagctctctttccccagatcacaaaaacatggaaattgaggtgtctgttgcagaatgtaaaagtgttcctggaatcacctctaccccacatcccatggaccatccctccgctttctattcacccccgcataatggcctccttactgatcaccacgaatccctggataatgatgttgccagagagatccgctatctagatgaggtgctagaggccaactgctgtgattctgctgtggatggaacgtacaatggaacatcctccccagagcctggtgcagtggttctggtgggcggcctaagcccccctgtccacgaggcgacccagccagaacccactgaaagaacagctagccggcaggcacctcctcacatcgagctcagtaatagcagccctgaccccatggcagaggcagaaagaacaaatggccattcccccagccagcctagagatgcgctgggggacagcctgcaggtgcctgtcagccccagctccacaaccagctcacggtgttcttcccgagatggagagttcactctcaccacactgaaaaaggaggccaagtttgagctgcgtgccttccatgaggacaagaagccctccaagctctttgaggatgacgagcatgagaaagaacaatactgcattagaaaagtgaggccttcagaggagatgctggagctggaaaggagaggagagagctcatccgcagccaggccgtcaagaagaatcctggcattgcagcaaaatggtggaatcccccgcaggaaaaaaccatcgaggagcagctggacgaggaacatctggagtcgcacaaaaagtacaaggagcgcaaagagagaagggcacagcaggaacagttgctgctgcagcagcagttacagcagcagcagcagcagcccccatcgcagctctgcacagcccctgcctcttctcatgaacgcgcaagcatgattgacaaagcaaaggaggacattgtcacagagcagatagatttctctgctgctcgcaaacaatttcagctgatggagaattccaggcaagcggtggccaagggccagagtacacccaggctgttctccatcaagcctttctacaggcctctggggtcagtcaactcagacaagccactgactaatccgagaccaccttctgtcgggggacctccagaagacagtggtgcctcagccgccaagggacagaaatcccccggtgccctggagaccccatcggcagcaggaagccagggcaacacagcctctcaggggaaggaagggccctacagcgagccttctaaacgtgggcccttatctaaactgtgggctgaggatggagaatttacgagcgcccgggctgtcctcactgtggtcaaggatgatgaccatgggattttggatcagttctcaagatctgtcaatgtctccttgacccaagaggagcttgactctggtctggacgaattgtcggtgaggtctcaggataccacagtcctggagaccctatccaatgatttcagcatggacaacatcagtgacagcggggcatccaatgagacaaccaatgccctccaggaaaattcactggctgatttttctctgccccagacaccacaaactgacaacccctcagagggccgaggagaaggcgtctccaagtcatttagtgatcatggtttctattccccttcctccacgctgggggactctccgttggttgatgaccccttggagtatcaggctggcctcctggtgcagaatgccattcaacaagccatagccgagcaggtggataaagctgtgtccaaaaccagcagggatggagcagagcaacagggacctgaagcgactgtagaggaagctgaagctgaagctgcggctttcggctcagaaaagcctcagagcatgtttgagccacctcaggtgtcttctcctgttcaagagaaaagggatgtattaccaaagattctgcctgctgaagacagggcgctcagggaaagggggcccccccagccactgccagctgtgcagcccagtggcccgattaacatggaggagaccaggcccgaaggaagctatttcagcaagtactcggaggcagctgagctgagaagcacagcctccctcctggccactcaagaatctgacgtgatggttgggcctttcaagctgaggtccaggaaacagcggactttgtccatgattgaggaagagatccgagcagctcaggaaagggaagaggagctgaagaggcagagacaagtcttgcagagtacgcagagccccaggacaaagaatgccccatcgctgccctccagaacatgctacaaaactgctccagggaaagtagagaaagtcaaacctcctccatcccccaccactgaaggccccagcttgcagcctgacttagcccctgaagaggctgccggaacccagcggcccaagaatctgatgcagaccctcatggaagactatgagacacacaaatctaaaaggcgcgagagaatggatgatagtagttacacttctaagttactgtcttgcaaggtgacttccgaggtcctcgaggccacacgggttaatcgaagaaagagcgcactggctttgcgctgggaagcagggatctatgccaaccaggaggaagaagacaacgaataaacttccttcaacccaggaagcgtctttggtgctcgggagaccaagaaaccaagaaattaacaactgaaagcattttaatggactatttattaaagtgcaaacaaactcagcaatccttatgtagaccagaagctgcaatatacaatgatgaaaatgaaacgaaaaggaagtccccccatcagactctggacacccaggaatcaaaagagaaaggacttttttggtgactcaatcccagtgtctggtttggggccaatctacaatggatccaaaaggacaaaacatgttacaagcaaatcaacatagttgctgcaggcggaactgagaccagcctctctgggcgatgaaggacaatggtggtagggccacttagagagcagtagggcccaggctggtgcagcctacatggcacaggatatttccctgcaccagtttcccacctgtcacttgcagcatcagagggtgttgcattaactccattttctccagcagccataaaatgaatggcgtttctctccatatttgcccagaagaggcagttatgattccacttctcctacatttaattatttttaattgagaacaactcatgatcacaattcataaaatccatattttaagacaatagttcttcatgtcacaaacacaatctattctacatgaggaggctgagaaaggggaagagaaaaacaaaccaaatggatgatgttagctttaggatcgtgtctgcttataatattcactgatctgcagtttatgagaacacattttcacagttatgtttcttcataggaaaactatatttagtgggcaacaactatttttatgatgggatgggggagtatatacacgtatagaatctgtacgcattgaacaacttggttcaagatggtgggggcatttttagagcggcaataattgaaaaaaaaggcgaactctgccttggagaggtagatgataagaaataaaaaggtgtttataactattttgtattataaagtgggccttagagataggaagaagaatgatggattccttttggatcaatcagaaaggaaacacgaaagaaaagtcaggaaggtagagagagaaaaagggagggaaggagaaagaatgggaataaaataaggaggtaagagatactatttttgctgagcaaccagtgtgtttcaggatgatacaaagaaaaatatagaatagaaataagtgcaggcttggaatcagctacaaatcctaaagatggggtgtgtgtggatgtgtgtgtgtgtgtgtgtacaccattgtgtgtttgtaaaatgtgtatgttcatgagtaagggtgtgtgtgtgtgtgtattaaaattccagagtgaccgtggcacttgggtgtacaggtaattcctccagagctgtttgctggcttcaggagtggagtgagaatttctttttttatgaaaagggatataaaggcaccgagctgatgcagtatttgtaatattaagttgacctaacaaggtatttgcatgagtcacaattacaaagttttgagcggttttgtaatttgacatttaggaaagtctcctatttattctcatactttacattcatgcttagtatactatagaggatgccagctttaatctttctgtcatttaaagcaatatgataagggtattcaataattgggtgccctaaatttctggatgagaaaattttcaattctggccatgagaaagaaaaaaaaaaaaaaaaa

SEQ ID NO: 28665 - DNA, 6667 bp, Homo Sapiens
ctatgcattaatgtgattgaactacaaaaacagagtgcaatatgttcaaaaaatactcaactaaactttccccctgtcatatcactgcaaaagtgtccttttaaacagagccataaagaaatttttttcaaatttctttattgcacaggcttttttcagttttacctttctgggattgaacaatgttcctttcataatgccaaagcattcccttccccagaaaaatctccttggacaactggtttaaaaacgttattaagtcataggggaggaataagcggccaaaaagtcacatttttgcattggtttacgttgcttgattagactatcttcagagagcacattatgtgtttatagctttaatttgtattatgtcaatgaaccagtgaagtgcctaaagagatgcttacaactatccagtaggacacaactgcactgctttttaaacactttttggttagttaagggtgacttgaattgtacacatacatgctaatttttgaaaacttatccatttttcatagtaaataatatagataaaattttctgttagagttcccgcaaatatttcattttagacttacttgtgatataagatttaacttttcttttgtgaaagaatcgtgaactagtgtttcatgaaatcattttcctcttccatttatcatcctcctctggtacaatatattgggttgctttcttttagattttgttccagataggaaaacaaatatgactgtatacttattaacataaggtagttctgcatttttggattccaggatcctgtttgaaatcttccatgtgaggaaaaaattactaatatttttaaagacagggtggtttatttaaagagattattcagagaacttgtgccatatctcgtctgttttattgtatatgccatatgttaacttttattcaatattacattatgtagatatgtaatacaaagaaaatatttaggagaatggcaaaacacaaatggcaacataaatgtccatttgacttacctaacttcacaactttcaagttgaggatgtcatttattcttgaatttgtttttttactagatgctttcaattaatagccctatatttttgtgcaggcgaactgtataacaggataaaaaatgatttgtatgtattgaaaaggaggagaaattctcacagaacaccatatgagctttagaccaaaaggggaaacaaggtttaagtaactaaaatggccacttagtttgtgtttatttttttccctggaaatgtaagtagttggagtttaggctatggaaatattagtgcctttaatagatctctttccttgcaaagtttctttttagctcagcattgatctatcttatcaataggaaaataagttgacttggaactataaacaaaaacaacaccatatatttatgaacctcagtgaaccagcctagaaaaattgacttctgcaggtgctaaagcacctactaatacgcagcatgcacagcatttcaggttgtgaataccattttacaacgagtttgctgttaactctctttatccaatgcaaacttgaaattctgatgcggttttccagggtggtattttttcagagtattgaatttactatttagtaatttatagtatagctttttatattaaaatgtgatatttttaaaagagatatctggttcaattggtataatgacgtgattatgcaatatgctgatctacaccttgcgctcacattgtgccaaacttaaatgtgcaagtgtacgtgagaaaagcacatgtgaatgtgaattctttaattctttgcttattatgttaaaattagtcttcatagtccactgatgtgtatgcttgaataatgtctatttactttggaatttcaagatttccagcttcaatggtaatttataatttctcagatcaccttaagaaatattgagatactctcccacctgaaaataatctgttctttaacccacctgactatgggagtagccaggcaggtgcctcactggcttcttcagacgaggcttcctcaggtggatatatgactattaggggaaaagaggcttttgagacagcttattacctccttcccctttttgaactaagtacattgtctcagtcccagtatgaatttgtcccatttggggtatttttaaaataaaagatggctaacatggaatctggggcatagccttggcctttaattatggttgtaagcccaaataatggcagagaaacacagggctgtttttacaacagaaaactcaatataagttttatataagaatcctataaaatttgaaccagagctcctatttagttgttataatgtctcctaaagatcttaaatgcttctaaaagctaattattattccagagcaactttttccttttcccccttataaagtttttttttaaatccaaaatcttagatttctgtgccacagcaaaataaaatgatcaacaattaaagatctgtacttaaaatagtacaccatttttagtggagggagggtgcatgcctatatgatggtaagattcttttgaactctaaggacaattcctcatggaaaaaataaatttcagtgcatattataaaaatgatttgcactgtgttagcaaaataaggtgttttaggttgtattttaaagacaattctaaatcatttctctggaaagcaagaccttaaattcttctctttaatagaactgcttttatgcaaagagatggtcttaacatggactaaacagtacataacaataatgtttgttatgtaaatagtatatcacatttgcttagtagcacaattcaacagcaggctgaaagtcgtggctcctctgctcagattgagttttaagttacctaatttatgtaatcagaatctattctaggtggccgtcaacgtaaactgtgtttccctattatatccctctggagactgagaatcaaattaaatagtctttcttcaaagcagtactgtaacatgaatgtatttatctcagtcaacagaacttatatgcccactgtatgtggagcttatttcaatgctaatttggcttagttagcagacctagaatctgcccaggtgagacctagaacaaaaatagctggggtgaaatggataagggaggtagaggtatatgtcaaggcagagccctatgaggaaggaagagttttcaaagaatatgaggaacatagtgctgagagtgtggctgccttcagcaccgtacacctaatctagagaaaatatttcccatgtgggaggtcctgtctgcattcagtccacccttttctgcctgcttcttcctccaagtgcctcaacctctacatgctcactctcctccccttccctcagcccatcttggtctaagcagctttcacaatccaaaccaaacatcaccagccacccgctgataagtcaccagcatttactttcctgagttactttttctccattcattgagactatggattcatcccaactccttctaaatccctcaaccatccagctatattttggctaacctttgccctagacactctaccagatgttaatgcagtatcaagtgtaaattgtgtcaccctattctgttctacccttttccctgctgccgaaatatcttgctctcctctacctcatccccaaagagcctataaattcagagtatccaaccttttcatggattcactcactgttgttcagtaatacaacttccatattttaaataaatcataaaagatttttgccttctatcaaagtaggaaactttatatttatacatgatacagaaattgaactatttctatcgttcagaatttagcatataacaggattttaaagtgattgaattgccatcctaacttggatttgtattaggttatgaatgaatactgttgttagtccaagctatttgaatgtaaagttaaaattctccagcaatccagaatgacttgtaacccttcagtggaatgggaaatttctggtatgcaaatagggtggtgttccagacatttgttttattggtggtgtttgggccttgaaacacatttctaatagaatgacatatggcaaagggtatttagatggtcctatgggatcacagaagcccatatgatttaaaatatagataaaataacacaaaattgggtacataagggtttaaccaggctttcctgggttagactaagcctctaacctctgttcctatcctgttcttatgggaggaaaaaaaatgttccatgggatgaaaagaaaatgcattgactttgtagtctttattctcctagccgcacttcgggtatatccagaaggaagaggaaatgcaaagaggaagaagatgtaatagttcttctctccagctaggtgcacttgaggttgttcataaatgtaaaattatgtcaggtttctaacatgggacactgcacacagttgtctgacctgatgaaccatcccatttgaaagtatagattattattatttcttgtagtatttggttgttttccatctcattcatgaacaactcaacctgatagtagtatccaataaatgcctttcagggctcaggaatgaattgacatcctagttaagaaatgagacttaataatggagactgaggcggtttgtattaaattatatgccatgaagtgttcattttagctttaacctaattatgactgtaccaccatgaagtacagaatgaaaaattatatatatgggggggaaacagaatgaatatctgattcttttgaatgcttgtggaaatctttgagatcgtgcagggcataccacaaaatagcctttagaacagatacccaattttacagttcataggacaacatcaaacattagtaagtctaaataagatgaatagaatttttgttatgtaaattttgctagaacagtctattttcttgcacccctcaagttaacctcttaaaaaaatgaatgtataatttctaccgaaagaatatcagagagaatctctctggcctatagtgttaaaatattgttcacaaatcctgattagttaagtgcatacattatgaaacttacagaataaaacttattatacatctctttcttaaattaatatctttacacattttcaactggctccccaagtctgataaggaaggattaaaagaaaaaagaaatgtattagttgggtggccaaggagtttcctttgtaatgttgagagacttccgctttctgaatttcgctggttctctaaggtaaaagagttaaatagtacccttgttcaccaaggaaagtgatccaaactatatatctagtgcagatatttcctttgcattattagtcttctctagagagaaaatacagtttccccttcctctttctcttcacatttactcttttcaacccaaaataagagacatagaaagcaaaccacagccagtttggcatcttctcagtgctactagtataggcacatacacatacacagtctcagcaaggttataaagaaccctgtcaggtccacttgcaacatggccttgctacttggattagctcctttaagcctgaaaataactttcctggtcatggaagaactggacgcatcttttaacttatgaaatagaagttgaacttgaaaactctttttaaaaaatcctggttttgcaggacagctacataatgaatgtatatattaagactgtagctgaattgcacatgaaatcagattgccaacttcttgactttcaatgttagacatttatccttaagttgtgagcgatatatgtagcatgctgtgaaatgtctgttatagctctttaattcatcagtattaatacagaattatcatttgcgtttcttggtactttttattcaatgtaatcagaagctgtgatgttttgcctttgtagtcctgtgctttgttactgtaattttttttttttttttacgaagcacgtgactggactaatgtaaggcagatgacgtgatctttaagactgctatatatatcagtctcttactctataaggttttaaattagaataagcttttatcaaatagataattgatgcaatttaggattcacgcaagtttcagtgtcaaatggcggtcttatagtttcaattctgaaaatagcaaacttaataaacagccactttaaacttgttctggcaaaccagaccctgctgtagatatagtctaaggtagttaaccatataagccttttcaactcttaatgccctccacatgaatcagcagttaagaaggttctagaacccatgaaagcttttgtatgtattactaggttttgtttttcttatgtttgctgattttacagttctgactaaagctgacctaaatggatcagtttatgtgtaatattctagtgctttaatgactctttttttctttggagggagggtaacattatttggacagatgcagaaggaactgttagtgagtcaagacaaacacatctgaaataaaggaactgtgtattaacatgttaacaattcataactgcactttttatgacattttgaaaatctatttataggtacagaacaatgggttttgttaaactgtatcacatttatacttgcagaaatttatttcattgttattagtaggaattttattggttcaataaaattggcaaaactgaaaaaaaaaaaaaaaaaaaaaaaa

SEQ ID NO: 28666 - DNA, 5632 bp, Homo Sapiens
gatctgaagactaggggacaatggatatcatagagacagcaaaacttgaagaacatttggaaaatcaacccagtgatcctacgaacacttatgcaagacccgctgaacctgttgaagaagaaaacaaaaatggcaatggtaaacccaagagcttatccagtgggctgcgaaaaggcaccaaaaagtacccggactatatccaaattgctatgcccactgaatcaaggaacaaatttccactagagtggtggaaaacgggcattgccttcatatatgcagttttcaacctcgtcttgacaaccgtcatgatcacagttgtacatgagagggtccctcccaaggagcttagccctccactcccagacaagttttttgattacattgatagggtgaaatgggcattttctgtatcagaaataaatgggattatattagttggattatggatcacccagtggctgtttctgagatacaagtcaatagtgggacgcagattctgttttattattggaactttatacctgtatcgctgcattacaatgtatgttactactctacctgtgcctggaatgcatttccagtgtgctccaaagctcaatggagactctcaggcaaaagttcaacggattctacgattgatttctggtggtggattgtccataactggatcacatatcttatgtggagacttcctcttcagcggtcacacggttacgctgacactgacttatttgttcatcaaagaatattcgcctcgtcacttctggtggtatcatttaatctgctggctgctgagtgctgccgggatcatctgcattcttgtagcacacgaacactacactatcgatgtgatcattgcttattatatcacaacacgactgttttggtggtaccattcaatggccaatgaaaagaacttgaaggtctcttcacagactaatttcttatctcgagcatggtggttccccatcttttatttttttgagaaaaatgtacaaggctcaattccttgctgcttctcctggccgctgtcttggcctcctggctgcttcaaatcatcatgcaaaaagtattcacgggttcagaagattggtgaagacaatgagaaatcgacctgaggagcaaaacaaaggcatcagctcttacaccaaaagagttaacgctgtaaccaaaggtatagttttgttttttattttaggagaactgactggtaaatgaagaaatggaccaaattttgtgtaaacgattagaaagatgaacaaagtattgccctttgactggttttcttcttcatcctgagaaagatacattctcttgcagctcttcattcattggtgacaagcccccaccccgggactttactaatgagcttgttaaagaggtgccaaagaacatattcctcctttctttattctttctccaccaaaaccctctacttcagaattttttcaggatatttttcagcccaaggtcagaagaatgtgttaatattttaaataaaatatctggacatctacagccactgtgtaaatagaactgcctaatgttgagagtggtttttagcattaggtttagcaagggggagatccgtgggttgtgcgtcagctttgggtgaattttgtttctaccctgtcacggggaaagttcgggttgagtccaggagtgcacactgctgctgccacccaatgcgctacatatcacttttttttgttttgttttgttttgtttttaaaagatcattttatcttaaaaaggaaagctgatccaagtaaacacgaaagtatttgacacaccccacagattttacatgtgtgtaaatgtttcactttaaaatctctatgacagatacacaggaaacatgagatggtttctgctaatgagtggcccttgagtacacacttagatgctgtctgccctgtaaatttggatctggtgccccagggcagtcaactcttctagcacaggctgaaaacacgtgtgtgtcaactgaggttcacaccacttggggaatgagcctgttttctttccaggtcaggccctggtgtgagatcaattttagggctcctaattggagcacagaaatgtatttggtcaaatttcattgaaggtgatttcttcctttttctgttgtactttatggaaaaaccaagatggaacctgaaagttaatgtatccttgcttttagcaagagactcagtttcttataactagtcctaaggacatatgccgcaattgagtaattttacttttaccctatgaaaataacatggtgctgcactataatatactctcggaatcagtgtgttagttacagctatacagtgaagggggataactgtttctaaatttctttaaggtgatgccaaaaaatggattaaaaaaatctgatcagatttaatgttaccagatttagtgcattatttaatgctattggatcttttggataattcttggcttaatttcttagctacttgaaggttaatttgcaagacttttaaaaccttagaaaagttttaaggttgcaaagttatcaacactggggcagagggtggagaggccaatgcgggtagaaggaggcagttatgtttatattgaaggtgaaatttttctttcatttagaatggaaaacatccccaaatgtatcattataaactagtcagccttgactacacaaaattgacctttaagttgcttgagaaaaacacaatgcaaatcgttcagaagggtcaacatcctttggtgctaaaatcttgtgtatgttttcagaatggctttttctgtatgttatagaataatcactaaaggaaaggtagttgaatttaaagtcatgaagcaagactctttaattcagttattttaaacaagaattaaaaccccaaacatccttggcaggctttgaagcacacagaattttctagtatttcttattaaatacaccaataataaacatatacttagtttacctgatgagtttagacataattctatataatgttcgcttatattcatttattaactagcaacacttgtgcaagaacaaggtattctgcttgaaaacactgatttttaagttcctgttgcccgattgtaaagaaaatcatctgacacagaagcctggattttgctctcctaacactggtgttttccttgagcctctaattcaaataaaacaaactgatacaccttacagccttattcatctgtgtctggataactcacttttcatctattgaataagaaaaagtgtttaaacttaataaaataaaaaattgtgcaccaattactacagatccttgaaacagtaagccttggattttagtcaagtaatccagtttttttttaatttaaaaaaaaccatcaccttttaaagaactttaaaaacacctgtgatgccaatgtggacattgccgctgccatgtctttacacgcatgtgtcgtatagctctgtcatcgagttgaggaagtccatggtttgcaaataagggtgggggaatcaaaatttcaagatggaaaaataaaacaaatagtaaaacccatttacatgtaggaaagaaaagttgagcttcaacccaatgtgccactttgatataaaacaagtatgatatatatataaactgaagatataaaacaagtatgatcttgcctttgaaatcataaatgtttggggtacctgttctttgccagttaagatacatatcttattatctttgtttttttcaagtctatgctcctgtttgaagcttttcctgtaatttaggttgtctgtgaaatacctataacatataattcctatagagtatgccacattttttttctaactcatttcaaatgaaattctctcagattctagtttttgagcttgtccactagatctgaaaataaagcatcctttcctgagtccacttgaactaattgtgaatttgttacttaatttactggcatcttgggaaacaagttttgctgtggcaggaaggctgttttgagagtgagcgttgagtctactctggtttgtggatgacattgcattagggttatttcctgtattaccagtgcccccttgtggcaatatactttatgacttggaatgcaaacaccacttttaaaagcctgttttcaagtttttgaaaggcatttgttttctgttgtttgccaataatctgaaagtatcatgtgaaaggaattattttaaaagcattttaaacctttcccaaaggtaaaatgtgctcagattataggcacttgtaattctaaccttgtatccatttgatcaaagaaaatttgtagaacatttttacctctcatgatcacaatcattagtgtctccctttataacgacctatgttttgtttactttgaaacaccaaatttgttgtcttggttttttttacatgacagaactcatgcagtttcttttttagttgaaagttcacatcttgccccttgaatagtttgaacatttctttcttaattcttttttgtttttgttttgcactgtaaaactgatgaaaactttaagccaatcttaatgcactagcctctgtagtgtaaggaagtgtgagaaggagtttcttaatgagtttacacgtttaaatcaagcatattataagttatatgccatgtgttgaaggcttttctatttatatatataaagatttttagtatttgtttttagtgtccttgtgttgcaataatttaactcctttgactcagttgctgaaaatatttcttctattaagaagtgctcttgacttcaacacccaaacactgaaaatcatgtcaatgttacccaaagataagtttttatacagatacacaccttataagttctgatttattttcttactcattatgctgtgttctaaataaatcatgaatgagaagagtgctttattgtgaaattatttaaaactgtcctttaaaagaaaaagaggaaacgatgaacaaaaactaatctaattgccaagttagaattcattatttaatttacctcctatgcaatgattaatgctgcaaaatgtatggttatgttaccgtatattcacaaaagaaatattattacaaggtttcagaggtagccaattgcattcttttggaaatttactgtactgtttcaatgtgttaagtgccttgttgtaaagtaaaattttaagtctagattcattattttcctgacatatatttttcattatgatatctactgtatgctattgtgatagttttatgaaatgcttacattttaatcaaatatgtaaatttcagaagctcttttttcctacccaccagtaccttaatcattggtttatcacattggattcaaattcaggttccttttttgataaagaggaaatttgttttccatgcttgtgattttgtgtttgtaaacatttcaggaggaatttaggagtgtaactatagtttatacttctataatgttgtcttacatttacatttttaagtgcctaattgttaaaactgatttatgtttctcttctaaagaggatatgtgtacttggtttctaatctctttggttttgctttttaaaaaatgcaagagcctatactttgtatttacctaataaaccacagtgacatcaacagtcaaaaaaaaaaaaaaaaaaaaaaaaaaaaaaaa

SEQ ID NO: 28667 - DNA, 2859 bp, Homo Sapiens
gaacaagaacatcaatctttgaaatgatgccaagtataagcctctgtgtgtgtgtctccccactccaatttgtccaacagactgcttccaaagaaatcttcctaaaacactgaccatcttttttttttttttttttggctgcaaaatctttcatttcctcatcccctctcataacttccaatcttcttggcctggcactaaggacctactacagactggcactgaaatatcttccctaccttatcattccttgtgcttctccacaagcccactcttccccttcatcatacatgtgccgacctttcctgtctcttttactttgcagcaccaaatgctttctactttgtggtctaggaggaacacatgtcacttttgtaagctgctcgaaagcaggggccacaccttcatccttgttttccacacaacaccaagcacttagtagacacccaataaatcattgctgaatgaatgtattcagcctggaattgcactaggattttttggccaacacattgtattcttaactgataccagacttccaatcaaataaaatccttaagcctttttcatagtctttaattaaactacttctcttccattatttccctctgcctacttttgaactgatattcagaacttttctgttaatgtttaattttcatccattattcttgtctgtacagatctttttgatttttgactctcttatctagtttttttttttttttttttggcttcccgttgtgttatccacaggcacaatgggtatattgactatcgttcattgaagttgttgatacaaatgttgaacaggagaaaaaccagtagcttgccaacttggcacctcattctctagcttgacagtaatctcttatctagtagtttttagatatggttatttaatcaaatatcactagcttctaattttgttataattcattcatgtatacagacaatgaagaatcatctttcttcattcaacacatttattgggaaccaatcattgtccaaggcaatatgctaggcattgtgtaatagaaagcgattaagcttttacccctgtcctctttggcctgcaaagagcaggtaagattcatgcacagacaaatgtagtaccaggtaaatagtgaggccaaacacaagaggcaggtcaaagggctttggattcagaggatggagaagctctttctaggctggtgaaatatttgcagaatgagtaggctcataagtggaggtgaggtacaggctaagctgctgtaagaaagagtccaaaatgcaaaggatttaccacaatgcagttaatttttctcacaacggtcgaggtaggcaggtggtccaagtccagttaatcagccctcctcaacacaaggcttccccttgtaagctcaggatgaccgctccagttctcatcatctcccgggcagaaaaacgggagaaagagaactagacgtaccacccagtcattttaaggacatagccaggccaggtgcagtgactcacatctgtaatccaagcactttgggaggtcgaggctggaggatagcttgaagccaggagtttgagaccagcttggataagaaagcaagaccttgtctctacaaaaaatttaaaaattaaccatgtgtggtggtgtgcacctatagtcccagctactcaggaggctgaggtgggaggatcacttgagcacaggagttggaggatacagtgagccatgatcacaccacctcactccagcctgggcaacatagtgagaccccatctctttaaaaaacaaaacaaaaaaacatcaccaggtagttgtttacatgtcttctattcctataacatcggcctgagcttagtcacatggccacacccagcagaaagaactctaggaaatatggtcttatgctaggtaaccccaaacccagctaaaactgttgcttttgaagaagggtgaaacagacaatgtggaggagaattaccagtctgccacaaagagaaagaattctatgtgaggaaaacgctctagaagagggagctgattaattagttatatctcagccgagaggatgttatgagaaacacagatttgggtttaatagaaaaacttagaacccttcaagaaggaatgggcggacttgagagtgtcctccgcttctgaaaatgatcaagaaaaatggtaagaatgtacacctcaagggtggatggtaaaggtcagcctttaagcctcaatggcggtgtggttgtaggtggggtgggggtggaggccccgaagacaggcagactaccacagtagccccgatggaagcagtgagaatgaactggaaggagcggctgtgggagcgacaacgtgatgagaataaacccggcttggctctgccctgtgcacacacaggtgagctgtgtgctcccggatgtgtcagctggtatatgcgtctgtcagaaggcagctggggagcactgttagctcagagactaagaggcagacccaggaagcccttctttgcattggtcagggtttgctgcattttcccaagcccaggaaatggaacccagttcttcttctttctgtgtaaaataataagcatcacaataggctgtgctcatgagaacgcattttgtttccacagaaatgttttttctcactctgtcctgattttgatttctgttaaactcagtaaacacattaccaaattttaaaataaggtgacttgttttccccaactcacagttcaccaaaggtatttcatctgtttgttctgaaaatgcagctgctgtctagatttatgtgtgctctgacaagaaatgttttgtgtaacaataaaaatcatttcctttgatgaaaaaaaaaaaaaaaaaaaaaaaaaaaaaaaaaaa

SEQ ID NO: 28668 - DNA, 4757 bp, Homo Sapiens
ctaatagagtggtataaatcaaatgctattggtatacaaaaggacaaattttgtcagccaagtgtatgggtatcttcaaagagcacaggtgccatctgttctgagctaatgacccattgaagaaggccacaccaaatttgggggaaaagcagcataaacaaatgccagagtattttccaggcaggttgtatttggagaatctcctaatgttgtatatttaatttgtcctttgtccaagaataatgcaatgaactaggcaactagttgaataaaaattgaaaccaagttcaaacaagcctattgaaaaatgggcaaaagactggaaaaacatggccaataagcgtaagaagagatgttcagcttgatcagtcatcaagaaactacaaatcaagaccacactgaggctgggtgtggtggctcatgcctgtaatcccagcactttgggaggctgaagtgggcaaatcacttggacaggagttcaagaccagcctgggcaacatggtgaaaccctgtctctactaaaaatacaaaaagttagctgggcatggtggtacacacctgtaatccctgttactcgggggctgaggcacaagaatcacttgaactctggagagagaggttgcagtgagctgacatcagccactgcactcaagactctcgatctctcgctctcaaaaaaaaaaaaaaagaccacaatgaaatacaactttggactcagtagactgacaaaaattaacaaatgttacacagaatctcttatattgctggtaggagtataaattgtttcaattatttttgaaactaagggtttgcattatcttgtgaagtttaagatagattcacatatatgctcaagcagcaattccatctctgggtatttacctaaaggaaatgacagcatgaatgccccaggagacatggtcattaaagttcttagtagaactgctcacaatagcaacaacaaaccaaatgcccattaacgagagtggatgaataaattacggtgaaatattttgcagtcaaaattaacagataaatccaatatgacttaacagtggtttacagcgaatgttttgtttctctgctgacacatcaatacttgtgtcttcatatgtttagcatttttattctgaacttatatgtggttgaaggtcatctgtgggagtcagaaactaaattgagcatgctgcctccagagagaattagcatttgcttgtttttttcgggtaacatactgctatggactggggccactttagccctgtttgagtatcctaggctattagtagagtcaacttttacttcttacagcttattcccaaggcttattctccagtgtaaccctagatttatttttttaatatttttatcttttttaagattcaagggatacacatgcaggtttgttacatgagtattgcataatgctgaggttcaggcttctgatgaccccatcacccaagtagcaaacatagtacccgataggtagttttttagtttttcaacccttgccccactccctcccttcccatgaatccccagtgttagaaatgcttgttccccagtgccgtaaagaaatagcacttgaacataaatttaatttcttcagcaaggccatttttactttctgcagaaagggtacactcactagcagttttgtcaccagagtacacagaacaaaggagacagggtcatttataacctgatgcgtccacactactgctgtgtctgatttccactggctggaacgggacctcacattctgtatttgtcctgattggctagcaacttagaaccttttaaaagaggcaaaggcagaggagaacaaaggaaggaggaagtaacttgtggaatgctgagaaaggtaaaaacaccttcaaataaggaagaggaacaggctatgacctaatgcttgcttggaccagtataagcatgccagggcaaatatttaggctaaattgtgggagataacataaagtacattgatttctttattacagatagcagatatttaagaatgttggcacaggtctttgaataaattttgcttctaaggaaagttactgtttattcctaattagatggggaagaaagtctttgaagaggaacctctacttttttttttacaccagtgtctattgttcctatctttgtgtccatgtgtacacaatgttgagttccaacttacaagtgaggacatgcagtatttgtttttctatttctgcattaatttgattaggctaatggcctccagctacatccatgttgctgcaaaggacaggatttcattctttttaatggctgtatagtattccgtggtgtatatgtaccacattttctttatctagtccaccattgatgggtacctgggttgattccatgcctttgctattgtgaatggtgttgtggtaaacatgagtgcaggtgtctttttggtagaacgatttattttcctctgagtatatacccagtatgggattgctgggtaaataataattccatttttagctctttgagaaatctccaaacagctttccacataggctgaactaatttgcattcccaccaacagtgtgtaattgttcccatttctcaaccctggaagggttattcagatagtgtttgccagactgctggaagtgtatttcactaactatagtttgattcatatgtcttccgtgacttatctgtaaattccttgaaagaaggaacttctgacctaaaattttgaataaaacattaaagttttagggaaatttggctgggtgcagtagctcatgcctgtaatctcagcactttgggaggccaaggtgggaggattgcttgagcccagaagttcaagaacagcatgggcaacatagtgagaccgccatctcaaaaataacaaataaaataaagttttggggaaaattcttatatatttagatactatagtaacgttttaataaaataaactgagttgcttttcatgtatttctgttttctaaaaattatgtgctatattaattacctgttcctgccctggagatgatgtttggttatattttcaggttctttcactatttttatttttgtctgtttggacttacagcttttatctatgttaaatctggtatttatacttccctttaaagccatatattttatcaaaaaaattattagagaaaatttatactcacatggtattttctaatattaaaaactccttaaaaaaactcatgtctgtcaccttgctcatttcctttttttattttttgagacagagtttccctattgtcacccaggatggagtgcagtgagccactgcactctagcctgggtgacaaggcaagaccctgtctcaaaaattaaattaattaaataacaccataatttatgggtgtgtatttatttatagctttagccacatataaactcttaaaatgttatagtgtattttattacttctaagtaacctatgattttatttttacttcatcttaactcacttattgaagaggttaatattttaggtagttgaaatgttttcctgttttaattgtcagtattaatttctagttataaatttggactaaagaatgtgacctgagcaatttcttcattttggatattactgaagttttatttgtgaccaatatttgaaaccatttcatggttcctgaacaagaaagcatggtatgtgcttcaaaatacaacattcaacttatagctgtattcagtgttgttaattgtattttgaaagtaaaaactaaccattggtttttgtctacctgatatatatgtgcctgatagtatcttgttgtcccctgctatgtttttgtttctgtcaatgtatcatattttaaatcatagttattttataaaatgtgattgtgagttattatttaaaccatgtcttctttagaggttggaccttttatcagtgtgaataactctttttgtcccttggatatcaattaaattgaattctaattttttttttttttttttaaccttacctcaggtgctgtttggctcctgcagccaaatacactgatgatttaattaaaatgtttatctcccccaaattttaagaactttatttgggttatttggaataatgtataaaatatctatatagattattatataattcagggggaagcaaattatcagaacaatttcatgttatacaaataacatcagaaaaatatcttaaattatatggcatattctattgattcatccacaaatttataagtccttaccacctttcattatattggtactaggcattatagtagtgctaggcactatagtaatgctggggtataaacaagaataaaacaaaataagttccttatttcaggtaacttacagtataggtcagtggttcttagcttgctttttaattatgaattcctttgaaagtctagtaaaataatccaacacccttattccccattgcacatacccccagatgttttagacatattttcaattgctccatggaccttaagaaaacttggttggtgtgcagtttggtgtattatgggtaagactggacctggtgttagaaaatctgcatttgaggctttgttctgacagtgtctagtgtaaacatgggcagaccacttaaacctctctttagtcttttctgtagaatgatgataataccatctaattagcaggattgttgttttattcagtgagacagcatatgtaaataacttagtaaaataaaaagcaacgtgtttacaaaaaaaaaaaaaaaaaaa

SEQ ID NO: 28669 - DNA, 4276 bp, Homo Sapiens
acatgagaaagaagcagcagatcgaaaacgcaagcaagaggaacaaatggaaactgagcagtaagtattttttttttctaaattttgggttctttttaaaggctagcatggaatttttaaataatagactttcattttccagactttatgaagccttttgaagaagtgacttttcccatgtgttagaaaaatcttcaatatatgatgatgatcttatttcaggcttcattctcttctgagaggatgaaattgactgaggcagtcactctgtgaattattcttgaatttaaacgaagtgcagataggatttaattgatactggctttgcaagaagtgtactcatcctcaaccatttgtttgtataatataatacatatagatagaggggcgataatatactggtagacaaagaatgcaggaaatgcccttattcatcacaccaccaagcaggcctcaccctaaagaccagcaaaagtaacaaaagcacatttggaaacccaggaagccagtaaaagtaaatctaaaggctgacagggtgtacattattatatatgtgcaatataaatcaaattcaaagctgttttctcttaaattttgatacttatagagacaggacttgccatggggaattcctttccccttactatataattttattactagaaggaaaagtaatagcaatgataataatgaacagacttcgtgtctttattacatttgctttcctagttacctttagactgtcacttctgagttctttctctgacatgcttttcttttctcgtgaagcgtcttacattctgactaaattttgtttttttgttgttgttttagtgaggtgatttttaaaacatgctctaggtcaataagacaaagttaatgatgagcagtaaaacaattcttgaataattttgtactttttttctttatataatatatccgtaagccaaagtctttcttgacaagtacagcgttttactctgctttcttagtttggaggatatacaagtagttttagctccttgagggagtaatttaatttaaataacttatctaaagctcaaaaatattattccctctaatgttagactttaagcacttctgtaaatatttaagttattctttgtcacctatcattttctattctatcttttcactgaaaagctgttggactgtttgttgcttttgactttattgtgatctcaaaattaagatataaaattagttgttactagtatatgtagcccaacccttctttagtatcttaaagttatctttatgtatttcagtttcttttgaatgtcctccaatgtaactttctcaaattctaatatttgtgttttctttccttctcctgttattacaaaactttgtacttggacagttttgctctgtaaagcatttcagatgcagcttgtgtgaaatgcattatgcaaaataaagtttattgtattgtattcccagccaaacaacatgtaatctacagtaataaaaaatatatctcattttgggctcaaagcattaatccagttactgaaaagagaatacaagtggagcaaacaagagatgaagatcttgatacagactcattggactgaatttcccccttccccccattgatggaagaatgttccagattctaaattgaggacttcattattaatggcattactgtgttatgattaacaaatttcctgtaaggtacacactacatactaaggtcggccatcattcctgtttttttttttttttttttttttttaaccaagcttaaaatgaagctttgtgtttgaaagtaataacaagctcagacgaagatggtggttgtacattattcatctagaaaatataaaaattcattttgttttgaagctagttattaaactggaatagcagttatatccctgagaatggggcccttctcttgacattcctttgttgtttaattctttagaatcttaataaatgtttttttaatcctgagagattaaacagtagtagacttgttaagaatgaaactgtaaccaaaattttaaaataaagttttttttaaaaaaaaaacctgatttttagatattttttgttcttgtctatttgaattggttcataatatggcctgaactctaagccaaggtactagaaattaagatttcaattttaagtggttatttttgtgattgacaataaaatggtaccttttgtgaaatgttagtgaatgttactggacgtcattcaagtttgatgaattggccaaaattttaaaaacagtgttatcttaagtctatttaactttaaagctaacttcagaactcattaatctgcttgttacatgcacaatgattaaattggtctattttaagatgcagctttaaaaaagaatggatgtagaagccattaaacatttataggtgtcaccttcccattgtggcctgtttgtccagtgaccctgaaattgctcttctagcaacacactatttgtgatgtcactgaaaagccagatatgatttaatctagcatgttaattagggttttgcttatatttatgctacggaactgcaccattctaagagctacagtcagttcctttgcagtctaggctattgacttattttaaggaaaacatttttagcttttacatagggattgtgggcatttagtcacaaaattccaatgtgttgaaatatttttgttaacatttgataggcagaataaagatgaaggaaagaagccagaagttaagaaagtggagaagaagcgagaaacatcaatggattctcgacttcaaaggatacatgctgagattaaaaattcactcaaaattgataatcttgatgtgaacagatgcattgaggccttggatgaacttgcttcacttcaggtcacaatgcaacaagctcagaaacacacagagatgattactacactgaaaaaaatacggcgattcaaagttagtcaggtaatcatggaaaagtctacaatgttgtataacaagtttaagaacatgttcttggttggtgaaggagattccgtgatcacccaagtgctgaataaatctcttgctgaacaaagacagcatgaggaagcgaataaaaccaaagatcaagggaagaaagggccaaacaaaaagctagagaaggaacaaacagggtcaaagactctaaatggaggatctgatgctcaagatggtaatcagccacaacataacggggagagcaatgaagacagcaaaagacaaccatgaagccagcacgaagaaaaagccatccagtgaagagagagagactgaaatatctctgaaggattctacactagataactaggttgacatacctggaatatagagaacacttgagaagtttgtaatggttttcatttgaaatagactgctgaaagttttaaatttttataagcataggtttgatgttgaaaacttgttttgagggagaaaatccctttgttttaaagtaaagtaaacattatcgctaagtgtacttgtgcagtattaacagctacattatacagtaaatgtgggataaaatccatttagaaaatgttaaactgcttttccagacatggttgtagcatattttcaattagtgtgtgtatgttaatgtgtaattgatagtagaacaaagttacatttttaaaactgctacttgtataaaccttgcctcttttcccaaatactgtgggttttgtgcatagtttttacaaaccttggatttaccagactgtcttttcactgtttgtgggttttgtagaagttacacatttttatggtagataaaatgttacttctatacaagtactcactccctttttatcaaaagttaattttaatctcacagtctacattgtgctacattatccagcttctttggaacaatgtgtgctctgtatggttttttttggtatgacaactaattaagcaactgacattgaactgagaattctacaaactataaaacattaatttttgaaggtaatttagttttgtggctggacattcagtgaagtcttaggacttctttgcagacaactgactgggtatatataggaatgaatctggctttagggttaaatcatttaaggtccttttataggcaggcactagtaactaaaactgaaaactaagtaagtttatttttgaggaatgttgttaaaaatgtctttaggaagtcactaaaacttaattggaagaaaaaatcatgatgcttatacaataaatatgaataaatgttatataaggaaactcagaaaaaaaaaaaaaaaaaaa

SEQ ID NO: 28670 - DNA, 5992 bp, Homo Sapiens
gcaactgagacatgcagtactaaaaccctttttgactgtgcaacctttatcggcatttcataatttctgcttaatgcacttcagtgtggatatgaaatgacaaaagttctgtttcttctctttattatttatccttggttcctattctttggatctcatctgaggttgcctggcctgcacatgtggtcgggagaggatgtgatagatcagtacttgatactgagttgcatggtgtccaagccagtgactacaagtatcagggtggctgtgggtaaccatggatacatgtatgtatactgcacagactaccagataatgcacggtctacaatttggtgttatattatttgatatctccatttctccgctgattccatctataaattgtagctaactgaatccatatgtctatgtgcatgaatcctaagaaatagttgcagtggttatttacttcccattgctatgtatgcacccaaattattttgcaaatatctggtatctgtggtaaataccttggtgaaatgggaaggtactggtctatcttcagcagcttttcaagagcattcctttatatttttattacttttgtttattctctgttgcttatggaagtgtgttctgtctacagaaacagaagagtattgcaggggcgcttgccttctggatggcaaatgcatctgaacttctcaacttcattaagcaagaccgagaccttagtcggatcacactggatgctcaagatgttttagcacatttggttcaaatggcatttaaatacttggttcactgtcttcaatcagaacttaataattacatgccagcctttctagatgaccctgaagagaacagtctgcaacgaccaaaaatagatgatgtgctgcacacgctcacaggagccatgtccttgctacgacgctgcagagtcaatgccgccctgaccatccagctcttctctcagctcttccacttcatcaatatgtggctgttcaatagattggtgaccgacccagattcggggctgtgctcccattactggggtgcgattatccgtcagcagttgggccatattgaagcctgggctgagaagcaggggctggaactggctgcggactgtcatctgagcaggatcgtgcaggcaacgactttgcttaccatggataagtatgcacctgatgacattccaaatataaacagcacctgctttaagttaaattcattacaacttcaagccttattacagaactatcactgtgcacctgatgagccttttatcccaacggatcttatagaaaatgtagtgactgtggctgaaaacactgccgatgagctggcccgcagtgatggaagggaagtgcagttggaggaggatcctgatctgcagctgccgtttcttttgccagaagatggttattcttgtgatgttgtcagaaacattccaaatggtttacaagaatttttagaccctctgtgccagagaggattttgcaggttaattcctcacacacgttcaccaggtacttggacaatatattttgaaggtgcagattatgaaagtcaccttctgcgtgagaacacagagctggctcagcctctgaggaaagaacctgaaataatcactgtgaccctaaaaaagcagaacggaatgggccttagcattgttgcagcaaagggtgctggtcaagataaactaggaatctacgtgaagtcggttgtgaaaggaggtgctgcagatgtggatggacgtctagctgcaggtgatcagctcctcagtgtggatggacgaagtctggttggactctctcaggaaagggcggcagaactcatgacaagaacaagctctgtggtgacactggaagtagcaaagcagggtgccatctaccacggtctggccacccttctcaatcagccatcccccatgatgcagagaatttcagatcgtcgtggctcaggtaaaccccgaccaaagagtgaaggctttgagctctataataattcaactcaaaatgggtctcctgagagtcctcagctgccttgggcagaatatagtgaaccaaagaaattgcctggtgatgacagactgatgaaaaatagagctgatcaccgttccagccccaacgtagcaaatcagcctcctagtcctggagggaaaagtgcatatgcctctggaacaacagcgaagataacatctgtctctactggaaacctctgcactgaggagcagacgcctccgcctagacctgaagcctaccccattcccactcagacgtacaccagagagtattttaccttcccagcttccaaatcccaggatcggatggctcctcctcagaaccagtggccaaattatgaggaaaagccacatatgcacacagatagtaatcattccagtattgcaattcagcgtgttacacgttcccaagaagaacttcgagaagataaagcttaccaacttgagcggcatcgaatagaggcagctatggaccgaaagtctgatagtgatatgtggataaatcagagctcctcactggactccagtacctctagccaggagcatctgaaccattcctctaagtcggtcacccctgcttccacactgaccaaaagtggccctggccgttggaaaacaccagcagccataccggccacccctgtggccgtctcccagccaatccgaacagacctgcctccgccacccccgccacctccagtccactatgccggtgatttcgatggaatgtccatggatttgcctctcccaccacccccttccgccagccagatagggctgccgtctgcgcaggtggctgctgctgaacggagaaagagagaagaacatcagcgttggtatgagaaggagaaggcccgcctggaggaggagcgggagaggaagcggagagagcaggagaggaagttgggccagatgcgcactcagtccttaaaccctgctccgttttctcccctgactgcacagcagatgaagcccgaaaagccttccacactccagcggccacaggaaacagtcattcgggagctgcagcctcagcagcagccccgcacgatcgagcgcagagacttgcagtacattacagtcagcaaagaggagctttcctcgggggacagtctgtcccccgacccgtggaagcgggacgccaaggagaagctggagaagcagcagcagatgcacatcgtggacatgctgagcaaggagatccaggagctccagagcaaaccggaccgcagcgccgaggagagcgaccggctgcgcaagctcatgctggagtggcagttccagaagagactccaggagtcgaagcagaaggacgaagatgacgaggaggaggaggacgatgatgtggacaccatgctgatcatgcagcgcctggaggctgaacgaagagcgaggttgcaggacgaggagcggaggcggcagcagcagttagaagagatgcgcaagcgggaagcggaagaccgagcgaggcaagaggaagagcgccggcggcaggaggaggagcgaacaaaacgagacgctgaagaaaaggttatggtcctttaagggcagctagaattttaccaagttagcctgaacgtaatcgattggctggggcagagcgggctggaagttctgtgtttcttaagaagcacgaggcagagcagggcctggctcccccagctttgtgattggacctgcaactttaccccatctggcccacctacctctcttctggactgtctccagatccccttatctgccaagttttgtctccttcaaacttctgaactcttgggcgtgtgtagcagtgagcctctttgcaaagggttcgtttcctcgggcactcatctttactgaacatggcccagcttgtcattgtgaaggtgacattggttcagtgattgcttaaatggcatgtggaccgtgggaagcagtaggagcgtagtaagacagttggctgccattcaacatttcaaatagatggtttactcaaatcactcacttctggttgatggtaaagagagcagatggcttagaaaacatgatacaggaaaatttagtatgtaatccagtaaatatcctaagttatttattttcatgtgtgtgtgtgtgtttaaatcaagtaacccttttaattgaattttaaaatgacagcgaattttgacattctgagaaatggggattttgagatgtttctctccatatctccctttgtcctgtgtgtgtggccgacgccctctggatgaagaggctgtagccattgagctccctgtgggggcctgtttcatctcgaggggactgcgtgttgctctgtgtggtttgagagaagctgctcttctctgttacttcccttctatgaaggtagaagctttcagtgttacaacttctgatggcggaaaatttagtttttattaataattccttctttgatagtctagtgaactatattaatagaacagtgtactgttcacagaaaagaacttgtagggagttttttgtagtgatatgctctattaggatacagaacaatctaagagtaagcttgatagacatgatgtgacttcacttaaatggagtagagtgaataatgtaaggacactcacctctgttgaaattggtgatttctgcattttgtagacctttgccctctaagtttatcatcatattatctgttgaatctgaacagcatttgaagtcctctcaaagagtttgagctttcaggattaggttcccctgtgagtctttcacttgtgtaatggtaagtcaacattgatgatctttctaaggaaatcagatttacaaaatgctgagccgcttgatgtctaagtgttggtggtttttgctattgctttgctgttccatgaaagcgctccctggctgcttggagggctgtgcttttccaggtcagtgccagcttggctgtcccaggccgtgcacagtgcccattgctatagctgggcccagtcctggccacgccggagcctcggcgggggcagctgggttgtcacggcagcacagtgcacatgcagagaggaccaggccatgtttttcctgtgctgagaaactcttgggttatttaatttttccaatgtgttttcataactcatgattatgtgaaatacacttgtgttagtaactgcttctataattaagtggtcactgtaaaaaggcaaataacctatttttatatcagaatgtccaaaaatgtgccattcatttgttgggtagaataaagttgtcttgtaattgtatctgctcttggtataactaaaagaggatattttgatttcttcctaaaatgttaccaagcaactgttcttcatgttaatactaagattcttgatagttccatttaaaagccacaagaagtcattctggtttattcctcactccaagggaacacttactttgtgtagacaagaagatgagagtctttccttcaggatttctaaacacagagcaagaagattcaatgaaaaattgggctcagggcggtaattggggctggcatttattcttaagagttttctccctcaaaaggtgaaggagtgacattgcgtattcactctgtgtgtgtgtgtgtgtgtgtgtgcgtgtgtgtgtgtgtgtagctctagagggagtagggagaaaatacaggatgaaattgaaaacagggactaacaacttttcactgaatgccagcaagctctctaaaattagttttctttggttgaacaaatttacaattcattgtacttcatttcacagcattaaacatttactcgaggcagtttattctgtttgctctttcatcccccttcttatttacttttttcttgtgctctaaaacttttgtcaatctttaacaaaactgtgctgttaccttttttaatgttaaaagaattttaatactgtcaactgtagtttgtgcagatgtatgtcagaaaaaaatgtacagtatgtgtcaaaatatatttgaatatcttgttgctggttaaaaaaaaaaaaaaaaaaaaaaaaa

SEQ ID NO: 28671 - DNA, 6490 bp, Homo Sapiens
ggactaccggcggcgacgaccacaggagcatggcggacaccgacctgttcatggaatgtgaggaggaggagttggagccatggcagaaaatcagtgatgtcattgaggactctgtagttgaagattataattcagtggataaaactaccacagctggcaatcctttggtccagcaaggtggacagccactcatcctgacccagaatccagccccaggtctgggcacaatggttactcaaccagtattgaggcctgttcaggtcatgcagaatgccaatcatgtgactagttcccctgtggcctcacaaccaatatttatcactacgcagggatttcctgtaaggaatgtccggcctgtacaaaatgcaatgaatcaggttgggattgtgctgaacgtacagcaaggccaaacggttagaccaattacactagttccagccccaggtacccagtttgttaagccgacagttggagttccacaagtgttctcccagatgacccctgtgaggccaggctccacaatgcctgtgaggcccaccaccaacaccttcaccaccgtcatcccggccactcttaccattcgaagcaccgtcccacagtcccagtcccagcagaccaagtccactcccagcacttctaccactcccactgccacacagccaacctcactggggcaactagctgttcagtctccaggccagtcaaaccagaccacgaatcccaagctagctccctccttcccctctccacctgcagtgagcattgccagctttgtcactgtgaagcgacctggtgttacaggcgaaaatagcaatgaagtggccaaattggtgaatacccttaacaccatcccttccctgggccagagtcctgggccagtggtggtgtccaacaacagctctgctcatggctctcaaagaaccagcggacctgagtcttcaatgaaagtgacctcttccatcccagtatttgacctccaggatggtggacggaaaatatgtccacgatgtaatgctcaatttcgtgttactgaagctttgagaggtcacatgtgttactgttgcccagaaatggttgaataccagaagaaaggaaagtccctggattcagaacccagtgtcccatcagcagcaaagcccccatcccctgagaaaacagctcctgttgcttccacaccctcttctacacctattcctgctctgtcaccgcctaccaaagtaccagaaccaaatgagaacgtgggcgatgccgtccagaccaaactcattatgcttgtagatgacttctactatggacgggatggtggcaaagtagcccagctcacaaatttccctaaggtcgccacatctttccgatgcccacattgtaccaaaaggctaaaaaacaatattcgattcatgaaccatatgaaacaccacgtagaactcgatcagcagaacggtgaggtagatggtcacactatctgccagcactgttaccgccagttttccactcccttccagcttcagtgccacttggaaaatgttcatagtccctatgaatctactaccaagtgcaagatctgtgaatgggcgtttgaaagtgagccactatttctccagcatatgaaggatactcataagcctggagagatgccttatgtttgccaggtgtgtcaatatcgctcctcactctactctgaggtagatgtccattttcggatgatccatgaggatacccggcatctgctctgcccttattgcctgaaggtcttcaaaaatggcaatgcattccaacagcattacatgaggcaccagaagagaaatgtttatcactgcaacaaatgccggctgcagtttctctttgccaaggacaaaattgaacacaagcttcaacaccataaaaccttccgtaaacccaagcagctggagggcttgaaaccaggcaccaaggtgacaatccgggcttcccgagggcagccacgaactgttcctgtatcctctaatgatacacctcccagcgccttgcaggaggcagcaccgctgacctcctcaatggaccctctgcctgtcttcctttatccccctgtccagcgcagcatccagaagagagctgttaggaaaatgagtgtcatgggccggcagacatgcctggagtgcagcttcgagatcccagacttccctaatcatttccctacttacgtacactgctctctgtgtcgctatagcacctgctgttctcgagcttatgccaaccacatgatcaacaatcatgttccacggaagagccccaagtatttggctttgtttaaaaattctgtgagtggaatcaagctggcctgcacttcatgtacctttgttacctctgtgggcgatgctatggccaagcatttggtattcaacccctctcacagatccagcagcatcctgccacggggtaagtaggagagaaggggattagttgagcaaggggaggaaaaaagatacaggttcgtactgtatgcatcaggagcatacctacttggcctcactcattcactgttgagatgtgctggacctaattagaaaccttccgacctgaagtttatataaaactgggaaagccggtcactgcgaacagcgtatttgtatgtagtaagttgaatcccagggcactgtctttggagggcttattttttcactgagctaactatttttgttgtttcattttccataggactcacttggatagcccactcaaggcatggccagactcgtgaccgagtgcatgaccggaacgtgaagaatatgtaccctcctccttccttccccactaacaaagctgccactgtgaaatctgcgggggccaccccagctgagcctgaagagctactaactcccttagccccagcactcccatcaccagcctcaactgcaaccccaccaccaacccccactcacccgcaggctttagcccttccaccgctggctacagagggagccgaatgtctgaatgttgatgatcaggatgaagggagcccagtcacccaagaacctgagctagcatcaggtggtggtggtagtggtggagttggcaaaaaggagcagctgtctgtgaagaagcttcgagtagtactgtttgctctatgctgcaatacagaacaggcagctgaacacttccgaaatccccagcgacgtattcgccgttggcttcgacgtttccaggcctcccagggggagaatctagagggcaaatatctgagctttgaggcagaagagaaactggctgagtgggtgctaacccagcgcgaacaacagctacctgtaaatgaggagaccttgttccagaaggccaccaaaataggacgttctttggaaggggggtttaagatctcctatgagtgggctgtgcgtttcatgctgcggcaccacctgactccccatgcccggcgagctgtggcccacaccctacctaaggatgtagcagagaatgcaggactcttcattgattttgtacaacggcagattcacaaccaggacttacccttgtctatgattgtggctattgatgagatctctttgttcctggatacagaggtgctgagcagtgatgatcgaaaggagaatgccctgcagacagtgggcacaggggaaccttggtgtgatgtagtcctagccattctggcagatggcactgtccttcccaccctggttttctacagagggcagatggatcagcctgctaacatgccagactccatattgctagaggcaaaggagagtggctacagtgatgacgagatcatggagctgtggtcaactcgagtgtggcagaagcacacagcttgccagcgcagcaaaggcatgcttgtgatggactgtcatcgcactcacttgtcagaagaggtactggctatgcttagtgcctctagcactttgcctgcagtggtcccagcaggctgtagctccaaaattcagccattagatgtatgcatcaaaagaactgtcaagaacttcctgcataaaaaatggaaggaacaggctcgggaaatggcagatactgcatgtgattctgatgtcctgcttcagctggtgcttgtctggctgggtgaagtgctaggtgtcattggggactgtccagagctagttcagcgctccttcctggtggctagtgtcctgcctggccccgatggcaacattaactcacctacaagaaatgctgacatgcaggaggagctaattgcctccctagaggagcaactgaagctgagtggggaacattctgagtcttccactccacgacccagatcatctcctgaagagacaattgagcctgaaagtcttcaccagctctttgagggtgaaagtgagaccgagtctttctatggctttgaagaagctgacctagatctgatggagatttgagtgttggggtcatgagggggtgtggagtgggggtgggaacatgtgagggagggtaaaggggcttagggaaaagggggcataccaggtggggtatttggtttctattttttaattttataccaccactcccccctgaagttgacttacacttccctgtggatttgtggattaattaggaaaaccaatagtaatcacgtctgagccaaggagctggcccattggtcattcacttctgctaaaaacaggtttttgtgactttttttttttttaaatttaaatcactgtgtttggtatttttctgacaaaattaagaaaaagaaaaaaaattatttgtgggcaaatgttaaatttttttgtttccccttttacctcaattgtatcatagtactgggtttttttgtttgttttattgtgtggccaatgtctttgggcatgatgctatctaatcattgttaatgtgagaacatttctgaagatgggaaagacaaattatgtagctcacaaactggtttattatatatatggataaaaaacttttttcattgtggtcttaacacttttatataaaaatgaaaatggaaaaaaagtcccactgaactctctcttccttctccttttctttccttccctctccagagatgttggtttctacagcaaccctagatataaaattgtggctttaaaaatgcatgaaaccacctttaattatccagaatgaatagatttgtcttttcctcaccaccttccctccaaaacatgacataaacaatattttttgcacttgtgatccttggcccctttccccattctcaacaccatccatccctctggacaaaggatcatacaggtgttattagcaagcaagagatactgaagcgatcaaacagttttagggtggaagccattcccagtttgagtcttcatcctgtaagcccccaggggcagtccctgctttactgaacttcatcctgttagatggagagcatgcctgtttaagggattactggtcctacagccaggagctaattgttcaagaagtgttgaactttaaaaagacaagaccacttgttgaaatccagcgtgctctgtggctttcccctatttctcttaatacttagggaagaatctgacaggaagaagcgcacaggggtgtgcacaaagaaaatgacatgaatctttatttttcactgccagcttcaaggaaagaaaattttttctacaatttgcatgagggatttttttaattgtatgtactcatggttgtaaaccaaaacgtactgtaccgtacagagaaaaggagcaaaaaaccaagtcttctgtttatcctgaggctttccacaatgttcccctcctgtgagccaaggaggcaaactgcacaagcttgtaaatggttcgtctttaaaatgtacataagtggaacatttaataaaatgaggggaaatggatttataaacttgttttttttctaggtgaccctgtttaataggctttcacagactggggaatgctcaagatgtgatgggcctggtggtacaggtgtgacatttgttaccacccatttctcccaccccaccctgcttttttgtttgtttgttttttcatcccccagcacactataatatagtgaactggaaaagtcccttccagaaacagcttggccagctttgtgaacctttgacatctgaaaacaaccaaggatccatctgggcttctcttccccagctttttgcctgatgccattttattgacagacaatggactttgaagtcagcctttgcctttgagaaagttcaagaactatggttggtcacgtctatctacaacctaatcctactctttggtagtctctgcagcagccacagccttagcagagctggggttcctgtcttctgcacacgattgactttcttgatgggtaattttttttaagattataccaacagtggatcagctgggttttggccaggaagttgtctttgtggactctgcctgcatggcttagtagtagaaggaaatttttttttggttttgttttttataattcagtttaatcaataaacatgtatttattgactgttaaaaaaaaaaaaaaaaaaaaaaaaaaaaaa

SEQ ID NO: 28672 - DNA, 9360 bp, Homo Sapiens
attctgggatgcataccaatcagccggcgactagaaccaggacttttacagagaggagggcactctggggccaggctctcaaggagaaagaggggttccaaaactcagaaatgccacctcatcttgggcccaacatgccaacatgggctggcaccatcacaaaccacctgcactgccctggactggggatgtatctgcaagaaggtggtgttggggcctggtctgagaccatcctctcaaccaacaggccagtgggaagatgaaccctatggcagggagctcagtgctggctctaaccaagaggtgggcagaccctgggcctgtggccaagtggtcaattatccttccccattttccatagcatatgggcactgctgctaggggctgtcaaaggcacagccgggccaggccctgggagggttggcgctgctcaaggaaagacacaagagtggagaggcaggactccggggcgagcagaatgtggtgcttctaactcttggttgctcaaccctgggcaagttcaatggaggcaaaacagagataatgatgcaccccacctcttggagtagctgagaactgagaaagctcccacgagccatgcactaccaaggtgcctgccactctgcaattatgagccattagtattagctctttcctgacaccaggcctagggagcccgtgtgggtaccagaattctattctcatccttgcccctgagccacaaggtaacaaacccagctatgaccagactgggccttgccaacactgaattaaaaaaacatacattaactccgaactaagaaaggcaaggtgtgctgagattccaggcatgtgatgaatctctccctcccctcctcaaagggaaaaggaaaaccgcataaaggaggggagcacgggactgcagaaagatctcagggcctgccgggttcaaatcctgccacttacaaacacagtgcccttggataagtctctgagactcaatttcctcatcgataagatcggaaaataggacgtacttgcaggatcggcatggaaattaaatgaattgatgcgtgaaaaatatctggcacctataggcataaagtcaaaatcagttgcctttaagcaaacaagttctcaattatctgcctaaatgaaggacagaagcagcttttctggtatcaattagcaatggggggagaacaggagacccctcttcccaattaagttttgtgcttgatattaacatggattttttttgagaatccaccagccacagatgcaggggctggaagaccagcaagcttcagggacagcaggaaactaccaagaaacctcaaagatttttagggaagcagggtgatccacacagcacaaggcccctgacaggtgaggtttgtcagatttcctttgctggcacccagatgatgctgtgcctcctgacttgaggaaggttcaatgcttcccctactctgtttcaagccctgcagacttttgattcacctgacaccagagccagactgaactctcaataattcatgcctctgagcctttgcacatgccattccttctgggtggagaaaacacacattaactcccctgggtagaaggagcagcatgtgcaaaggttcagaggcaagaattgttcccctctccctaccccattcccctgctacactccgcacatccctccactgtatgtaacatgtgcacatgtccatcttccaaccagagatcacaggatgtacaagagcaaccgtctgcctctactctctcatgcaggtcctgaatccatatggacaggtcatgcccactgttgcctatgtcagctctagccacccatgtcctggacatcacaactccacaagccccaagctacttaatttgtccacggtctgtcctcagacaccactgctgcttttcctcccagatgcctgagtcatcctgaatagggttactcaatggcaaagtcagctctcaattaactgaatttcctccttgtcccatttcctctcttcctggtgcatggtaacaactcacttgctggaatggagagctcctgtgatttgagggcaatttacaacctctatcaccaaagcaggccctgcccagcagctgcccctcagcaatgaggacactaagatcagtcctggagcgccatcacaccaaaatgtaagttcaaagggagggactgagttgctcattgctggattcccagtggtgtgctggtaaacaggctcttcaggggaaaagattctgatttgcagtgtttgccaatttctgtgatataaatactctcactctggccaatttcaagctgccaatgtgacatcactgaatggagttgagatatgcagtagcacaccactacgtacattacacacacacccacacccacactcacaccccttgatatggtttggctgcgtccccacccaaatctcatcttgaattgtagctcccataatccctgcatgtcatgggagggacgtggtgggaggtaattgaatcacaggggcaggttttccccatgctgttctcatgatagtgaataagtctcccaagacctgaaggttttataaaggacagttcccttacacaggctctcttgcctgccaccatgtaagatgtgcctttgctcctccttcgccttctaccatgattgtgagacctccccagccatgtggaactgtgagtccattaaatctctttttctttacaaattacctagtctcaggtatttcttcatagcagtatgaaaatagcagtatgaaaaagaactaatacactccccaacgcacacacacacaaagcagcaaataaccacaaaagcacaggtaataatagaataaaataattaggaaaaaaattgagtatttattactttataaaatataatttacaggctgggcatggtggctcacgcctgtaatcccagcactttgggaggccggggtgggcagatcacctgaggtcaggagttcgagaccagcctggcccacatggtgaaaccctgtctccactaaaaatacaaaaattagccgggagtagtggtgcacgcctgtagtcccagctactcgggaggctgaggcatgagaatcgcttgaacgtgcgtgggaggcagaggttgtagtgagccgagatcatgccattgcactccagcctgagcaacaagagccaaaactccatctcaaaaaaaaaattattatatatatatatacacacatatatatgtataaaatttatggccagtcacagtggctcataattgtaattccagcactttgagaggctgaggcaggtggaccacctgaggtcagcagttcaagaccagcctggccaacatagtgaaaccccatctctactaaaaatacaaaaattagccaggcatggtggcaggcgcctgtaatcccagctattcgggaggctgaggcaggagaattgcttgaaccccggagacagaggttgcagcgagccgagatcgcgccactgcactccagcctggcaatagagtgagactccatctcaaaacaacaacaacaacaacaacaacaaaatcgtctaacttcctgatcttcctgatcattgattttcccataggtatgatcagcaacttgcttgggaaaggagccgtggaccagctgacacggctggtgctggtgaatgccctctacttcaacggccagtggaagactcccttccccgactccagcacccaccgccgcctcttccacaaatcagacggcagcactgtctctgtgcccatgatggctcagaccaacaagttcaactatactgagttcaccacgcccgatggccattactacgacatcctggaactgccctaccacggggacaccctcagcatgttcattgctgccccttatgaaaaagaggtgcctctctctgccctcaccaacattctgagtgcccagctcatcagccactggaaaggcaacatgaccaggctgccccgcctcctggttctgcccaagtaagccaccccgctatctccccgacctaccaacccctctctcctggctccctaaagtcaccgcccccaggttgaatttcccagatctgtgacgcttgcaggacatgcatgtgtgggaggctgatgggaaactgtggcctgggtttgattatgagtcttgcaatcatccctccccctgtttctgctggagggcaggggacagctcttcctgaccacacccccacattgactatccccagaatacccagcaaaagcccccaaaaggagagtcagagaaatgagggaggtgggggcccaatcagtccacatctacttagggtcgccccatcagcacttccatccccaaccctttcaagtcaacatccaaacaaaagaaatcacttccaaggacggagcagctcaaagcgcagcttctagctggggttccaagaaagcagatttttcgaaatccttctgcagaaggaagcaaagagattttttgaaatctttctgcagaaggagaaggctggagctggggaactccagaattatagggaagcctcccaccacgctcatcccaaatttccggatgctataatgccaggcttggggaaagaggagaatttagttggttagctggtgcgtgctctcacttgcatcctctctcttcctcttttttttttttctcctctctctctggctcataaaaatggaggtaattagttgtgccctggtgagaagcagagagtgcacaaaggccccctgcttgagtcctcttcagggttagctctcagaaacacaatctgcagaacagatttttgttccaacatccttgcaggagaatttgcccttagcttcccccaccccagccaggctgaataaaattatgctgaaactactgtcttatttgaggaaagtaattagtcataggtgggagggggtggggagattgcagaagaatgttcatgaatattaggattttcagctctaaggggggactttgtaaacagctttagaagaagaaccaggccggctgggtgtggtggctcatgcctgtaatctcagcatttggggaggccaaggcgggcggatcacttgaggtcaggagtttgagaccagcctggccaacatggtgaaaccctgtctctattaaaaatacaaaaattagccggctgtggtagcgagcgcctatgatcccagctactccggaggctgaggccagagaatcacatgaacctgggaggtggaggctgcagtgagccgagatcacgccactgcactccagcctgggggacagagcaagaatctgtttcaaaaaaaaaaaaaaagaaaaataggaaggaaggaaggaaaggaaaggaaagaagagagagagaaagaaagagagagaaagaaagaaagaaagaaagaaagaaagaaagaaagaaagaaagaaagaaagaaagaaagaaagaaaaagaaaggaaagaaagaacgaacgaaccaggcctccctctccaaccttcacctccgtccctattctggccacttgattcgggggacacctggtaggggatggggaaaggtgggagctgccagccagaggggaccccggcttgagcagcctcttgctgctatctgcaggttctccctggagactgaagtcgacctcaggaagcccctagagaacctgggaatgactgacatgttcagacagtttcaggctgacttcacgagtctttcaggtaagaagactttcctttgcattttctcaccccagtggactgcgggggcccctaagaggaaaaaggaacctctccttgagagcggcagctgatctaatcctgtatccacatctgtttcagaccaagagcctctccacgtcgcgcaggcgctgcagaaagtgaagatcgaggtgaacgagagtggcacggtggcctcctcatccacaggtgagtctggctcaggtgaggctccacgggtgtcgcctccatcgcccttcaggataactggtccccagacccggaaaggaccccgcagccctctcggcacagagcagctctgtctgtgctcagccatcacccactccccacctgtttctcagcctggaaaacgggcttgggaccatggaaccctgtttcctcgcctgatggctcctaagttccctgactgtgaaaaggcctcctaaagaaaaacccaagttgttcccacagtgggaagtaaacttaagaaacatgcttatcaggctgggcatggtggctcccacctgtaatcccagcgctttgggggaccaaggcaggtggatcacttgaggtcaggaattcgagaccagcctgggcaacatggcaaaaccctatctctactaaaaatacaaaaattaggcaggcgtggtggcatgtgcctgtagtcccagctacttgggaggctgaggcaggagaatcacttgaatccaggaggcagaggttgcagtgagccgagatcacgctgctgcactccagcctgggcaatagagcatgactctgaagaaaagaaagaaagaaagagagagagagagaaaagaaagaaagaaagaaagaaagaaagaaagaaagaaagaaagaaagaaagacaaagaaagagaaagaaagagaagaaaagaaaagaaagagcttatcaataagcccttaaaggatttagataaatgtgtgtaagggaagagctgatccattgctaccaagctcctggaggaaaccaggtctcagaggatgtccctaaacttttaaggttcatattcaggaaaacaaacaacttccagctgggcttagtggctcactcctgtaatcccagcactttgggaggccgaggcaggaggatcgcttgagcccaggaatttgagaccagcctgggcaatataatgagactgtgtctctacaaaaattagaaaaaaattagccaggcatggtggcatgcacctgtagccccagttacttgggagactgaggtgggaggatcacttgagcccatgagttcaaggctgcagtgagccatgaaggtgccactgcactcccgcctgggcgacagagggagaccctgtctctaagaaaaacggcgggggtgggggtggtgccagtgccagcatccctctgttctaagacattgtcccttctcttgcagctgtcatagtctcagcccgcatggcccccgaggagatcatcatggacagacccttcctctttgtggtccggcacaaccccacaggtgagcctggaacccatcacgttccacatcctcccacccattctttctctcaggaactagtcccgacagatgcagacatccctctatccctgagagggctctgggcagggaacccataaccctaccctgcttcctgtcccaagaggaggctaccttctatcacccacagacagtgccgggtccccgctctgtgactcaggcatctgcgactccagacagctcactcatctgcctagatctcagtccttccacccacatccagcctgatgagctgtcccactccttctgcttctcaacccccatggttcttccaccctcaggaacagtccttttcatgggccaagtgatggaaccctgaccctggggaaagacgccttcatctgggacaaaactggagatgcatcgggaaagaagaaactccgaagaaaagaattttagtgttaatgactctttctgaaggaagagaagacatttgccttttgttaaaagatggtaaaccagatctgtctccaagaccttggcctctccttggaggacctttaggtcaaactccctagtctccacctgagaccctgggagagaagtttgaagcacaactcccttaaggtctccaaaccagacggtgacgcctgcgggaccatctggggcacctgcttccacccgtctctctgcccactcgggtctgcagacctggttcccactgaggccctttgcaggacggaactacggggcttacaggagcttttgtgtgcctggtagaaactatttctgttccagtcacattgccatcactcttgtactgcctgccaccgcggaggaggctggtgacaggccaaaggccagtggaagaaacaccctttcatctcagagtccactgtggcactggccacccctccccagtacaggggtgctgcaggtggcagagtgaatgtcccccatcatgtggcccaactctcctggcctggccatctccctccccagaaacagtgtgcatgggttattttggagtgtaggtgacttgtttactcattgaagcagatttctgcttccttttatttttataggaatagaggaagaaaggtcagatgcgtgcccagctcttcaccccccaatctcttggtggggaggggtgtacctaaatatttatcatatccttgcccttgagtgcttgttagagagaaagagaactactaaggaaaataatattatttaaactcgctcctagtgtttctttgtggtctgtgtcaccgtatctcaggaagtccagccacttgactggcacacacccctccggacatccagcgtgacggagcccacactgccaccttgtggccgcctgagaccctcgcgccccccgcgccccccgcgcccctctttttccccttgatggaaattgaccatacaatttcatcctccttcaggggatcaaaaggacggagtggggggacagagactcagatgaggacagagtggtttccaatgtgttcaatagatttaggagcagaaatgcaaggggctgcatgacctaccaggacagaactttccccaattacagggtgactcacagccgcattggtgactcacttcaatgtgtcatttccggctgctgtgtgtgagcagtggacacgtgaggggggggtgggtgagagagacaggcagctcggattcaactaccttagataatatttctgaaaacctaccagccagagggtagggcacaaagatggatgtaatgcactttgggaggccaaggcgggaggattgcttgagcccaggagttcaagaccagcctgggcaacataccaagacccccgtctctttaaaaatatatatattttaaatatacttaaatatatatttctaatatctttaaatatatatatatattttaaagaccaatttatgggagaattgcacacagatgtgaaatgaatgtaatctaatagaagcctaatcagcccaccatgttctccactgaaaaatcctctttctttggggtttttctttctttcttttttgattttgcactggacggtgacgtcagccatgtacaggatccacaggggtggtgtcaaatgctattgaaattgtgttgaattgtatgctttttcacttttgataaataaacatgtaaaaatgtttcaaaaaaataataaaataaataaatacgaagaaaaaaaaaaaaaaaaaaa

SEQ ID NO: 28673 - DNA, 2629 bp, Homo Sapiens
ggaatagctcaggaacaaaggtacatcagatgtggtctttggctaggtttctgtagctaccttttgattttgcagaaaaagccaccacgtgagaatggccataagcagataagtagcagttcaactggatgtctctcttctccaaatgctacagtacaaagccctaagcatgagtggaaaatcgttgcttcagaaaagacttcaagtaagtatatgacacttgccagattgttttcagcttacctatttttaagaaggagtgttgccaatttaatacctcttaaattgactactcgaggaaaaaactcagaagcaattaaatttggaaaacgagagcagattgttccagtctgggatgtggagactggagtccaattcaggatcatatacacaaaccaaaagtaataattacatcttaaacatggaactcttgtgcttacagataacacttacttgtgcctggctgtgctggatggtatattctgtgtcatttttcttcatgggagaaacagcccacagagctcaccaacaagtactccaaaactaagtaagagtttaagctttgagatgcaacaagatgagctaatcgaaaagcccatgtctcctatgcagtacgcacgatctggtctgggaacagcagagatgaatggcaaactcatagctgcaggtggctataacagagaggaatgtcttcgaacagtcgaatgctataatccacatacagatcactggtcctttcttgctcccatgagaacaccaagagcccgatttcaaatggctgtactcatgggccagctctatgtggtaggtggatcaaatggccactcagatgacctgagttgtggagagatgtatgattcaaacatagatgactggattcctgttccagaattgagaactaaccgttgtaatgcaggagtgtgtgctctgaatggaaagttatacatcgttggtggctctgatccatatggtcaaaaaggactgaaaaattgtgatgtatttgatcctgtaacaaagttgtggacaagctgtgcccctcttaacattcggagacaccagtctgcagtctgtgagcttggtggttatttgtacataatcggaggtgcagaatcttggaattgtctgaacacagtagaacgatacaatcctgaaaataatacctggactttaattgcacccatgaatgtggctaggcgaggagctggagtggctgttcttaatggtgagtgttgggatttggagaggtgaagagtagatagtggcaagactttgttctaaaactctgagagaaaaggccaatgactatagttgtacagttaagaattcagaagcagtcatctcttttgatgcaatggagattagggtgatttgtcctttagaaatatattttctaatcaaagacttataatacttgatatataacttaattcaccagtcttttgatgggtgcactgagtgaatttccaagtcattttcttctataaaacatatccttaatgcatcatcttgaattttgagtttccccttctttacagccagaatttaaagaatctgatctgcaaaacaaaggcaaatccctagtcttttccaactgtctactccatacctaattggaaatacaacctttagactattttaacaagtttccaaagtattaaactttttaaatgtagacatagctttctttccacctccattttattgacttttaatgtctaattatataatcataatttaaaagttagcattgtttttggtaccaggctgaaccttagcaggcttatggctcaactggtgaaggcttaagtgtagacacagcctgttggcctagagcattgtcagcgtgctttacagatacatagaatgcaagctggttaagtgatggtcaaatgaaaaaataatgaatttgagaatcagtaataaaattttttctaagctacggagtatttattgctaacattttatctatttgaaaataatcataactctgtttccagaagaaatttctgtaccacaatcattttatttttttaattgagacatggtctcactgtgttgcccaggctggtctcgaacccctgggctcatgcagtcctcccacctcaggctcccatagtattgggattataggcatgagccaccgcatctggccccaaaatcattttatacagttggaaagccctaagatatttttctgctttcctataatctcttctgagtcttaattctgtacattgggctgatataaagtccagtgcacagaactattctggtttgctacttagtagctgcatctgtaggataattgtccagcttcttcctgcttttcttcttctctgaaataataatagtaactaccacagagttggtgaaaattgtacttatttagatgctgctactgcttcctctccctcccccttttaagttgcctaagttccacgtgggaatggtttttttattgatttgattcccagctcttagagagtatttgtcatattaggcatttaataaattctttttgacaaaaaaaaaaaaaaaaaaaaaaaaaaaaaaaaaaaaaaaaaaaaaaaaaaaaaaaaaaaaaaaaaaaaaaaaaaaaaaaaaaaaaaaaaaaaaaaaaaaaaaaaaa

SEQ ID NO: 28674 - DNA, 5888 bp, Homo Sapiens
acagctgtttctagggtctggaaaaactctaaggacccccaggaggatacacaccagattgggtctgggctcacaccaccctgcatccccagagcctccctggacgctgtttgcaaggtcctcaccgcctggaagtccaggagccatttttagggaacagcattcaagctcaacacgaaacgaaactcaaccgaaagcctgcagagagcagaacatggaaggagacttctcggtgtgcaggaactgtaaaagacatgtagtctctgccaacttcaccctccatgaggcttactgcctgcggttcctggtcctgtgtccggagtgtgaggagcctgtccccaaggaaaccatggaggagcactgcaagcttgagcaccagcaggtgaggaggcggcagggaggatggggtctgagagtcaaggcgagtgttcagtcctccctgcaggtgagatggggtctgagagttgggggacgagggtctagtcctccctgcaggtgagatggggtctgggagtcaaggcaagtgttcagtcctctctgcaggagagatggggtctgagagtcaaggcgagtgttcagtcctctctacaggtgagatggggtctgagagtcaaggcaagtgttcagtcctctctgcaggtgagatggggtctgggagtcaaggcgagtgttcagtcctctctgcaggacagatggggtctgagagtcaaggcgagtgttcagtcctctctgcaggtgagatggggtctgggagtcaaggcgagtgttcagtcctccctgcaggtgagatggggtctgggaggggcaagtgttccatcttccctgcaggagagatggggtctgggagtcacagagtgggtccagtcctccctgcaggagagatggggtctgagagttgggggacgagggtctagtcctccctgcaggtgagatggggtctgggagtcaaggagagtgttcagtcctccctgcaggtgagatggggtctgggaggggcaagtgttccatcttccctgcaggagagatgggatctgggagtcacagagtgggtccagtcctccctgcaggagagatggggtctgagagttgggggacgagggtccagtcctccctgcaggtgagatggggtctgggaggggcaagtgttccatcctcccttcaagaaagaaggggtctgggagtcagggaatggctccagtcctccctgcaggagagatggggtccgggagttggggtgagggctggggacttaaggcaagggtccagtcccccaggcagagactcacttgagggccatgggaagtcatttagcccctccacacaaagcccatggaaaggaaatgttaatcctgcctttttcatgctaatctgagtctacctccagttttcctatttccaatcctttccctacaggcttatggatctggcataggcaagaggttctggtttcaggaaagactggctgttctcttgagatctgtaaagagaggatgtgaaaaaggaaggtcctggaaggcagtcagatggagccctgtttcccgcctttccatgtccattcctcctggggcccctgatctgtctctctggagatactcaagctcaggcagccgttgccaactccgactggtctgacaaacacttcttgaacactgggcggggtgctagagagacactgaggtagccacatcggatccctgccctctgggagttcacagacccaaacccggaacactgtgagccaaagtggatgtggggcaggccctgggtgctgggtggacccacatctggtgtgtgtgtgtgtgtgtgtgtgtgtgtttaggttgggtgtacgatgtgtcagcagagcatgcagaagtcctcgctggagtttcataaggtaagagccccatgtgatttctcctttacagccaaatagaccaacctgagaaaaggagaggaaggggaaacgggaggccagtaatagagatttccacctgaccactctttcaccccattaggcttggagagcagtggagaactagcccaccgcataacacaggttctcctgtcccccagatactgatcagaagggttttccatggtccatgagtccatcagagctcagatcccccgaaggcagtcccgcactctggcccttctcatctgctttctcgtattggccctaattccctagggagatgggcacaagtccttgatctgcctacagtcaaagaggccagtgatcggccaggcgcagtggcacacgcctgtaatcccagcactttgggaggccaaggcgggtggatcacgaggtcaggagttcgagaccagcctgaccaacatggtgaaaccccgtctctactaaaagtacaaaaattagctgggcgtggtggcacacgcctgtggtcccagccacttgggaggctgaggcaggagaattgcttgaacccgggaggcggaggttgcagtgagccaagatcaagccactgcactccagcctgggcaacacaatgagactctgtctcaaaaaaaaaaaaaaaaaaaaagggccagtgatcatgcccttcctgctgcctcccacaggccaatgagtgccaggagcgccctgttgagtgtaagttctgcaaactggacatgcagctcagcaagctggagctccacgagtcctactgtggcagccggacagagctctgccaaggctgtggccagttcatcatgcaccgcatgctcgcccagcacagagatgtctgtcggagtgaacaggcccagctcgggaaagaaaccagtcctgatccaggaaaatgtctctccattacggttgctgctgccctgagtgcacatctgtggccataaaggaaatgatgtgggtgattcggccaagagttgcctgtgtggtcaaggatgccggcagcgcaggaaagtcaagaccaggggaaagaatttcagctcctgaaagggaaatctactgtcattattgcaaccaaatgattccagaaaataagtatttccaccatatgggtaaatgttgtccagactcagagtttaagaaacactttcctgttggaaatccagaaattcttccttcatctcttccaagtcaagctgctgaaaatcaaacttccacgatggagaaagatgttcgtccaaagacaagaagtataaacagatttcctcttcattctgaaagttcatcaaagaaagcaccaagaagcaaaaacaaaaccttggatccacttttgatgtcagagcccaagcccaggaccagctcccctagaggagataaagcagcctatgacattctgaggagatgttctcagtgtggcatcctgcttcccctgccgatcctaaatcaacatcaggagaaatgccggtggttagcttcatcaaaaggaaaacaagtgagaaatttcagctagatttggaaaaggaaaggtactacaaattcaaaagatttcacctttaacactggcattcctgcctacttgctgtggtggtcttgtgaaaggtgatgggttttattcgttgggctttaaaagaaaaggtttggcagaactaaaaacaaaactcacgtatcatctcaatagatacagaaaaggcttttgataaaattcaacttgacttcatgttaaaaaccctcaacaaaccaggcgtcgaaggaacatacctcaaaataataagagccatctatgacaaaaccacagccaacatcatactgaatgagcaaaagctggagcattactcttgagaagtagaacaaggcacttcagtcctattcaacatagtactggaagtcctcgccacagcaatcaggcaagagaaagaaataaaaggcaaccaaaaagaaaggaagtcgaagtatctctgtttgcagacgatatgattctatatctagaaaaccccatgatcttggcccaaaagctcctagatctgataaacaacttcagctaactttcaggagacaaaatcaatatacaaaatatggtagcatttttatacaccaacgacatccaagctgagagccaaatcaagaatgcaatcctattcacaattgccacaaaaagaataaaatacctaggaatacagctaaccagggagatgaaagatctctacaacaaaaattacaaaacactgctgaaagaaaccagagatgacacaaatggaaaaacattccatacttatggataggaagaatcaatattgttaaaatggccatactacccaaagcaatttatagattcaatgctattcctatcaaactaccaataacattcttcacagaatcagaaaaaaaaagcattaaaatttatttgaaaccaaaaaagaacccaaaaagccaaagcaatcctaagcaaaaagaacaaagctggaggcatcgcattacccaacttcaaactatactacagggctacagtaaccaaaactgcatgatactggtacaaaagcatggtgctggtacaaaagcagacacatagatcaatggaacagaatagagggcccagaaataaagctacacacctacaaccatctaatctttgacaaagttgacaaaaatacgcaatggggaaagaattccccattcagtaagtggtactgggataactagctagccatatgcagaggattgaaactgaaccacttccttacaccatatgcaaaaatcaactcaagatggattaaagacttaaatgtaaaaccccaaactataaaaactctggaagataacctaggcaataccattctggacataggaacggaaaaagatttcatgacaaagatcccaaaaataattgtaacgaaagcaaaaattgacaaatgggacatgattaaatagaattaccatttgactcagcaatcccattattggttatatacccaaaggaatctaaatcattctgtcataaagacatatatacacaaatgttcacggcagcactatacacaatcgcaaagtcagggaatcaaactaaatgtccatcagtggtagaaaggataaagaaaatgtggtggcagggggtggtggctcatgtctgtaatcccagcactttgggaggctgaggcgggtggttcacctgaggtcaggagtttgagaccagcctggccaacatggcgaaactccgtctccgctaaaaatacgaaaattagccaggcgtggtggcgagcacctgtcatcccagctacttgggaggcctaggcgtgagaatcgcttgaacctggaaggtggtggttgcagtgagccgagatcctgccactgcactccagcctgggcaaccaagcgagactctgccttaaaaaaaaaaaaaagaaaatgtggcacatatacaccatggaatactatgcagccataaaaaagaatgggatcatgtcctgtgcagcaacgtggatggagctggaagccattatcctaaatgaactcactcagaaacagaaaaccaaataccacatgttctcacttataagtagaagctaaacattgagtacacatggatacaaagaagggaaccgcagacactggggcctacctgaggtcggagcatggaaggagggtgaggatcaaaaaactacctatctggtactatgctttttatctggatgatgaaataatctgtacaacaaaccctggtgacatgcaatttacctatatagcaagcctacacatgtgcccctgaacctaaaaaaaaagttaaaagaaaaacgtttggattattttccctctttcgaacaaagacattggtttgcccaaggactacaaataaaccaacgggaaaaaagaaaggttccagttttgtctgaaaattctgattaagcctctgggccctacagcctggagaacctggagaatcctacacccacagaacccggctttgtccccaaagaataaaaacacctctccaaaaaaaaaaaaaaaaaaa

SEQ ID NO: 28675 - DNA, 5250 bp, Homo Sapiens
gtattttccagtgagagaccgcggagtgttgggtcgtgtagaagtgactgaacccagaaggtggagacgagacgttgtcccgactgcacagaggctgctctgcagctccttaaaggcgctaggcgtgacccgcaccaaggccgggatcgggaccaccgtgcccgggtacctgcactgctcgccccctcctttcgaccccgctttccccacccagtcggatggcggcggccgcgctgaggcccccggctcagggcactgtgacctttgaagatgtggctgtgaacttttcccaggaggaatggagtctccttagtgaggctcagagatgcctttatcatgacgtgatgctggagaacctgacacttatatcttctctaggttgttggtatggagcaaaagacgagacaccttctaagcagaccctttctatacaacaggagtccccactcaggacacattggacaggtgtatgtaccaagaaggtccacctctggggaatgtgtggccctctcctgggagatatcttacaccagggaacacaacacaatcagaaattgaatgggtttggggcatatgaaaaaaaattggatgacgatgcaaaccatcatcaagaccagaagcagcacattggagagaaatcgtacagaagcaatgccaagggaacatcttttgtaaagaactgtaaattccatatgtcacatgagccatttatctttcatgaggttgggaaagactttttgtccagcttgagattactccaacaagtggacattcacacttcagggaagtcaaactttgaaactaagcatgggataccccttcagggtggaaaaactcattacatctgtggagagtccacaataccgtttagcaacaaacactcacttgtccttcaccagagacttctccctagagaaggaccttatgtatgcagtgattctgggaaattcactagcaaaagtaatagttttaataatcatcagggagttcgcactggaaaaagaccttatcagtgtggacaatgtgatgaatcattttggtataaggcccacctcactgaacaccagagagttcacactggagaaagaccttatgagtgtggagaatgtgataaatcttttagtcataagcacagtcttgttgaccatcagcgagttcacactggagaaagaccttatgaatgtgacgaatgtgggaaatcttttagccataagcgcagccttgttcaccaccagcgagttcacactggagaaagaccttatcagtgtggagaatgtgggaaatcgtttaatcacaagtgcaacctcattcagcatcagcgagttcacactggagaaagaccttttgagtgtacggcatgtgggaagttatttaggagcaactcccacctaaaggaacaccagagagttcacactggagaaagaccctatgagtgtaaagaatgtaggaaatcatttaggtacaagtcacacctcactgaacaccagagagttcacactggagaaaggccatatgagtgtagagaatgtgggaaatgttttcatcaaaagggcagtctcattcaacatcagcagatccactctggagaaaggccacatgagcgtggagaatgtgggaaatgttttcatcaaaagggcagtctcattcgacatcagcagattcactctggagaaaggccacatgagtgtggagaatgtggaaagtgttttcgtcaaaagggaaacctcattaaacatcaacgagttcacacgggagaaagacatcatgaatgttgaaaatttggcagatctgttggtaaaaagagcaccctcattcaacattcgtgagatcacactggaaagcacttatgagtatggagaatgtgcaaaatcatctagccaaaaggttggcctcattcaacaatagcaagattacactggggaaaggctttctgagtgtagagaatgtatgaaatcctgtacatagaagttttgcctcaccaaataccagaagggccacactggagaaagaccctatagttatggggaatttgggaaattacctaacaagaagtcccacctcactgaacactactgagttcacagttgagaaaggccatatgactgtaaggaatttgtaaaattatttagccagaagagctgcattactattcatcagataatttacaatggagaaaggccacataataatttctcacataataaatgtgagaaatcatttccgtacagctctgcgctccatgttcgtaagagttcacactggacaaagccttatgagagcagcgagtagaaaatcctttgtgggaaaactctggtttcattaaacacaggagagttcatgctagagaaaggcctcaacagtgtagcaaatatggaaagacattcactagaagctctgccctgcaagttcacactagagaaagcccttctcagtgaagtaaatttggaaaattgattagtcaaacctctatgctccttcaaaatcagagttcacactggatcaaggctttatggtgtgacaaatatggcacattctttatctaaatgtctaacatattatgcacagacaagctcctgctgtggaagtgccttttgagtgcagagcatttgcgagggcttcactcttctttcactggataccagaatgttgacaggagaaaaataacatagatgtgtgggaatattacttcttgtccagtgtaactgtgggagagagcccttatgaggacaccatcaacctatattgaatgtcatatgtccagtagctgcataaattccaggtatatgggagctgtattgcatttcttatcctgcgtatgtccttgccagatttatttcattcttaggtctctggcaaaagccatttcatctctaccacttggcaggtacctacagtgcatcactcatgcactccatcatattccagaaaaaaagttcaagttgtctcccattcagcagtggtatttttgagtagcctctgcactcgttcctttctcatttctctatgaagagttaggccatggacctgactcagttctggcctagagcagaagtgtccaatcttttggctttcctggtccacattggaagaagaattgtcttgtgccgcatatgaaatacattaacactaatgatagctgatgaacttttttaaaaatcacacaaaaaccctcataatgttttaagaaagtttacaaatttgtgttgggctgcattcaaagctgtcctgagatacatgcggcccacaagctgcgggttggaccagcttggcctagagaatttttctgattacttgacaagatgggctgtctttcctaggaatctcatgattgtcatgattcttaaaatggaattttccagcctctaactcaccaacccaagtacaagctgcctctcattgttctggtttctgctatgatgaagtccttatttaagcttccttcaatcttgggaattgtattgactgtattgtgtgaattgtatactcactgcattgtgtggcttagatacaacatggttctggtaccatgaaggattctggtaccatgaaagtttgttggggttaccaaactgtgtgactcttagggaacagtatgaaggcagaatatagctctgcatttgtggcctagtttggatggctgcctaaggcctccaaataaagacttcagggctttgtgatctttatttttagatgaaatagtgcaataatatgtgttttcataaatcaacctgagtaggggacagttttagtgacacactttggtgcttctgagaacagcacaaaattattctcttgtttataatggatattgcattctgctcagtactggtgagggaaatctgttctcaagtcctacagtgcattcatgtgtcctgaagtccagaattctgtaggatagtgtcctacgttataagcctggagaaagaaatcataattctttaatttttatttttttagggaaatgatgtcactctgaaactcaggctggaatacactggcatggtcatacctcactgcggcctcaaactcctgggctcaagtgatcctcctgcctcagcctcccgagtacctgagattagcccaggtaatttaagaattttttatagagatagggttttgctattttaccctgactgatgttcaactcctggcctcaagtaatcctctagcatacgcccttgaaagcactgggattacaggtgtgagccaccatgcccagcccaaaaataatttttgtagaattagcatttctaggtagtgaagcagactgcaacagaatagttgggatatactttttttaaaaaggcatccacaatgattcagtcactatgtctgtgatggacaagcaggtacagaaattttcaggacctccataattatgaatctagtgtagcttaggtcattgtcagactaaatctaaaggttttgtggatttctgtagcctatctgggctgcataccaaaaagccatccctgaattagtaggaggaagaggatagggagaaaggaaatctcttagtccagtgatgtggcctttgcaaccagccagcattccaatttaatcaggtggaaatgatcttcctggctcataagtatttggtatcacacaggctaattgccccccttagggcgtgatgagagttaggagagtcaatgtaaaatcacataacctatttgtcaaaaataatgttaaatccagatagttctttcaaattaaatttttaaagctgtaataagactgggcatggtgactcatgcctgttatcccaacactttgggagtccagggtgggagtattgcttgaggtaagaagtttgagactagcctgggtcccatagtaagaccctgtctcttaaaaaataaatactatctttctctctggcctctccatcctccagacaatcactgaattacaatatttgcttaacagtagattaatgtcaattttctggaattttatatgactgatataacatgtttcctcttttcatacctgagtactctcctgagccctatttatttagatgttcttcttttttctttattattatttttatttcacatagcagggatgcatattttgacattcatcaatcatgatatatgagtagttcattctttttatcttagaatatgacatgctatggaaatcactgtatacgaattcatctgcttatgggtatgttattgcttcttatttttgtctgttaggaataaaactgcttgttaagcgaaaaaaaaaaaaaaaaaa

SEQ ID NO: 28676 - DNA, 984 bp, Homo Sapiens
atggcggcagtggtggaggtggaggttggaggtggtgctgctggggaacgggagctggatgaggttgatatgtcagatctctctccagaagagcaatggagggtcgagcacgcacgcatgcatgccaagcaccgtggccatgaagctatgcatgctgaaatggtcctcatcctcatcgcaaccttggtggtggcccagctgctcctggtgcagtggaagcagaggcacccacgctcctacaatatggtgaccctctttcagatgtgggttgttcccctctatttcacagtgaagctgcactggtggaggttcctagtgatctggatcttgttctctgctgtcacagcctttgttaccttccgagccacccgaaaacctctagtacagacaaccccaaggttggtttataagtggttcctgctaatctataaaatcagctatgccactggcattgttggctacatggctgtcatgtttaccctctttggtcttaacttattattcaagatcaaaccagaagatgccatggactttggcatctcccttctcttctatggcctctactatggagttctggaacgggactttgcagaaatgtgtgcagactacatggcatctaccatagggttctacagcgagtcgggcatgcctaccaaacatctttcagacagtgtgtgtgctgtgtgtgggcagcagatctttgtggacgtcagtgaagaggggatcattgagaacacgtataggctgtcctgcaatcatgtcttccacgagttctgcatccgtggctggtgcatcgtgggaaagaagcaaacgtgtccctactgcaaagagaaggtagacctcaagaggatgttcagcaatccctgggagaggcctcacgtcatgtatgggcaactgctggactggcttcgatacttggtagcctggcagcctgtcatcattggtgtagtccaaggcatcaactacatcctgggcctggattaa

SEQ ID NO: 28677 - DNA, 965 bp, Homo Sapiens
atgaaccggtttggtacccggttggtgggagccacggcgacttcttcgccgccgccgaaggcccgcagcaatgaaaacctcgacaaaatagatatgtctttggatgatatcatcaagttgaatcgaaaggaagggaagaagcagaattttccaagactaaatagaagactcctccagcaaagtggtgcccagcaattcaggatgagagtgcgatggggaatccaacagaattctggttttggtaagactagtctgaatcatagaggaagagtaatgcctggaaagagacgtcctaatggagttatcactggccttgcagctaggaaaacgactggaattcgaaaaggaattagtcctatgaatcgtccacctctaagtgacaagaatatagaacaatattttccagtgttaaaaaggaaggcaaaccttctgagacaaaatgaagggcagaggaaaccagtagcagttctcaagagacctagccagctaagcagaaaaaataacattccagctaattttaccaggagtggaaataaattaaatcatcagaaagatactcgtcaggcaacttttcttttcagaagaggcctgaaggtgcaggcccagttgaatacagaacaactgctagacgatgtagtagcaaagagaactcgtcaatggcggacttccaccacaaatggagggattttgactgtatctattgacaatcctggagcagtgcaatgcccagtaactcagaaaccacgattaactcgtactgctgtaccttcatttttaacaaagcgggagcaaagtgacgtcaagaaagttcctaaaggtgttcccctgcagtttgacataaacagtgtcggaaaacagacagggatgacgttgaatgagcggtttgggatcctgaaggaacaaagagccactctcacatacaacaaagggggaagccgctttgtcaccgtgggataggtcccatg

SEQ ID NO: 28678 - DNA, 2485 bp, Homo Sapiens
gcagagaagacagaaacgacatgagcacagcaggaaaagtaatcaaatgcaaagcagctgtgctatgggaggtaaagaaacccttttccattgaggatgtggaggttgcacctcctaaggcttatgaagttcgcattaagatggtggctgtaggaatctgtcgcacagatgaccacgtggttagtggcaacctggtgaccccccttcctgtgattttaggccatgaggcagccggcatcgtggagagtgttggagaaggggtgactacagtcaaaccaggtgataaagtcatcccgctctttactcctcagtgtggaaaatgcagagtttgtaaaaacccggagagcaactactgcttgaaaaatgatctaggcaatcctcgggggaccctgcaggatggcaccaggaggttcacctgcagggggaagcccattcaccacttccttggcaccagcaccttctcccagtacacggtggtggatgagaatgcagtggccaaaattgatgcagcctcgcccctggagaaagtctgcctcattggctgtggattctcgactggttatgggtctgcagttaacgttgccaaggtcaccccaggctctacctgtgctgtgtttggcctgggaggggtcggcctatctgctgttatgggctgtaaagcagctggagcagccagaatcattgcggtggacatcaacaaggacaaatttgcaaaggccaaagagttgggtgccactgaatgcatcaaccctcaagactacaagaaacccatccaggaagtgctaaaggaaatgactgatggaggtgtggatttttcgtttgaagtcatcggtcggcttgacaccatgatggcttccctgttatgttgtcatgaggcatgtggcacaagcgtcatcgtaggggtacctcctgcttcccagaacctctcaataaaccctatgctgctactgactggacgcacctggaagggggctgtttatggtggctttaagagtaaagaaggtatcccaaaacttgtggctgattttatggctaagaagttttcactggatgcgttaataacccatgttttaccttttgaaaaaataaatgaaggatttgacctgcttcactctgggaaaagtatccgtaccgtcctgacgttttgaggcaatagagatgccttcccctgtagcagtcttcagcctcctctaccctacaagatctggagcaacagctaggaaatatcattaattcagctcttcagagatgttatcaataaattacacatgggggctttccaaagaaatggaaattgatgggaaattatttttcaggaaaatttaaaattcaagtgagaagtaaataaagtgttgaacatcagctggggaattgaagccaacaaaccttccttcttaaccattctactgtgtcacctttgccattgaggaaaaatattcctgtgacttcttgcatttttggtatcttcataatctttagtcatcgaatcccagtggaggggacccttttacttgccctgaacatacacatgctgggccattgtgattgaagtcttctaactctgtctcagttttcactgtcgacattttcctttttctaataaaaatgtaccaaatccctggggtaaaagctagggtaaggtaaaggatagactcacatttacaagtagtgaaggtccaagagttctaaatacaggaaatttcttaggaactcaaataaaatgccccacattttactacagtaaatggcagtgtttttatgacttttatactatttctttatggtcgatatacaattgattttttaaaataatagcagatttcttgcttcatatgacaaagcctcaattactaattgtaaaaactgaactattcccagaatcatgttcaaaaaatctgtaatttttgctgatgaaagtgcttcattgactaaacagtattagtttgtggctataaatgattatttagatgatgactgaaaatgtgtataaagtaattaaaagtaatatggtggctttaagtgtagagatgggatggcaaatgctgtgaatgcagaatgtaaaattggtaactaagaaatggcacaaacaccttaagcaatatattttcctagtagatatatatatacacatacatatatacacatatacaaatgtatatttttgcaaaattgttttcaatctagaacttttctattaactaccatgtcttaaaatcaagtctataatcctagcattagtttaatattttgaatatgtaaagacctgtgttaatgctttgttaatgcttttcccactctcatttgttaatgctttcccactctcaggggaaggatttgcattttgagctttatctctaaatgtgacatgcaaagattattcctggtaaaggaggtagctgtctccaaaaatgctattgttgcaatatctacattctatttcatattatgaaagaccttagacataaagtaaaatagtttatcattt

SEQ ID NO: 28679 - DNA, 8588 bp, Homo Sapiens
cgcggcccgagcgcctcttttcgggattaaaagcgccgccagctcccgccgccgccgccgtcgccagcagcgccgctgcagccgccgccgccggagaagcaaccgctgggcggtgagatccccctagacatgcggctcgggggcgggcagctggtgtcagaggagctgatgaacctgggcgagagcttcatccagaccaacgacccgtcgctgaagctcttccagtgcgccgtctgcaacaagttcacgacggacaacctggacatgctgggcctgcacatgaacgtggagcgcagcctgtcggaggacgagtggaaggcggtgatgggggactcataccagtgcaagctctgccgctacaacacccagctcaaggccaacttccagctgcactgcaagacagacaagcacgtgcagaagtaccagctggtggcccacatcaaggagggcggcaaggccaacgagtggaggctcaagtgtgtggccatcggcaaccccgtgcacctcaagtgcaacgcctgtgactactacaccaacagcctggagaagctgcggctgcacacggtcaactccaggcacgaggccagcctgaagttgtacaagcacctgcagcagcatgagagtggtgtagaaggtgagagctgctactaccactgcgttctgtgcaactactccaccaaggccaagctcaacctcatccagcatgtgcgctccatgaagcaccagcgaagcgagagcctgcgaaagctgcagcggctgcagaagggccttccagaggaggacgaggacctggggcagatcttcaccatccgcaggtgcccctccacggacccagaagaagccattgaagatgttgaaggacccagtgaaacagctgctgatccagaggagcttgctaaggaccaagagggcggagcatcgtccagccaagcagagaaggagctgacagattctcctgcaacctccaaacgcatctccttcccaggtagctcagagtctcccctctcttcgaagcgaccaaaaacagctgaggagatcaaaccggagcagatgtaccagtgtccctactgcaagtacagtaatgccgatgtcaaccggctccgggtgcatgccatgacgcagcactcggtgcaacccatgcttcgctgccccctgtgccaggacatgctcaacaacaagatccacctccagctgcacctcacccacctccacagcgtggcacctgactgcgtggagaagctcattatgacggtgaccacccctgagatggtgatgccaagcagcatgttcctcccagcagctgttccagatcgagatgggaattccaatttggaagaggcaggaaagcagcctgaaacctcagaggatctgggaaagaacatcttgccatccgcaagcacagagcaaagcggagatttgaaaccatcccctgctgacccaggctctgtgagagaagactcaggcttcatctgctggaagaaggggtgcaaccaggttttcaaaacttctgctgcccttcagacgcattttaatgaagtgcatgccaagaggcctcagctgccggtgtcagatcgccatgtgtacaagtaccgctgtaatcagtgtagcctggccttcaagaccattgaaaagttgcagctccattctcagtaccatgtgatcagagctgccaccatgtgctgtctttgtcagcgcagtttccgaactttccaggctctgaagaagcaccttgagacaagccacctggagctgagtgaggctgacatccaacagctttatggtggcctgctggccaatggggacctcctggcaatgggagaccccactctggctgaggaccataccataattgttgaggaagacaaggaggaagagagtgacttggaagataaacagagcccaacgggcagtgactctgggtcagtacaagaagactcgggctcagagccaaagagagctctgcctttcagaaaaggtcccaattttactatggaaaagttcctagacccttctcgcccttacaagtgtaccgtctgcaaggaatctttcactcaaaagaatatcctgctagtacactacaattctgtctcccacctgcataagttaaagagagcccttcaagaatcagcaaccggtcagccagaacccaccagcagcccagacaacaaaccttttaagtgtaacacttgtaatgtggcctacagccagagttccactctggagatccatatgaggtctgtgttacatcaaaccaaggcccgggcagccaagctggaggctgcaagtggcagcagcaatgggactgggaacagcagcagtatttccttgagctcctccacgccaagtcctgtgagcaccagtggcagtaacacctttaccacctccaatccaagcagtgctggcattgctccaagctctaacttactaagccaagtgcccactgagagtgtagggatgccacccctggggaatcctattggtgccaacattgcttccccttcagagcccaaagaggccaatcggaagaaactggcagatatgattgcatccaggcagcagcaacaacagcagcagcaacagcaacaacaacaacaacaacaacaacaacaagcacaaacgctggcccaggcccaggctcaagttcaagctcacctgcagcaggagctgcagcaacaggctgccctgatccagtctcagctgtttaaccccaccctccttcctcacttccccatgacaactgagaccctgctgcaactacagcagcagcagcacctcctcttccctttctacatccccagtgctgagttccagcttaaccccgaggtgagcttgccagtgaccagtggggcactgacactgactgggacaggcccaggcctgctggaagatctgaaggctcaggttcaggtcccacagcagagccatcagcagatcttgccgcagcagcagcagaaccaactctctatagcccagagtcactctgccctccttcagccaagccagcaccccgaaaagaagaacaaattggtcatcaaagaaaaggaaaaagaaagccagagagagagggacagcgccgaggggggagagggcaacaccggtccgaaggaaacactgccagatgccttgaaggccaaagagaagaaagagttggcaccagggggtggttctgagccttccatgctccctccacgcattgcttcagatgccagagggaacgccaccaaggccctgctggagaactttggctttgagttggtcatccagtataatgagaacaagcagaaggtgcagaaaaagaatgggaagactgaccagggagagaacctggaaaagctcgagtgtgactcctgcggcaagttgttttccaacatcttgattttaaagagtcatcaagagcacgttcatcagaattactttcctttcaaacagctcgagaggtttgccaaacagtacagagaccactacgataaactgtacccactgaggccccagaccccagagccaccaccacctccccctccaccccctccacccccacttccggcagcgccgcctcagccggcgtccacaccagccatccccgcatcagccccacccatcacctcacctacaattgcaccggcccagccatcagtgccgctcacccagctctccatgccgatggagctgcccatcttctcgccgctgatgatgcagacgatgccgctgcagaccttgccggctcagctacccccgcagctgggacctgtggagcctctgcctgcggacctggcccaactctaccagcatcagctcaatccaaccctgctccagcagcagaacaagaggcctcgcaccaggatcacagatgatcagctccgagtcttgcggcaatattttgacattaacaactcccccagtgaagagcaaataaaagagatggcagacaagtccgggttgccccagaaagtgatcaagcactggttcaggaacactctcttcaaagagaggcagcgtaacaaggactccccttacaacttcagtaatcctcctatcaccagcctggaggagctcaagattgactcccggcccccttcgccggaacctccaaagcaggagtactggggaagcaagaggtcttcaagaacaaggtttacggactaccagctgagggtcttacaggacttcttcgatgccaatgcttacccaaaggatgatgaatttgagcaactctctaatttactgaaccttccaacccgagtgatagtggtgtggtttcagaatgcccgacagaaggccaggaagaattatgagaatcagggagagggcaaagatggagagcggcgtgagcttacaaatgatagatacattcgaacaagcaacttgaactaccagtgcaaaaaatgtagcctggtgtttcagcgcatctttgatctcatcaagcaccagaagaagctgtgttacaaggatgaggatgaggaggggcaggacgacagccaaaatgaggattccatggatgccatggaaatcctgacgcctaccagctcatcctgcagtaccccgatgccctcacaggcttacagcgccccagcaccatcagccaataatacagcttcctccgctttcttgcagcttacagcggaggctgaggaactggccaccttcaattcaaaaacagaggcaggcgatgagaaaccaaagctggcggaagctcccagtgcacagccaaaccaaacccaagaaaagcaaggacaaccaaagccagagctgcagcagcaagagcagcccgagcagaagaccaacactccccagcagaagctcccccagctggtgtccctgccttcgttgccacagcctcctccacaagcgccccctccacagtgccccttaccccagtcgagccccagtccttcccagctctcccacctgcccctcaagcccctccacacatcaactcctcaacagctcgcaaacctacctcctcagctaatcccctaccagtgtgaccagtgtaagttggcatttccgtcatttgagcactggcaggagcatcagcagctccacttcctgagcgcgcagaaccagttcatccacccccagtttttggacaggtccctggatatgcctttcatgctctttgatcccagtaacccactcctggccagccagctgctctctggggccatacctcagattccagcaagctcagccacttctccttcaactccaacctccacaatgaacactctcaagaggaagctggaggaaaaggccagtgcaagccctggcgaaaacgacagtgggacaggaggagaagagcctcagagagacaagcgtttgagaacaaccatcacaccggaacaactagaaattctctaccagaagtatctactggattccaatccgactcgaaagatgttggatcacattgcacacgaggtgggcttgaagaaacgtgtggtacaagtctggtttcagaacacccgagctcgggaaaggaaaggacagttccgggctgtaggcccagcgcaggcccacaggagatgccctttttgcagagcgctcttcaaagccaagactgctcttgaggctcatatccggtcccgtcactggcatgaagccaagagagctggctacaacctaactctgtctgcgatgctcttagactgtgatgggggactccagatgaaaggagatatttttgacggaactagcttttcccacctacccccaagcagtagtgatggtcagggtgtccccctctcacctgtgagtaaaaccatggaattgtcacccagaactcttctaagcccttcctccattaaggtggaagggattgaagactttgaaagcccctccatgtcctcagttaatctaaactttgaccaaactaagctggacaacgatgactgttcctctgtcaacacagcaatcacagataccacaactggagacgagggcaacgcagataacgacagtgcaacgggaatagcaactgaaaccaaatcctcttctgcacccaacgaagggttgaccaaagcggccatgatggcaatgtctgagtatgaagatcggttgtcatctggtctggtcagcccggccccgagcttttatagcaaggaatatgacaatgaaggtacagtggactacagtgaaacctcaagccttgcagatccctgctccccgagtcctggtgcgagtggatctgcaggcaaatctggtgacagcggggatcggcctgggcagaaacgttttcgcactcaaatgaccaatctgcagctgaaggtcctcaagtcatgctttaatgactacaggacacccactatgctagaatgtgaggtcctgggcaatgacattggactgccaaagagagtcgttcaggtctggttccagaatgcccgggcaaaagaaaagaagtccaagttaagcatggccaagcattttggtataaaccaaacgagttatgagggacccaaaacagagtgcactttgtgtggcatcaagtacagcgctcggctgtctgtacgtgaccatatcttttcccaacagcatatctccaaagttaaagacaccattggaagccagctggacaaggagaaagaatactttgacccagccaccgtacgtcagttgatggctcaacaagagttggaccggattaaaaaggccaacgaggtccttggactggcagctcagcagcaagggatgtttgacaacacccctcttcaggcccttaaccttcctacagcatatccagcgctccagggcattcctcctgtgttgctcccgggcctcaacagcccctccttgccaggctttactccatccaacacagctttaacgtctcctaagccgaacttgatgggtctgcccagcacaactgttccttcccctggcctccccacttctggattaccaaataaaccgtcctcagcgtcgctgagctccccaaccccagcacaagccacgatggcgatgggccctcagcaacccccccagcagcagcagcagcagcagcaaccacaggtgcagcagcctcccccgccgccagcagcccagccgccacccacaccacagctcccactgcaacagcagcagcaacgcaaggacaaagacagtgagaaagtaaaggagaaggaaaaggcacacaaagggaaaggggaacccctgcctgtccccaagaaggagaaaggagaggcccccacggcaactgcagccacgatctcagccccgctgcccaccatggagtatgcggtagaccctgcacagctgcaggccctgcaggccgcgttgacttcggaccccacagcattgctcacaagccagttccttccttactttgtaccaggcttttctccttattatgctccccagatccctggcgccctgcagagcgggtacctgcagcctatgtatggcatggaaggcctgttcccctacagccctgcactgtcgcaggccctgatggggctgtccccaggctccctactgcagcagtaccagcaataccagcagagtctgcaggaggcaattcagcagcagcagcagcaaaaagtgcagcagcagcagcccaaagcaagccaaaccccagtcccccccggggctccttccccagacaaagaccctgccaaagaatcccccaaaccagaagaacagaaaaacaccccccgtgaggtgtcccccctcctgccgaaactccctgaagagccagaagcagaaagcaaaagtgcggactccctctacgaccccttcattgttccaaaggtgcagtacaagttggtctgccgcaagtgccaggcgggcttcagcgacgaggaggcagcgaggagccacctgaagtccctctgcttcttcggccagtctgtggtgaacctgcaagagatggtgcttcacgtccccaccggcggcggcggcggtggcagtggcggcggcggcggcggtggcggcggcggcggcggcggcggcggcggctcgtaccactgcctggcgtgcgagagcgcgctctgtggggaggaagctctgagtcaacatctcgagtcggccttgcacaaacacagaacaatcacgagagcagcaagaaacgccaaagagcaccctagtttattacctcactctgcctgcttccccgatcctagcaccgcatctacctcgcagtctgccgctcactcaaacgacagcccccctcccccgtcggccgccgccccctcctccgcttccccccacgcctccaggaagtcttggccgcaagtggtctcccgggcttcggcagcgaagcccccttcttttcctcctctctcctcatcttcaacggttacctcaagttcatgcagcacctcaggggttcagccctcgatgccaacagacgactattcggaggagtctgacacggatctcagccaaaagtccgacggaccggcgagcccggtggagggtcccaaagaccccagctgccccaaggacagtggtctgaccagtgtaggaacggacaccttcagattgtaagctttgaagatgaacaatacaaacaaatgaatttaaatacaaaaattaataacaaaccaatttcaaaaatagactaactgcaattccaaagcttctaaccaaaaaac

SEQ ID NO: 28680 - DNA, 2408 bp, Homo Sapiens
ccgcgcctcctcggccgcctgtcgggcatgaaaaccaaattctgcaccgggggcgaggcggagccctcgccgctcgggctgctgctgagctgcggtagcggcagcgcggccccggcgcccggcgtggggcagcagcgcgacgccgccagcgacctcgagtccaagcagctggcgccaacagccgcgctcgcgctgccccctccgccgccgctgccgctgccgctgccgctgccccagcccccgccgccgcagccgcccgcagacgagcagccggagccccgggcgcggcgcagggcctatctgtggtgcaaggagttcctgcccggcgcctggcggggcctccgcgaggacgagttccacatcagtgtcatcagaggcggccttagcaacatgctgttccagtgctccctacctgacaccacagccacccttggtgatgagcctcggaaagtgctcctgcggctgtatggagcgattttgcagatgaggtcctgtaataaagagggatccgaacaagctcagaaagaaaatgaatttcaaggggctgaggccatggttctggagagcgttatgtttgccattctcgcagagaggtcacttgggccaaaactctatggcatctttccccaaggccgactggagcagttcatcccgagccggcgattagatactgaagaattaagtttgccagatatttctgcagaaatcgccgagaaaatggctacatttcatggtatgaaaatgccattcaataaggaaccaaaatggctttttggcacaatggaaaagtatctaaaggaagtgctgagaattaaatttactgaggaatccagaattaaaaagctccacaaattgctcagttacaatctgcccttggaactggaaaacctgagatcattgcttgaatctactccatctccagttgtattttgtcataatgactgtcaagaaggtaatatcttgttgctggaaggccgagagaattctgaaaaacagaaactgatgctcattgatttcgaatacagcagttacaattacaggggattcgacattggaaatcacttctgtgagtggatgtatgattatagctatgaaaaatacccttttttcagagcaaacatccggaagtatcccaccaagaaacaacagctccattttatttccagttacttgcctgcattccaaaatgactttgaaaacctcagtactgaagaaaaatccattataaaagaagaaatgttgcttgaagttaataggtttgcccttgcatctcatttcctctggggactgtggtccattgtacaagccaagatttcatctattgaatttgggtacatggactacgcccaagcaaggtttgatgcctatttccaccagaagaggaagcttggggtgtgactgtggggaggactccatccacctcatcactggactgcatggggaggcagcagagcgcggtcccctctgtgcttcgactactgctcctgtggcaggaggctttgggtggctcactactgaacacatgtgtatgatactaaagacggtattaaaatggagcgacgtttatttcatctcttgtttacgatttcactaggactcagaaacgagatcgggaagacgaaatatagtgcaatagtgcaacatctctgaatccttttaatctagagaaggcatttcatatttgggggctaaggtttccagtcagatgaggcaaacagcaagagtaagcagtgttacttgcaggtactttggttaatgttgactttaaattttcatgaatgtgctggtgaacactgtgaccaggcttttgtagatggcgactgtgttatagacggtgctcactcccaagggacagcaagtgagcagagatgtactgcaaagtcgccagtcactgcgtgcaaggtggcctctgcctggggccgtccagaagctgctcctttaccctcttggtcccatggctgaagcggagcagctggattgctctggagcagccaaggccgccactgtggagacagagctctcccctcctgctgggcgtgtgtgacactgtagagtttcactgtactcgatgtgacttctcccctgcccttcctcctgatggagtgtgcagacagccatgcgtggccacgggggcagtgtgaggacctccctgtctcccgctcccctcccagggagcagctgcttgacctagctctttgggcctctcctgccctctgctctgcctggagtgtcggatcctgtgagtaggctgggcctcccctgggcagggttctccaaggccggtttcccggcccttaccaaacctgatgcccctgacatcatcattcttgtgggagacagcagcctgtatgtggtgtggggcgtggatcgagtgtagctgtgaaatccatatatatgaaatgtccaat

SEQ ID NO: 28681 - DNA, 4404 bp, Homo Sapiens
cgaattccgtctcttaggagtgaggtacctggagttcggggaccccaacctgtgacaatgacagcagacaaattggttttctttgtgaatggcagaaaggtggtggagaaaaatgcagatccagagacaacccttttggcctacctgagaagaaagttggggctgagtggaaccaagctcggctgtggagaggggggctgcggggcttgcacagtgatgctctccaagtatgatcgtctgcagaacaagatcgtccacttttctgccaatgcctgcctggcccccatctgctccttgcaccatgttgcagtgacaactgtggaaggaataggaagcaccaagacgaggctgcatcctgtgcaggagagaattgccaaaagccacggctcccagtgcgggttctgcacccctggcatcgtcatgagtatgtacacactgctccggaatcagcccgagcccaccatggaggagattgagaatgccttccaaggaaatctgtgccgctgcacaggctacagacccatcctccagggcttccggacctttgccagggatggtggatgctgtggaggagatgggaataatccaaattgctgcatgaaccagaagaaagaccactcagtcagcctctcgccatctttattcaaaccagaggagttcacgcccctggatccaacccaggagcccatttttcccccagagttgctgaggctgaaagacactcctcggaagcagctgcgatttgaaggggagcgtgtgacgtggatacaggcctcaaccctcaaggagctgctggacctcaaggctcagcaccctgacgccaagctggtcgtggggaacacggagattggcattgagatgaagttcaagaatatgctgtttcctatgattgtctgcccagcctggatccctgagctgaattcggtagaacatggacccgacggtatctcctttggagctgcttgccccctgagcattgtggaaaaaaccctggtggatgctgttgctaagcttcctgcccaaaagacagaggtgttcagaggggtcctggagcagctgcgctggtttgctgggaagcaagtcaagtctgtggcgtccgttggagggaacatcatcactgccagccccatctccgacctcaaccccgtgttcatggccagtggggccaagctgacacttgtgtccagaggcaccaggagaactgtccagatggaccacaccttcttccctggctacagaaagaccctgctgagcccggaggagatactgctctccatagagatcccctacagcagggagggggagtatttctcagcattcaagcaggcctcccggagagaagatgacattgccaaggtaaccagtggcatgagagttttattcaagccaggaaccacagaggtacaggagctggccctttgctatggtggaatggccaacagaaccatctcagccctcaagaccactcagaggcagctttccaagctctggaaggaggagctgctgcaggacgtgtgtgcaggactggcagaggagctgcatctgcctcccgatgcccctggtggcatggtggacttccggtgcaccctcaccctcagcttcttcttcaagttctacctgacagtccttcagaagctgggccaagagaacctggaagacaagtgtggtaaactggaccccactttcgccagtgcaactttactgtttcagaaagaccccccagccgatgtccagctcttccaagaggtgcccaagggtcagtctgaggaggacatggtgggccggcccctgccccacctggcagcggacatgcaggcctctggtgaggccgtgtactgtgacgacattcctcgctacgagaatgagctgtctctccggctggtcaccagcacccgggcccacgccaagatcaagtccatagatacatcagaagctaagaaggttccagggtttgtttgtttcatttccgctgatgatgttcctgggagtaacataactggaatttgtaatgatgagacagtctttgcgaaggataaggttacttgtgttgggcatatcattggtgctgtggttgctgacaccccggaacacacacagagagctgcccaaggggtgaaaatcacctatgaagaactaccagccattatcacaattgaggatgctataaagaacaactccttttatggacctgagctgaagatcgagaaaggggacctaaagaaggggttttccgaagcagataatgttgtgtcaggggagatatacatcggtggccaagagcacttctacctggagactcactgcaccattgctgttccaaaaggcgaggcaggggagatggagctctttgtgtctacacagaacaccatgaagacccagagctttgttgcaaaaatgttgggggttccagcaaaccggattgtggttcgagtgaagagaatgggaggaggctttggaggcaaggagacccggagcactgtggtgtccacggcagtggccctggctgcatataagaccggccgccctgtgcgatgcatgctggaccgtgatgaggacatgctgataactggtggcagacatcccttcctggccagatacaaggttggcttcatgaagactgggacagttgtggctcttgaggtggaccacttcagcaatgtggggaacacccaggatctctctcagagtattatggaacgagctttattccacatggacaactgctataaaatccccaacatccggggcactgggcggctgtgcaaaaccaaccttccctccaacacggccttccggggctttggggggccccaggggatgctcattgccgagtgctggatgagtgaagttgcagtgacctgtgggatgcctgcagaggaggtgcggagaaaaaacctgtacaaagaaggggacctgacacacttcaaccagaagcttgagggtttcaccttgcccagatgctgggaagaatgcctagcaagctctcagtatcatgctcggaagagtgaggttgacaagttcaacaaggagaattgttggaaaaagagaggattgtgcataattcccaccaagtttggaataagcttcacagttccttttctgaatcaggcaggagccctacttcatgtgtacacagatggctctgtgctgctgacccacggggggactgagatgggccaaggccttcataccaaaatggtccaggtggccagtagagctctgaaaatccccacctctaagatttatatcagcgagacaagcactaacactgtgcccaacacctctcccacggctgcctctgtcagcgctgacctcaatggacaggccgtctatgcggcttgtcagaccatcttgaaaaggctggaaccctacaagaagaagaatcccagtggctcctgggaagactgggtcacagctgcctacatggacacagtgagcttgtctgccactgggttttatagaacacccaatctgggctacagctttgagactaactcagggaaccccttccactacttcagctatggggtggcttgctctgaagtagaaatcgactgcctaacaggagatcataagaacctccgcacagatattgtcatggatgttggctccagtctaaaccctgccattgatattggacaggtggaaggggcatttgtccagggccttggcctcttcaccctagaggagctacactattcccccgaggggagcctgcacacccgtggccctagcacctacaagatcccggcatttggcagcatccccattgagttcagggtgtccctgctccgcgactgccccaacaagaaggccatctatgcatcgaaggctgttggagagccgcccctcttcctggctgcttctatcttctttgccatcaaagatgccatccgtgcagctcgagctcagcacacaggtaataacgtgaaggaactcttccggctagacagccctgccaccccggagaagatccgcaatgcctgcgtggacaagttcaccaccctgtgtgtcactggtgtcccagaaaactgcaaaccctggtctgtgagggtctaaagagagagtcctcagcagagtcttcttgtgctgcctttgggcttccatggagcaggaggaacataccacagaacatggatctattaaagtcacagaatgacagacctgtgatttgtcaagatgggatttggaagacaagtgaatgcaatggaagattttgatcaaaaatgtaatttgtaaacacaatgataagcaaattcaaaactgttatgcctaaatggtgaatatgcaattaggatcattttctgtctgttttaatcatgtatctggaatagggtcgggaagggtttgtgctattccccacttactggacagcctgtataacctcaaaaaaaaaaaaaaaaa

SEQ ID NO: 28682 - DNA, 2938 bp, Homo Sapiens
gccggggggacgcgggaggatggagcaagtggagatcctgaggaaattcatccagagggtccaggccatgaagagtcctgaccacaatggggaggacaacttcgcccgggacttcatgcggttaagaagattgtctaccaaatatagaacagaaaagatatatcccacagccactggagaaaaagaagaaaatgttaaaaagaacagatacaaggacatactgccatttgatcacagccgagttaaattgacattaaagactccttcacaagattcagactatatcaatgcaaattttataaagggcgtctatgggccaaaagcatatgtagcaactcaaggacctttagcaaatacagtaatagatttttggaggatggtatgggagtataatgttgtgatcattgtaatggcctgccgagaatttgagatgggaaggaaaaaatgtgagcgctattggcctttgtatggagaagaccccataacgtttgcaccatttaaaatttcttgtgaggatgaacaagcaagaacagactacttcatcaggacactcttacttgaatttcaaaatgaatctcgtaggctgtatcagtttcattatgtgaactggccagaccatgatgttccttcatcatttgattctattctggacatgataagcttaatgaggaaatatcaagaacatgaagatgttcctatttgtattcattgcagtgcaggctgtggaagaacaggtgccatttgtgccatagattatacgtggaatttactaaaagctgggaaaataccagaggaatttaatgtatttaatttaatacaagaaatgagaacacaaaggcattctgcagtacaaacaaaggagcaatatgaacttgttcatagagctattgcccaactgtttgaaaaacagctacaactatatgaaattcatggagctcagaaaattgctgatggagtgaatgaaattaacactgaaaacatggtcagctccatagagcctgaaaaacaagattctcctcctccaaaaccaccaaggacccgcagttgccttgttgaaggggatgctaaagaagaaatactgcagccaccggaacctcatccagtgccacccatcttgacaccttctcccccttcagcttttccaacagtcactactgtgtggcaggacaatgatagataccatccaaagccagtgttgcatatggtttcatcagaacaacattcagcagacctcaacagaaactatagtaaatcaacagaacttccagggaaaaatgaatcaacaattgaacagatagataaaaaattggaacgaaatttaagttttgagattaagaaggtccctctccaagagggaccaaaaagttttgatgggaacacacttttgaataggggacatgcaattaaaattaaatctgcttcaccttgtatagctgataaaatctctaagccacaggaattaagttcagatctaaatgtcggtgatacttcccagaattcttgtgtggactgcagtgtaacacaatcaaacaaagtttcagttactccaccagaagaatcccagaattcagacacacctccaaggccagaccgcttgcctcttgatgagaaaggacatgtaacgtggtcatttcatggacctgaaaatgccatacccatacctgatttatctgaaggcaattcctcagatatcaactatcaaactaggaaaactgtgagtttaacaccaagtcctacaacacaagttgaaacacctgatcttgtggatcatgataacacttcaccactcttcagaacacccctcagttttactaatccacttcactctgatgactcagactcagatgaaagaaactctgatggtgctgtgacccagaataaaactaatatttcaacagcaagtgccacagtttctgctgccactagtactgaaagcatttctactaggaaagtattgccaatgtccattgctagacataatatagcaggaacaacacattcaggtgctgaaaaagatgttgatgttagtgaagattcacctcctcccctacctgaaagaactcctgaatcgtttgtgttagcaagtgaacataatacacctgtaagatcggaatggagtgaacttcaaagtcaggaacgatctgaacaaaaaaagtctgaaggcttgataacctctgaaaatgagaaatgtgatcatccagcgggaggtattcactatgaaatgtgcatagaatgtccacctactttcagtgacaagagagaacaaatatcagaaaatccaacagaagccacagatattggttttggtaatcgatgtggaaaacccaaaggaccaagagatccaccttcagaatggacatgattcagggagctagaagacactttaagttatactggaaaattcaggtgccactgaaagccagatttatagtattccatctttaatatgtgggactaacagcagtgtagattgttaccttaatattttttgctgggaccatctacctgccttatactacacttaggaaaaagtattacatatggtttattttgaaacttcaagtattattgccttaatgtctcttaaccctgttacacgctgcttgtagacatgttaatatagtaatacctttatgatatattgagtttaaggactaccctttttctgttttatcatgtattcattattttgtatatgtacagggcaagtaggtatataatttgataaagttgcaattgaaatattattaacagaagatgtaagaaatttctgcatggtctaaatctttgtgtactttatttgtaaattatttgccctggagttttagaaaatagtttctgaattttaaacttgctggattcatgcagccagctttgcaggttatcagagatcaaagattgtaataataattttgtaaattgtaagcaaacattctgc

SEQ ID NO: 28683 - DNA, 2543 bp, Homo Sapiens
cggccccaggcctggaggggggtctgtgcgcggccggctggctctgccccgcgtccggtcccgagcgggcctccctcgggccagcccgatgtgaccgagcccagcggagcctgagcaaggagcgggtccgtcgcggagccggagggcgggaggaacatgacatcgcggagatggtttcacccaaatatcactggtgtggaggcagaaaacctactgttgacaagaggagttgatggcagttttttggcaaggcctagtaaaagtaaccctggagacttcacactttccgttagaagaaatggagctgtcacccacatcaagattcagaacactggtgattactatgacctgtatggaggggagaaatttgccactttggctgagttggtccagtattacatggaacatcacgggcaattaaaagagaagaatggagatgtcattgagcttaaatatcctctgaactgtgcagatcctacctctgaaaggtggtttcatggacatctctctgggaaagaagcagagaaattattaactgaaaaaggaaaacatggtagttttcttgtacgagagagccagagccaccctggagattttgttctttctgtgcgcactggtgatgacaaaggggagagcaatgacggcaagtctaaagtgacccatgttatgattcgctgtcaggaactgaaatacgacgttggtggaggagaacggtttgattctttgacagatcttgtggaacattataagaagaatcctatggtggaaacattgggtacagtactacaactcaagcagccccttaacacgactcgtataaatgctgctgaaatagaaagcagagttcgagaactaagcaaattagctgagaccacagataaagtcaaacaaggcttttgggaagaatttgagacactacaacaacaggagtgcaaacttctctacagccgaaaagagggtcaaaggcaagaaaacaaaaacaaaaatagatataaaaacatcctgccctttgatcataccagggttgtcctacacgatggtgatcccaatgagcctgtttcagattacatcaatgcaaatatcatcatgcctgaatttgaaaccaagtgcaacaattcaaagcccaaaaagagttacattgccacacaaggctgcctgcaaaacacggtgaatgacttttggcggatggtgttccaagaaaactcccgagtgattgtcatgacaacgaaagaagtggagagaggaaagagtaaatgtgtcaaatactggcctgatgagtatgctctaaaagaatatggcgtcatgcgtgttaggaacgtcaaagaaagcgccgctcatgactatacgctaagagaacttaaactttcaaaggttggacaagggaatacggagagaacggtctggcaataccactttcggacctggccggaccacggcgtgcccagcgaccctgggggcgtgctggacttcctggaggaggtgcaccataagcaggagagcatcatggatgcagggccggtcgtggtgcactgcagtgctggaattggccggacagggacgttcattgtgattgatattcttattgacatcatcagagagaaaggtgttgactgcgatattgacgttcccaaaaccatccagatggtgcggtctcagaggtcagggatggtccagacagaagcacagtaccgatttatctatatggcggtccagcattatattgaaacactacagcgcaggattgaagaagagcagaaaaggaagaggaaagggcacgaatatacaaatattaagtatcctctagcggaccagacgagtggagatcagagccctctcccgccttgtactccaacgccaccctgtgcagaaatgagagaagacagtgctagagtctatgaaaacgtgggcctgatgcaacagcagaaaagtttcagatgagaaaacctgccaaaacttcagcacagaaatagatgtggactttcaccctctccctaaaaagatcaagaacagacgcaagaaagtttatgtgaagacagaatttggatttggaaggcttgcaatgtggttgactaccttttgataagcaaaatttgaaaccatttaaagaccactgtattttaactcaacaatacctgcttcccaattactcatttcctcagataagaagaaatcatctctacaatgtagacaacattatattttatagaatttgtttgaaattgaggaagcagttaaattgtgcgctgtattttgcagattatggggattcaaattctagtaataggcttttttatttttatttttatacccttaaccagtttaattttttttttcctcattgttggggatgatgagaagaaatgatttgggaaaattaagtaacaacgacctagaaaagtgagaacaatctcatttaccatcatgtatccagtagtggataattcattttgatggcttctatttttggccaaatgagaataagccagtgcctgagactgtcagaagttgacctttgcactggcattaaagagtcatagaaaaaa

SEQ ID NO: 28684 - DNA, 2480 bp, Homo Sapiens
aacaagttggagtaagcatgcaatcggtactttggtctaggaagccatatggttcgtctcgaagtatcgtaaggaaaattggtactaatttgtctctgattcagtgtccaagagttcagtttcagattaacagccatgcaacagaatggagtcccagccacccaggagaggatgcagtggcgtcttttgctgatgttggatgggtagccaaagaagaaggagagtgttcagcaagactaaggacagaggtcagatcaaggccaccccttcaggatgaccttcttttctttgagaaggccccaagcagacagatttccttaccagacttgtctcaagaagagcctcagctgaagaccccagcgctggcaaatgaggaagcactgcagaagatttgcgctctcgaaaatgaacttgctgctctcagagctcagattgccaaaattgtgacccagcaggagcagcaaaatctcactgcaggtgacttagattctaccacatttggtaccataccaccacaccctccacctcccccaccgcccctgcctccccctgcactggggctccaccaaagtacatctgctgttgatctgattaaagaacgaagagagaaaagagccaatgctggaaagactttggttaagaacaatccaaagaaacctgaaatgccaaatatgctagagatccttaaagagatgaacagtgtaaaacttcggtcagtgaagaggtcagagcaagatgtgaagcccaagccagtggatgctactgaccctgctgccctcatagcagaggctctgaaaaagaaatttgcttatcggtatcgaagtgatagccaagatgaagttgaaaaaggaattccaaagtctgaatcagaggccacctcagagagagtgttgtttgggccacacatgttgaagccaacaggaaaaatgaaggctttaattgaaaatgtatcagactcctaatagacaatgagctgcgaaaagactcctggttcccctgttgatttgtgagggccaagtttgctagtagaaatcgacactgtttagtaaatacctctttagtattcagtggtcttcttttcaggctaattagtggattaagcaataatgaaagcactaagtttggttttgcttttgtgagatggtcagctttggtgctctccacaacatgtgtgttctgacatgtttctaatatgtggccagggcgttcagatttccagttttgaaaacaattgtatagatttcacaacacaaaaaggacatttgtggatgttactgcacattttaaattcttaacactaatttatctgtataagtgttttatatgcatatttttggacataaacagtttatgtaaaattagtaatgaatgatggcaacgagggcactgttatcttcgtttgttttcaatgatcatttagcattcaatgatggaacagctggtataacataagttgttggcatgaaatatttgagattggaaacttcttgccttgaacagaacttatatcttagattctctctcacattttcttggagctggggtttgaataggaaccagatgatgttcactgctgaaattccataatgcttcccattgaagggaagttgagaaccaggaaagctgctttcacgtcattgccatccagtactgacagggaagaaagatgtagttttccagtagtgatgaatcaaattattgaattaaatttcttcttaagaagtaaaaactcagaatgtaccatcttgtttcctttcagtttattaaatggcatcataaagatgactttgctaagttaatagagttaaaaattttttttaatataagccaaaatattaactttaatgaaacattgacttggcaaatgaatttcctataaattatcattggtcagaatgctgttttgtttaataatattacgcaacataaaccataggtgttattagaagtggagaactgcctttttcatctggggcttttaaggacttgctataaatgattattttttaaatgctttataaatcttcatggtttttctatttctgatacactcagctatagttaataccagagtatcctaccaggagtaatatttggaatatttaaatctagtaaaagaagaaagttgtacttcctggctgggagtattaggagatgggagtagagattcacttttaagttcttgaaaatatatgcattctcctaaatattaacaaaaatgatttggggaaatgacatggcttgattgttctgtttaaatttgtactgtggcttatgttacacatgttcatgttcacctctcattcacctgttttatatggtttaaaattctctttaacaaaattcagaaaattcacctgaaacgtattttgacctaaaagaaacatatttttgtatcagtattgaattttggacagtgcccccatataaggaagttactgttttaaaataaagcaaactaactgttttattttccttgg

SEQ ID NO: 28685 - DNA, 4753 bp, Homo Sapiens
cttcaatcaagtagccttcccactgcagtacacacccaggaaatttgtcatccaccctgagagtaacaaccttattatcattgaaacggaccacaatgcctacactgaggccacgaaagctcagagaaagcagcagatggcagaggaaatggtggaagcagcaggggaggatgagcgggagctggccgcagagatggcagcagcattcctcaatgaaaacctccctgaatccatctttggagctcccaaggctggcaatgggcagtgggcctctgtgatccgagtgatgaatcccattcaagggaacacactggaccttgtccagctggaacagaatgaggcagcttttagtgtggctgtgtgcaggttttccaacactggtgaagactggtatgtgctggtgggtgtggccaaggacctgatactaaacccccgatctgtggcagggggcttcgtctatacttacaagcttgtgaacaatggggaaaaactggagtttttgcacaagactcctgtggaagaggtccctgctgctattgccccattccaggggagggtgttgattggtgtggggaagctgttgcgtgtctatgacctgggaaagaagaagttactccgaaaatgtgagaataagcatattgccaattatatctctgggatccagactattggacatagggtaattgtatctgatgtccaagaaagtttcatctgggttcgctacaagcgtaatgaaaaccagcttatcatctttgctgatgatacctacccccgatgggtcactacagccagcctcctggactatgacactgtggctggggcagacaagtttggcaacatatgtgtggtgaggctcccacctaacaccaatgatgaagtagatgaggatcctacaggaaacaaagccctgtgggaccgtggcttgctcaatggggcctcccagaaggcagaggtgatcatgaactaccatgtcggggagacggtgctgtccttgcagaagaccacgctgatccctggaggctcagaatcacttgtctataccaccttgtctggaggaattggcatccttgtgccattcacgtcccatgaggaccatgacttcttccagcatgtggaaatgcacctgcggtctgaacatccccctctctgtgggcgggaccacctcagctttcgctcctactacttccctgtgaagaatgtgattgatggagacctctgtgagcagttcaattccatggaacccaacaaacaaaagaacgtctctgaagaactggaccgaaccccacccgaagtgtccaagaaactcgaggatatccggacccgctacgccttctgagccctcctttcccggtggggcttgccagagactgtgtgttttgtttcccccaccaccatcactgccacctggcttctgccatgtggcaggagggtgactggataattaagactgcattatgaaagtcaacagctctttcccctcagctcttctcctggaatgactggcttcccctcaaattggcactgagatttgctacacttctccccacctggtacatgatacatgaccccaggttccagtgtagaacctgagtcccccattccccaaagccatccctgcattgatatgtcttgactctcctgtctacttttgcacacacccttaatttttaattggttttcttgtaaatacagttttgtacaatgttatctctgtgggaggaaggaggcaggctgtggtgggactgggtagggtatagtatcactcctgagttccactgctctagaatctaaccagaaatagaaacctagtttttaaggtgactggcatccatgtgtcttgttctggagatgaggatgtaggtgggaggtttgaacccaagttagagcaggaagaactgagtagactccttccttccagataccgacttggacttgcggcactctgtggctccccacccccaggtctgtggtggtttctttgttttttcctggttctttttgctgtgctgatgaaacatgacctcaataaccatgtgtatacccacccctcttcccactgggtattgaggaagggtggctgattcttcctcctcttctactctgaggatgttagtatggggattttagcatgaattccagctggggagtcttaacagatgccccttttactgatagagcacctaaagcgatctttggctccataggaccataggaagggtcagtacagaagaacctagatactgccctgcccctgagaactgtgtatatgtggggcctgtctgcagcacccatctcaggtgggttccagagggcctttagggtataatgagagcctgttaggtggaagaggcccagttccagaaatgttccagcccacccctgagaattcctcctgtttagttgtgtgggaagccctcgtcttccaggctgtccttgcgccttgaacctggagaagtgagctcactgttctcaatacttcacaaatgtaaaactttctttcgtctgcatgtgctcagccatctaaattgagcaaatgatctggtgagcactgggttagaatcaggaatggtggaatacaatctgaacctctcagagcccagaacagagggttcctgacactgtgacactgtctcctggaactaagtatctcttgaatcatgacttggttttagatcagtcaagagagacccaggttttgccaggaatcgaatccctaaataacatgtttttttctcacttagctcatgaatttgcatagtagacagtagttctgaattagattttgaaaacctaatttcagggctcattttttcctgtggccctaaatccattctatcaaattgtgtgatactgacatgcagtcatctgaggaactcagcgtagatacttgagcagctcctcgcctcttttctaactcaagtttgactaaaatacatacactccgtacagaaggtagggggttatgtaagaaaggaaaacctaatctatggaatcaggagttgtcaccaccgagcttcctctggaagtctgcccatcagcttgcttgttctctgttaagaggaagggctaggacaaggatttgggcttgaatatgtggaaaggaattttcatagttgttgctgcaggacctacaaaagtttaaaattagattggatgtgactcaatgacaagtcccatctgtgtaattgttaaggggacctgattgactcctgtggtttgattgagcaaccaggtaaatagagacctctctccagctttggcaaaacccatcagaggctgctgcagaactcagacagagggatctgcccttgggtttgcttccatcctgttccattgctaagcccttgtgacttggatcctaggactgaaaagtttttagctgcctcagctttcccctgaccttactggcagaggttctgcagatgtttcctttggaagatctcttgccaagaatagcattcctttggaggaggggggttctagttggaatgttgcttttcttggttagtgtaaatgtattgctagtgagacagctgccggcgctggaaaaggctcgtctcacagggagagtgctggtccccagaatgtgtgctgttcccacgctgctgcctttcttgagcttgttagaggaaagccagaaaggcattcagatgggatcagtctggctttcaaattttttttaattcctaagttctgttttattttttaattttttaaaaaaaattttattagagacagtctctctctcttgcctagctgggagtgcagtggagtgatcatagctcactgaggcttgaactcctgggctcgagcaatccacctcagcctccagagtaggggagactacagatgtgtgccaccatactcagctagtttttaaactttcgtagagacagggtctccctgtgttgcccaggctggcctcgaactcctgacctcaaaaaatcttcctgccttggcctcccagcgctttgagaggctgaggcaggaggatcccttgagcccaggagtttgagaccagcctgggcaacatgacaaaaccccatctctccaaaaatacaaaaattggccaggcatggtggtgcacacttgtagtcccagtaattagggggctgagacaggaggatcacttcagcctatgagtttgaggctgcagtgagctgtgattgcgccactacactccagcctggatgacaggacgaaacctgtctcaaaaacaccaaaaaacaaaaaccggtctcctggggtcatggtagcacaaacgcacatgactgagtgctcaggggttctgaggcttgtccgctgacctggggctctggccctgggagatctgggggacctgctgtcctatatgtgatgctttgaaagaaaggggcatcattccaagccaagaggccccagagagggcaccgtggggtgttcaggcttctgtgaggccccagtgagatcctgtggctgtgcccccatcacctccacccactctgccctcccactagctgcccaacggatgaatcaacgccttggcagagttttccagcagggccttgcagagagtgtgtgtgacctgtgtggccactgccttggggacgggtgaggagttagcctggaacattccagcgtgggcattattgtcctgttgcaagttcagggcaaaaccaggaatccagttttgtcgatccaattgagaaaacatttcatgaacaactacttgtggcatgcattggcactcggaataaagcgcactattgtcact

SEQ ID NO: 28686 - DNA, 4602 bp, Homo Sapiens
ggaggtgtcgcgccggggaacttcctggttcccgggctcggcttcgccgggatcctcttggaagggaaacaatggggcggagggcactgcggtagccgccgccgccgccgcgccgcgccgcgccggatctgctcggccgcccgggaccgccagctctgtccgctgcccacagcctagcagtcgggaccgtactgaggacatgtattcctctgagaaaccttggacagcagattttggtttaatatctgattgggacaacattcagacccatttccagtcatgaattcagaccaggatgtagcactcaaacttgcccaggagcgagctgaaatagttgctaaatatgacagaggacgagaaggtgcagagattgaaccttgggaagatgctgattaccttgtttacaaagtcacagatagatttggctttttacatgaggaggagctcccagatcataatgtggctgtggaacggcaaaagcacctggaaattgaaagaactaccaaatggctgaaaatgctgaaaggatgggaaaaatacaagaacactgaaaagtttcataggcgaatttacaaaggaataccactccagctcagaggtgaagtctgggccctccttcttgagatccctaaaatgaaagaagaaacaagggacctgtatagtaaattaaaacacagagcacggggctgttcacctgacatcagacaaatagacctggatgtcaaccgcacatttcgggaccacattatgtttagagacagatatggtgttaagcaacaatccttattccatgtgcttgctgcctattctatttataacacggaagtcgggtattgtcaggggatgagccagatcacagctttactcctcatgtatatgaacgaggaagatgccttctgggccctggtcaaactcttctcaggccctaaacatgccatgcatggcttttttgtccaaggttttcctaaactcttgaggtttcaagaacatcatgaaaaaatactgaacaaatttctgtccaagcttaagcaacacttggattctcaagaaatctacacaagtttttacacaatgaaatggttttttcagtgtttccttgatcgtactccctttacactaaacctcagaatatgggatatctacatctttgaaggagaacgagttcttactgctatgtcttacaccatcttaaaattacacaaaaaacatctaatgaaattgtccatggaagaacttgtagaattttttcaggagaccctggcaaaggattttttctttgaagatgattttgtgatagagcaacttcagatttctatgacagaactaaagcgggcaaagttagaccttccagaacctggtaaagaggatgaatatccaaagaagcccttggggcagcttccacctgaacttcagtcttggggcgtccatcacttgagcaacggacagaggagcgtgggccggccgagcccgctggccagcggcaggagggagagcggggcgccccacaggaggcacgagcactccccgcacccccagagcaggaccgggacgcccgagagagcacagccgccaagacggaaatcggtggaggaggagagcaaaaagcttaaagatgaggcagattttcaaagaaaactcccatcgggtccacaggacagttccaggcaatataatcacgcagctgccaaccaaaatagcaacgccacttcaaatatcaggaaggagtttgtgcccaaatggaataaaccgtcagacgtctcagctacagagagaactgccaaatacaccatggaaggcaaaggtcgagcagcgcaccccgcgctcgcagttaccgtcccaggtcctgccgaggtgcgggtgtcaaacgtgcggccaaagatgaaggccctggatgctgaggacgggaagcggggctccactgcatcgcagtacgacaacgtgccaggcccggagctggacagcggcgcttccgtggaggaggcgctggaaagggcttactcccagagcccccggcatgccctttaccctcccagcccgagaaagcacgctgagccaagttctagtccatcaaaagtatccaacaagtttacttttaaagtacagcctccaagtcatgcacgatatccgtcccagctagatggggaagcccgagggctagctcatcccccctcctacagcaatccccccgtttaccacggaaactctcccaaacacttccctactgccaacagcagctttgcttctccacagtttagccctgggactcaactgaatccttccaggagacctcatggttctactctttccgtcagtgcttctccggagaaatcttacagccgcccaagcccccttgtactgccgtctagtcgaatagaagtcctccctgttgacactggtgctgggggatattcgggcaattcagggtcaccaaagaatggaaaattgatcattccaccagtggattacttgccagataacagaacatggtcagaagttagttatacatacagacctgagacgcagggacaatcatggacccgagatgctagccgtggcaatttaccaaaatactcagcctttcaactcgcaccctttcaggaccatggcctccctgcagtttctgtagatagtcccgtgagatataaagcttcaccggccgcagaagatgccagtccatctggatatccatattcagggcccccgcctccagcctaccactacaggaatcgggacgggctttccatccaagagtcagtgttgctgtgagatttgacgtgtacttgctaaagacgagagagaaaccacgtgaaacctacattgctatgttcataattgccaaagcagtatttatactattgtaaacaactcgcacatctctcctgtctgttagtaataagaatacagggaaatgtcttcagccccacgtagatgctgcttaagatgagcgtttcaattgcatcatcactgacctgtagaatttaacccggaaacatcgcaatagcatttagggatgcacgcacagtggtaatttattactcagttccggttatgtttttctccaaaacctgaacatttttactctgttggctcattctattttgactaatgttacaaagtactgaaaaaactgtagaatagatatttttaaggctatatgtagtgtatgtgtcttttaatagatataggcatctgttcatccacatttgaacacagagctaaagaaacgttttttaaaaaactacttttaatccagatccatggaataatatgtaattcttgttttccttgtcttttagtccagtttttctttttccctctcatatatttgtaacctgggtcctaaactgactgaagagtttgtcctgactttattaattgcagtctcacagaatgctcatcattctccttcagctgttgccattttctttcaatctgaaaattaaagacattggagagaaaggctaaccacttaatggtgcttaaaaatcggggcacttaaaataagtttacggccaaaggtgcagcagtgcttatcacatccacatactaagagattggtcttagtgcgtttgtgccctttgttctggtctgactcttgcgaatctcagagcaggagaagttgcagcttactgatccctcagtgctcacagtactcatgtggggcagccacactaactgcattagcagtgtggttacttctttcttctgcctcgactcacatggcttctccccacgaaggtcccagggtggccatttatacaatccatttctgtcctctttatggaatgtagtcgacggatattgctgcacctcatcaggccattacattgtccatgttaaaattataaaaatgatcctagtttttcataggagtctaggattttgatcttttaaaaaatacagtgtgatttcatgcttttgaacatctttttttttttcattgaaacaaattcaagttcttggcttaaaaaaaaattagtgatgtctttaaaaaatattctgttacactacagataccaaaacactgacaaagatttaggcactccaagagagtatgacttcgtgtttaattggggagcttgttttcaacattgcttatatttgaatagtagaaaacccgacattgatgtttcttcctgttgcaaggtggggctttaaactttcaaggtacaaaagtatgtcttttaaaatggaagtaacgtttgtttagctagtgaatgtgacaatatattttatgtatataatgagtctaatgtaattttgatcaacttggtaatgatgttattaaatagcaaaacaagtgcagtgtattaaagctaaacactacattgaaacgcaaacaaaattctggtgaaataactgggctgttgatgcaggtcaggtggaagctgagaaataaatgtatataaatatgtagctgaggatattaattcccattatataaccataattctgtgacttgtaataaaccaagctgtacaatttagtttataatagcagtatctgagctgctccaaaatatatatatcaacagtggtaaatactgtagatttttatatatatatatatatatatgcaaaaaatatatatatacacacaagc

SEQ ID NO: 28687 - DNA, 2227 bp, Homo Sapiens
gagagcccgaacaggaagagggtacagctttgtgcaggtcacatgcccactgcagccctccagcctctggtccccagagcggactttggaagctgaactgcttttgttgctggaagacttatgttataatttaccctgggtggaccagggtcgtacaaaagggcaacgctccccagtccccccactcccgaccccggaatcatgcatcggactacacggatcaaaatcacagagctgaacccccacctcatgtgtgccctctgcggggggtacttcatcgacgccaccactatcgtggagtgcctgcattccttctgcaaaacctgcatcgtgcgctacctggagaccaacaaatactgccccatgtgtgacgtgcaggtccataaaacccggccgctgctgagcatcaggtctgacaaaacacttcaagacattgtctacaaattggtccctgggctttttaaagatgagatgaaacggcggcgggatttctatgcagcgtaccccctgacggaggtccccaacggctccaatgaggaccgcggcgaggtcttggagcaggagaagggggctctgagtgatgatgagattgtcagcctctccatcgaattctacgaaggtgccagggaccgggatgagaagaagggccccctggagaatggggatggggacaaagagaaaacaggggtgcgcttcctgcgatgcccagcagccatgaccgtcatgcatcttgccaagtttctccgcaacaagatggatgtgcccagcaagtacaaggtggaggttctgtacgaggacgagccactgaaggaatactacaccctcatggacatcgcctacatctacccctggcggcggaacgggcctctccccctcaagtaccgtgtccagccagcctgcaagcggctcaccctagccacggtgcccaccccctccgagggcaccaacaccagcggggcgtccgagtgtgagtcagtcagcgacaaggctcccagccctgccaccctgccagccacctcctcctccctgcccagcccagccaccccatcccatggctctcccagttcccatgggcctccagccacccaccctacctcccccactcccccttcgacagccagtggggccaccacagctgccaacgggggtagcttgaactgcctgcagacaccatcctccaccagcagggggcgcaagatgactgtcaacggcgctcccgtgccccccttaacttgaggccagggaccctctcccttcttccagccaagcctctccactccttccactttttctgggcccttttttccacttcttctactttccccagctcttcccaccttgggggtggggggcgggttttataaataaatatatatatatatgtacataggaaaaaccaaatatacatacttattttctatggaccaaccagattaatttaaatgccacaggaaacaaactttatgtgtgtgtgtatgtgtggaaaatggtgttcattttttttggggggggtcttgtgtaatttgctgtttttgggggtgcctggagatgaactggatgggccactggagtctcaataaagctctgcaccatcctcgctgtttcccaaggcaggtggtgtgttgggggccccttcagacccaaagctttaggcatgattccaactggctgcatataggagtcagttagaattgtttctttctctccccgtttctctccccatcttggctgctgtcctgcctctgaccagtggccgccccccgcgttgttgaatgtccagaaattgctaagaacagtgccttttacaaatgcagtttatccctggttctgaggagcaagtgcagggtggaggtggcacctgcatcacctcctcctcttgcagtggaaactttgtgcaaagaatagatagttctgcctcttttttttttttttcctgtgtgtgtggcctttgcatcatttatcttgtggaaaagaagattcaggccctgagaggtctcagctcttggaggagggctaaggctttagcattgtgaagcgctgcacccccaccaaccttaccctcaccggggaaccctcactagcaggactggtggtggagtctcacctggggcctagagtggaagtgggggtgggttaacctcacacaagcacagatcccagactttgccagaggcaaacagggaattccgccgatactgacgggctccaggagtcgtcgccacactcg

SEQ ID NO: 28688 - DNA, 5360 bp, Homo Sapiens
ttgaggtgcattgaaatgttccaagctgttacttaccttaacatgttcttgaggtaccatggcatggattaaaaggaaatttggtaagtggcctccacttaaacgacttactagggaagctatgtgaaattatttaaaagggcgaggggatcaaatagtacttatccttcatgcaaaagttgtacagaagtcatatggaatgaaaaaggttttttgccctcccccttgtgtatatcttatgggcagtggatggaagaaaataaaattacaaatgaaatgcgatggttgttctgaacaaggctctcatccatgtgcatttattgggataggaaatagtgaccaagaaatgcagcagctaaacttggaaggaaagaactattgcacagccaaaacattgtacatatctgattcagacaagcaaaagcacttcatgttgtctgtaaaggtgttctatggcaacggtgatgacattggtgtgttcctcagcaagtcgtccaaaccttccaaaaagaagcagtcattgaaaaatgctgacttatgcattggctcaggaacaaaggtggctctgtttaatcgactacgatcccagacagttagtaccagatacttgcatgtagaaggagggaattttcatgccagttcacagcagtggggagcatttacattattcttggatgatgatggatcagaaggagaagaattcacagtcagagatggctacattcattatggacaaacagtcaagcttgtgtgctcagttactggcatggcactcccaagattgataattaggaaagttgataagcagaccacattattggatgcagatgatcctgtgtcacaactccataaatgtgcatttgaccttgaggatacagaaagaatgtacttatgcctttctcaagaaagaataattcaatttcaggccactccatgcccaacagaaccaaataaagagatgataaatgatggtgcttcctgggcaatcattagcacacataaggcgaagtatacattttatgagagaatgggccctgtccttgccctggtcatgcctatgcctgtcgtagagagccttaagttgaatggcggtggggacgaagcaatgcttgaacttacaggacagaatttcactccaaatttacgagtgtggtttggggatgtagaagctgaaactatgtacaggtgtggagagagtatgctccgtgttgtcccagacgttctgcattctgagaaggttggagatagttcccagcaaccagtccaggtttcagtaactttggtccgaaatgatggaatcatatattccaccagccttacctttacctacacaccagaagcagggccgcggccacattgcagtgtagcaggcgcaatccttaaggccagttcaagccacgtgccccctaatgaattaaacacaaacagcgatggaagttacacaaatgccagcacaaattcaaccagtgtcacatcatctacaccaacagtggtatcctgaactaccgtctttttgctaagactcaaacggcttgagtgcagcaaaaagttgacaaaaaaggaaaaaaaaatgaacagtcttttgtggtttattgggaaacttttcataccaggtgatactattctaaaaccccgttgtctccctgcaagtgctgatttgaaatgcagaagccacagtaaaaaaaaaaaaaaaaaaaaaaaaaaaagaaaaaaaaatcaaaatgtataaatattggaaatcaagtttttcagctgttttgttggttggttggttggtttttgtttggttttgtttaaagggacaagaagtaaataatgtggctggaatacaagttgaacaaactagaagacacaaatctaacatagtttttatggaccaaggaacttgtatattgtataagctttagtaaaaggtacattttcaccatacctttttttatatcacggtattatagtacaccttgttaccaataggttgttctcttccccaccctcctttgagctttgctctaaaatacattctggttccaagcctgaccatccttgtttaatctatcatactcttccaggtttttttttttggtctaaggctggaacttttttctttttttttcagctgaagtcttatgactttttcatgagtcaaaattgtttggatttcacgaagtcaaatcttgcaaaggcctgcatattttttttaagattatatgaagtctgtgcaaaaagctttaaaaaattgcctctgccttgcctgcatacatgcaatgtatgtaacttagtctctcttctcagacactgttgggtagttatttctgtgttttctttttttaaaaaaaaatatggacttattgtggtttatctgagaggttctaacattcacatgcaatttggtgtggcatttagctattatgagttattggcgcgaacttgtttgatatttgaagtgtctctccccttttcccatgacgtaatacataggtgtgttccaggatttgttcaggtttttccccccctcctaatcttgtacataacttgtattttgtgtaagttaaacattttatttgaacttggaatgttcccagtgatttcattcagcagggtattttctgccttgttggcaagtagcaaaaaatatgggaagtatttgctaccagttgttagatggtgccccttattggtagaatcaggaaaatgtccgcaaaagcatgttttattatctttacttttttggggggttggagggggtagcctagccagacatcatgtaatcttaaaacataagatgcttttattagatgatcaactaaaaatagctggaagacagtactttagaaacaaaatagttagtaagatatataatgcaaatgtaacttatgttttcatttttttctctgccttttttttttgttttttttctttttttccagtactgagcatctccacaaatgtctcctactcagaaaatgtttcttttctttcagttgagatttggtgcattcagggttgtaggttggccttgcttgctaacccgccggttttaccgtgctttattcctgaactttgtttatgcctttgtttggttcttctgaaattgcagcagactcattgggctacatttagtacaggaaccacgtgtgtaatgttatacaacacagtcagtaatacaatcatccctcttagagtaaaaactacctctagattgtgtaagctttttactgtccataaaacaggagccacagtaccttatgaatgcaaaactgtaacttcctacagtgtttccccacagaacattgtctttctggtgtctgggctgtttttgaaaaagtttccattaatagactttttagaaattattattagtagcattttttttccagctttgcgtcttcatcactcactcaagtgtcagactatgcactgtaaatatcttcctaacatctttaaatcgccttttcctcagttttcaaggggaaggtcatttgtaaagcacgttaggtggttaaatcagttattgcggttttctcttacagcaagcctttttaatcacccccaggctgcattttattctatatcgccttttttcttcaaatctgctccaatcatccacttctctcttataagctattcctgcctcacacctaaatctgtttcagtgatcaagggcagaactcattgtggccttatctttctttgttgtaattgttcactgtctctttcttacagaccacttattctgagtagtagttattcctccctatggagtcatggcaggaatcattacacagtgcttttgttcagagcatggacatgttccaggtgctgctttgctttaacggccacaagtttcctccacttctcaggtttggtatttagtaaggaatcaattaaattaaccaataacaaaagagatacttttgaagaacaaactattctttacccattttgtagctcaaaaataatttttcaagttcatgaccttattaaaatgaacttgtgtttttttaacaaacgtctattttattttgatagtttctttccgaagataattgaaatattatactgtaacccttttcttttcttttttgaaaagtccaagaatgtacttatacaggatttttccccacctatttttggccattctcataccacagacaaaagagtgaatgattgtcattgtagcttattgtttatcagtagttcttttgtagctgcttacattttttctttcatggtttgtgaatcatttcagtatgtaatttataggaaccttgtcctctggtatagtagactgtgtgccctcctccaggatggcattattagacatgctggtcatttaccctcagaaagactctcttatagaatggtgagtgcttcagttatagtatgtttgaattttaaaaaattcctgtttagaatgtatctatgctctcatgactatgcagtttctaacatacacatagaagctgagtctctgatccaatatgtttttatttgttccattaatttatcacatagattgggaaggcaagctaaaagccttaaaaatgccctttatattttgagtgatttcagcgttgaacacagtatactatctaaatttgctgctcactttcttaaactgttgcaattaaaggcatgtttatacatgactaatcgtgaaatgtttgtcactcttactgcacagacttatctgcaatcaaactggttagtttttttgttttgttttgttttattgtttttaatgaatctggtaccatctgtgctttcacaaaaaacttccaatgccatttttgagaactaacctaacagtcatgctaaccagaaaatccactggggaggaggttcctttgaaacaaaatgctgttcagttagtaaccaagttactttgattgcaaaagcagctgtgtttctgataagtactgaacaaatgtgtgtaattttctgtgccagacttatgactttgttttcaagcactgtaatgtgggatggatggttagaaacaataatatatagggtttctgttaaccctttcaggactcaactgtatctccttttgttaattttcccctgtgttgtgataaattgtttgccagcattcagtactgtgttggtgcagatgaggtttatatctcattttagcttatttcttgtacctttcagcatgcctacgcattcagtccttaaggggtttattttacaaactgtgcgcctgaagtttattagcaataagatagaaaatgagcaagtttataccataattttgagaaaaaaagaatctgctcagttccatatttcatccgtgaaaaacttgcaatacgagcagtttcaaggaataaataaaaaggaaatgaaaccattgt

SEQ ID NO: 28689 - DNA, 1377 bp, Homo Sapiens
agctaggtcctcggagtgggccagagatggcggcggccgacggggctttgccggaggcggcggctttagagcaacccgcggagctgcctgcctcggtgcgggcgagtatcgagcggaagcggcagcgggcactgatgctgcgccaggcccggctggctgcccggccctactcggcgacggcggctgcggctactggaggcatggctaatgtaaaagcagccccaaagataattgacacaggaggaggcttcattttagaagaggaagaagaagaagaacagaaaattggaaaagttgttcatcaaccaggacctgttatggaatttgattatgtaatatgcgaagaatgtgggaaagaatttatggattcttatcttatgaaccactttgatttgccaacttgtgataactgcagagatgctgatgataaacacaagcttataaccaaaacagaggcaaaacaagaatatcttctgaaagactgtgatttagaaaaaagagagccacctcttaaatttattgtgaagaagaatccacatcattcacaatggggtgatatgaaactctacttaaagttacagattgtgaagaggtctcttgaagtttggggtagtcaagaagcattagaagaagcaaaggaagtccgacaggaaaaccgagaaaaaatgaaacagaagaaatttgataaaaaagtaaaagaattgcggcgagcagtaagaagcagcgtgtggaaaagggagacgattgttcatcaacatgagtatggaccagaagaaaacctagaagatgacatgtaccgtaagacttgtactatgtgtggccatgaactgacatatgaaaaaatgtgattttttagttcagtgacctgttttatagaattttatatttaaataaaggaaatttagattggtccttttcaaaattcaaaaaaaaaagcaacatcttcatagatgaatgaaacccttgtataagtaatacttcagtaataattatgtatgttatggcttaaaagcaagtttcagtgaaggtcacctggcctggttgtgtgcacaatgtcatgtctgtgattgccttcttacaacagagatgggagctgagtgctagagtaggtgcagaagtggtaggtcagctacaaatttgaggacaagataccaaggcaaaccctagattggggtagagggaaaagggttcaacaaaggctgaactggattcttaaccaagaaacaaataatagcaatggtggtgcaccactgtaccccaggttctagtcatgtgttttttaggacgatttctgtctccacgatggtggaaacagtggggaactactgctggaaaaagccctaatagcagaaataaacattgagttgtacgagtctg

SEQ ID NO: 28690 - DNA, 5751 bp, Homo Sapiens
ctgcttcacttcacggggcgaacatggcgcacagctgtcggtggcgcttccccgcccgacccgggaccaccgggggcggcggcggcggggggcgccggggcctagggggcgccccgcggcaacgcgtcccggccctgctgcttccccccgggcccccggtcggcggtggcggccccggggcgcccccctcccccccggctgtggcggccgcggcggcggcggcgggaagcagcggggctggggttccagggggagcggccgccgcctcagcagcctcctcgtcgtccgcctcgtcttcgtcttcgtcatcgtcctcagcctcttcagggccggccctgctccgggtgggcccgggcttcgacgcggcgctgcaggtctcggccgccatcggcaccaacctgcgccggttccgggccgtgtttggggagagcggcgggggaggcggcagcggagaggatgagcaattcttaggttttggctcagatgaagaagtcagagtgcgaagtcccacaaggtctccttcagttaaaactagtcctcgaaaacctcgtgggagacctagaagtggctctgaccgaaattcagctatcctctcagatccatctgtgttttcccctctaaataaatcagagaccaaatctggagataagatcaagaagaaagattctaaaagtatagaaaagaagagaggaagacctcccaccttccctggagtaaaaatcaaaataacacatggaaaggacatttcagagttaccaaagggaaacaaagaagatagcctgaaaaaaattaaaaggacaccttctgctacgtttcagcaagccacaaagattaaaaaattaagagcaggtaaactctctcctctcaagtctaagtttaagacagggaagcttcaaataggaaggaagggggtacaaattgtacgacggagaggaaggcctccatcaacagaaaggataaagaccccttcgggtctcctcattaattctgaactggaaaagccccagaaagtccggaaagacaaggaaggaacacctccacttacaaaagaagataagacagttgtcagacaaagccctcgaaggattaagccagttaggattattccttcttcaaaaaggacagatgcaaccattgctaagcaactcttacagagggcaaaaaagggggctcaaaagaaaattgaaaaagaagcagctcagctgcagggaagaaaggtgaagacacaggtcaaaaatattcgacagttcatcatgcctgttgtcagtgctatctcctcgcggatcattaagacccctcggcggtttatagaggatgaggattatgaccctccaattaaaattgcccgattagagtctacaccgaatagtagattcagtgccccgtcctgtggatcttctgaaaaatcaagtgcagcttctcagcactcctctcaaatgtcttcagactcctctcgatctagtagccccagtgttgatacctccacagactctcaggcttctgaggagattcaggtacttcctgaggagcggagcgatacccctgaagttcatcctccactgcccatttcccagtccccagaaaatgagagtaatgataggagaagcagaaggtattcagtgtcggagagaagttttggatctagaacgacgaaaaaattatcaactctacaaagtgccccccagcagcagacctcctcgtctccacctccacctctgctgactccaccgccaccactgcagccagcctccagtatctctgaccacacaccttggcttatgcctccaacaatccccttagcatcaccatttttgcctgcttccactgctcctatgcaagggaagcgaaaatctattttgcgagaaccgacatttaggtggacttctttaaagcattctaggtcagagccacaatacttttcctcagcaaagtatgccaaagaaggtcttattcgcaaaccaatatttgataatttccgaccccctccactaactcccgaggacgttggctttgcatctggtttttctgcatctggtaccgctgcttcagcccgattgttttcgccactccattctggaacaaggtttgatatgcacaaaaggagccctcttctgagagctccaagatttactccaagtgaggctcactctagaatatttgagtctgtaaccttgcctagtaatcgaacttctgctggaacatcttcttcaggagtatccaatagaaaaaggaaaagaaaagtgtttagtcctattcgatctgaaccaagatctccttctcactccatgaggacaagaagtggaaggcttagtagttctgagctctcacctctcacccccccgtcttctgtctcttcctcgttaagcatttctgttagtcctcttgccactagtgccttaaacccaacttttacttttccttctcattccctgactcagtctggggaatctgcagagaaaaatcagagaccaaggaagcagactagtgctccggcagagccattttcatcaagtagtcctactcctctcttcccttggtttaccccaggctctcagactgaaagagggagaaataaagacaaggcccccgaggagctgtccaaagatcgagatgctgacaagagcgtggagaaggacaagagtagagagagagaccgggagagagaaaaggagaataagcgggagtcaaggaaagagaaaaggaaaaagggatcagaaattcagagtagttctgctttgtatcctgtgggtagggtttccaaagagaaggttgttggtgaagatgttgccacttcatcttctgccaaaaaagcaacagggcggaagaagtcttcatcacatgattctgggactgatattacttctgtgactcttggggatacaacagctgtcaaaaccaaaatacttataaagaaagggagaggaaatctggaaaaaaccaacttggacctcggcccaactgccccatccctggagaaggagaaaaccctctgcctttccactccttcatctagcactgttaaacattccacttcctccataggctccatgttggctcaggcagacaagcttccaatgactgacaagagggttgccagcctcctaaaaaaggccaaagctcagctctgcaagattgagaagagtaagagtcttaaacaaaccgaccagcccaaagcacagggtcaagaaagtgactcatcagagacctctgtgcgaggaccccggattaaacatgtctgcagaagagcagctgttgcccttggccgaaaacgagctgtgtttcctgatgacatgcccaccctgagtgccttaccatgggaagaacgagaaaagattttgtcttccatggggaatgatgacaagtcatcaattgctggctcagaagatgctgaacctcttgctccacccatcaaaccaattaaacctgtcactagaaacaaggcaccccaggaacctccagtaaagaaaggacgtcgatcgaggcggtgtgggcagtgtcccggctgccaggtgcctgaggactgtggtgtttgtactaattgcttagataagcccaagtttggtggtcgcaatataaagaagcagtgctgcaagatgagaaaatgtcagaatctacaatggatgccttccaaagcctacctgcagaagcaagctaaagctgtgaaaaagaaagagaaaaagtctaagaccagtgaaaagaaagacagcaaagagagcagtgttgtgaagaacgtggtggactctagtcagaaacctaccccatcagcaagagaggatcctgccccaaagaaaagcagtagtgagcctcctccacgaaagcccgtcgaggaaaagagtgaagaagggaatgtctcggcccctgggcctgaatccaaacaggccaccactccagcttccaggaagtcaagcaagcaggtctcccagccagcactggtcatcccgcctcagccacctactacaggaccgccaagaaaagaagttcccaaaaccactcctagtgagcccaagaaaaagcagcctccaccaccagaatcaggtccagagcagagcaaacagaaaaaagtggctccccgcccaagtatccctgtaaaacaaaaaccaaaagaaaaggaaaaaccacctccggtcaataagcaggagaatgcaggcactttgaacatcctcagcactctctccaatggcaatagttctaagcaaaaaattccagcagatggagtccacaggatcagagtggactttaaggaggattgtgaagcagaaaatgtgtgggagatgggaggcttaggaatcttgacttctgttcctataacacccagggtggtttgctttctctgtgccagtagtgggcatgtagagtttgtgtattgccaagtctgttgtgagcccttccacaagttttgtttagaggagaacgagcgccctctggaggaccagctggaaaattggtgttgtcgtcgttgcaaattctgtcacgtttgtggaaggcaacatcaggctacaaagcagctgctggagtgtaataagtgccgaaacagctatcaccctgagtgcctgggaccaaactaccccaccaaacccacaaagaagaagaaagtctggatctgtaccaagtgtgttcgctgtaagagctgtggatccacaactccaggcaaagggtgggatgcacagtggtctcatgatttctcactgtgtcatgattgcgccaagctctttgctaaaggaaacttctgccctctctgtgacaaatgttatgatgatgatgactatgagagtaagatgatgcaatgtggaaagtgtgatcgctgggtccattccaaatgtgagaatctttcagatgagatgtatgagattctatctaatctgccagaaagtgtggcctacacttgtgtgaactgtactgagcggcaccctgcagagtggcgactggcccttgaaaaagagctgcagatttctctgaagcaagttctgacagctttgttgaattctcggactaccagccatttgctacgctaccggcaggctgccaagcctccagacttaaatcccgagacagaggagagtataccttcccgcagctcccccgaaggacctgatccaccagttcttactgaggtcagcaaacaggatgatcagcagcctttagatctagaaggagtcaagaggaagatggaccaagggaattacacatctgtgttggagttcagtgatgatattgtgaagatcattcaagcagccattaattcagatggaggacagccagaaattaaaaaagccaacagcatggtcaagtccttcttcattcggcaaatggaacgtgtttttccatggttcagtgtcaaaaagtccaggttttgggagccaaataaagtatcaagcaacagtgggatgttaccaaacgcagtgcttccaccttcacttgaccataattatgctcagtggcaggagcgagaggaaaacagccacactgagcagcctcctttaatgaagaaaatcattccagctcccaaacccaaaggtcctggagaaccagactcaccaactcctctgcatcctcctacaccaccaattttgagtactgataggagtcgagaagacagtccagagctgaacccacccccaggcatagaagacaatagacagtgtgcgttatgtttgacttatggtgatgacagtgctaatgatgctggtcgtttactatatattggccaaaatgagtggacacatgtaaattgtgctttgtggtcagcggaag

SEQ ID NO: 28691 - DNA, 3046 bp, Homo Sapiens
gccagggctgccgtggcaaaatgagctgtcaactttaggttgacaggggtgtggccgcgaccgcaagggcttttgttgccgggtggacccaacagggatgggctgctggggacagctgctggtgtggttcggagccgcgggcgccattctctgctctagcccggggtcccaggagacttttctgcggtcctcgcccctgccgctggcaagtcccagcccccaggacccgaaagtcagcgccccgcctagtatcttggagccagcctccccgctgaattctccgggcaccgaggggtcttggctgttttctacctgcggggccagcggccggcatgggcccacacagacacaatgtgacggggcgtacgcggggaccagcgtggtggtgaccgtgggggccgccgggcagctgagaggcgtgcagctgtggcgcgtgccgggccctggccagtatctgatctcagcctacggagccgcgggcggcaaaggcgccaagaaccacctgtcgcgggcgcatggcgtcttcgtctcagcaatcttctccctcggtctcggggagtcgctgtacatcctggtggggcagcagggagaggacgcctgtcccggaggtagcccggagagccagctcgtctgcctcggggagtctcgagccgttgaagagcacgcggcgatggatgggagcgaaggggtcccggggtcgcggcgctgggcgggaggtggcgggggtggcgggggcgccacctacgttttccgggtgcgcgctggcgagctggaaccgttgctggtggcggccggaggcggcggtcgggcctacctgaggccgcgggaccgaggccggactcaggcctcccccgagaaactggagaaccgctcggaggcgcccgggagcggcgggagaggcggggcggcaggtggtgggggcggctggacgtcgcgggctccctctccgcaggccggccgctcactgcaggagggggcggagggcggccagggctgctccgaggcttgggcgacccttggctgggccgcggccggcggcttcgggggcggcggcggggcctgcactgcgggcggaggcggcggcggctacagggggggcgacgcttcagagactgacaacctctgggctgatggggaagatggagtatccttcatacaccccagcagcgagctcttcctgcagcctctggcagtcaccgagaaccacggagaggtagagatccgaaggcacctcaactgcagtcactgccctttgagagactgccaatggcaggcagagctccagctggctgaatgcctgtgcccagaaggcatggagctagctgtggataacgtcacctgcatggacctgcacaagcccccaggccctctggttctgatggtggctgtggtggcaacctcaacactgagcctccttatggtgtgtggggtcctgattctggtgaagcagaagaagtggcagggcctgcaggagatgaggctgccgagccctgagcttgagctgagcaagcttcgaacctctgccatcaggacagcccccaatccctattattgccaggtggggcttggcccggcccagtcctggcctctgccaccaggtgtcaccgaggtttccccagccaatgttactctgctcagagccctgggccatggtgcctttggggaggtgtatgagggactggtaattggccttcctggggactccagtcccctgcaggtagctatcaagaccctgccagaactctgctcgcctcaggatgagctggatttcctcatggaggccctcatcatcagcaagtttcgccatcagaacattgtgcggtgtgtggggctcagcctcagggccacccctcgcctcattctgctggaactgatgtctggaggggacatgaagagtttcctgaggcacagtcggccacacctgggccagccatcacctctggtcatgcgggacctgctgcaactggcccaggacatagcccagggctgccactacctggaggaaaatcacttcatccacagggatattgccgcccggaactgcctgctgagctgcgctggacccagccgagtggccaagattggggactttgggatggcacgagatatctaccgggccagttattaccgcaggggggaccgggccttgctcccagtcaagtggatgcccccagaggccttcctggagggcatcttcacatccaagacagattcctggtcttttggggtgctgctctgggagatcttctcactgggctacatgccctatcctgggcgcaccaaccaggaggtgctggacttcgtcgttggaggaggccggatggaccctcctaggggctgcccagggcctgtgtaccgcatcatgacccagtgttggcagcacgagcctgagctccgccctagctttgccagcatcttggagcgtctgcagtactgcactcaggacccggatgtgctgaattcactcctgccaatggagctggggcccaccccagaggaggaagggacttctgggctggggaacagatctttggagtgcctaagacccccacagccccaggaactgagtccagagaagttgaaaagctggggaggtagccctcttggcccctggctgtcctctggcctcaagcccctcaaatccaggggcctccaacctcagaacctttggaatcccacttatcgctcctgagccccaaggggccctgagggtaaggactgaggcactgagggtccctccctatactcctcaggctcctgggtggcctgttatgccagcggcctctgttccctgcagtctgtgctgtgtgtctgggcctgtctcggggctggcctggcagcgctgcacttgccatgctggaaaccagcccaggcctcccagggaagggcccagccacttccagcttttgatcttggggccagaggccgccttacacacaccccaggtgtccatggggagcactggattgctctcccattatgagcgtccttcatctgggcagaccccccaccctgcagatgcttctaataaaaagctcttctcatc

SEQ ID NO: 28692 - DNA, 3308 bp, Homo Sapiens
tttcggaagggctggtaacttgttgtgcggagcgaacggcggcggcggcggcaccatccaggcgggcaccatgggcacgtccgcgctctgggcgctctggctgctgctcgcgctgtgctgggcgccccgggagagcggcgccaccggaaccgggagaaaagccaaatgtgaaccctcccaattccagtgcacaaatggtcgctgtattacgctgttgtggaaatgtgatggggatgaagactgtgttgacggcagtgatgaaaagaactgtgtaaagaagacgtgtgctgaatctgacttcgtgtgcaacaatggccagtgtgttcccagccgatggaagtgtgatggagatcctgactgcgaagatggttcagatgaaagcccagaacagtgccatatgagaacatgccgcatacatgaaatcagctgtggcgcccattctactcagtgtatcccagtgtcctggagatgtgatggtgaaaatgattgtgacagtggagaagatgaagaaaactgtggcaatataacatgtagtcccgacgagttcacctgctccagtggccgctgcatctccaggaactttgtatgcaatggccaggatgactgcagcgatggcagtgatgagctggactgtgccccgccaacctgtggcgcccatgagttccagtgcagcacctcctcctgcatccccatcagctgggtatgcgacgatgatgcagactgctccgaccaatctgatgagtccctggagcagtgtggccgtcagccagtcatacacaccaagtgtccagccagcgaaatccagtgcggctctggcgagtgcatccataagaagtggcgatgtgatggggaccctgactgcaaggatggcagtgatgaggtcaactgtccctctcgaacttgccgacctgaccaatttgaatgtgaggatggcagctgcatccatggcagcaggcagtgtaatggtatccgagactgtgtcgatggttccgatgaagtcaactgcaaaaatgtcaatcagtgcttgggccctggaaaattcaagtgcagaagtggagaatgcatagatatcagcaaagtatgtaaccaggagcaggactgcagggactggagtgatgagcccctgaaagagtgtcatataaacgaatgcttggtaaataatggtggatgttctcatatctgcaaagacctagttataggctacgagtgtgactgtgcagctgggtttgaactgatagataggaaaacctgtggagatattgatgaatgccaaaatccaggaatctgcagtcaaatttgtatcaacttaaaaggcggttacaagtgtgaatgtagtcgtggctatcaaatggatcttgctactggcgtgtgcaaggcagtaggcaaagagccaagtctgatcttcactaatcgaagagacatcaggaagattggcttagagaggaaagaatatatccaactagttgaacagctaagaaacactgtggctctcgatgctgacattgctgcccagaaactattctgggccgatctaagccaaaaggctatcttcagtgcctcaattgatgacaaggttggtagacatgttaaaatgatcgacaatgtctataatcctgcagccattgctgttgattgggtgtacaagaccatctactggactgatgcggcttctaagactatttcagtagctaccctagatggaaccaagaggaagttcctgtttaactctgacttgcgagagcctgcctccatagctgtggacccactgtctggctttgtttactggtcagactggggtgaaccagctaaaatagaaaaagcaggaatgaatggattcgatagacgtccactggtgacagcggatatccagtggcctaacggaattacacttgaccttataaaaagtcgcctctattggcttgattctaagttgcacatgttatccagcgtggacttgaatggccaagatcgtaggatagtactaaagtctctggagttcctagctcatcctcttgcactaacaatatttgaggatcgtgtctactggatagatggggaaaatgaagcagtctatggtgccaataaattcactggatcagagctagccactctagtcaacaacctgaatgatgcccaagacatcattgtctatcatgaacttgtacagccatcaggtaaaaattggtgtgaagaagacatggagaatggaggatgtgaatacctatgcctgccagcaccacagattaatgatcactctccaaaatatacctgttcctgtcccagtgggtacaatgtagaggaaaatggccgagactgtcaaagtactgcaactactgtgacttacagtgagacaaaagatacgaacacaacagaaatttcagcaactagtggactagttcctggagggatcaatgtgaccacagcagtatcagaggtcagtgttcccccaaaagggacttctgccgcatgggccattcttcctctcttgctcttagtgatggcagcagtaggtggctacttgatgtggcggaattggcaacacaagaacatgaaaagcatgaactttgacaatcctgtgtacttgaaaaccactgaagaggacctctccatagacattggtagacacagtgcttctgttggacacacgtacccagcaatatcagttgtaagcacagatgatgatctagcttgacttctgtgacaaatgttgacctttgaggtctaaacaaataatacccccgtcggaatggaaccgagccagcagctgaagtctctttttcttcctctcggctggaagaacatcaagatacctttgcgtggatcaagcttgtgtacttgaccgtttttatattacttttgtaaatattcttgtccacattctacttcagctttggatgtggttaccgagtatctgtaacccttgaatttctagacagtattgccacctctggccaaatatgcactttccctagaaagccatattccagcagtgaaacttgtgctatagtgtataccacctgtacatacattgtataggccatctgtaaatatcccagagaacaatcactattcttaagcactttgaaaatatttctatgtaaattattgtaaactttttcaatggttgggacaatggcaataggacaaaacgggttactaagatgaaattgccaaaaaaatttataaactaattttgtacgtatgaatgatatctttgacctcaatggaggtttgcaaagactgagtgttcaaactactgtacattttttttcaagtgctaaaaaattaaaccaagcagcttaaccatg

SEQ ID NO: 28693 - DNA, 2291 bp, Homo Sapiens
gcaattaaagtcaagagctaaggagggagggagagggtttagaaataccagcataataagtagtatgactgggtgctctgtaaattaactcaattagacaaagcctgacttaacgggggaagatggtgagaagcgctaccctcattaaatttggttgttagaggcgcttctaaggaaattaagtctgttagttgtttgaatcacataaaattgtgtgtgcacgttcatgtacacatgtgcacacatgtaacctctgtgattcttgtgggtatttttttaagaagaaaggaatagaaagcaaagaaaaataaaaaatactgaaaagaaaagactgaaagagtagaagataaggagaaaagtacgacagagacaaggaaagtaagagagagagagagctctcccaattataaagccatgagccccctttggtgggggtttctgctcagttgcttgggctgcaaaatcctgccaggagcccagggtcagttcccccgagtctgcatgacggtggacagcctagtgaacaaggagtgctgcccacgcctgggtgcagagtcggccaatgtctgtggctctcagcaaggccgggggcagtgcacagaggtgcgagccgacacaaggccctggagtggtccctacatcctacgaaaccaggatgaccgtgagctgtggccaagaaaattcttccaccggacctgcaagtgcacaggaaactttgccggctataattgtggagactgcaagtttggctggaccggtcccaactgcgagcggaagaaaccaccagtgattcggcagaacatccattccttgagtcctcaggaaagagagcagttcttgggcgccttagatctcgcgaagaagagagtacaccccgactacgtgatcaccacacaacactggctgggcctgcttgggcccaatggaacccagccgcagtttgccaactgcagtgtttatgatttttttgtgtggctccattattattctgttagagatacattattaggaccaggacgcccctacagggccatagatttctcacatcaaggacctgcatttgttacctggcaccggtaccatttgttgtgtctggaaagagatctccagcgactcattggcaatgagtcttttgctttgccctactggaactttgccactgggaggaacgagtgtgatgtgtgtacagaccagctgtttggggcagcgagaccagacgatccgactctgattagtcggaactcaagattctccagctgggaaactgtctgtgatagcttggatgactacaaccacctggtcaccttgtgcaatggaacctatgaaggtttgctgagaagaaatcaaatgggaagaaacagcatgaaattgccaaccttaaaagacatacgagattgcctgtctctccagaagtttgacaatcctcccttcttccagaactctaccttcagtttcaggaatgctttggaagggtttgataaagcagatgggactctggattctcaagtgatgagccttcataatttggttcattccttcctgaacgggacaaacgctttgccacattcagccgccaatgatcccatttttgtggttcttcattcctttactgatgccatctttgatgagtggatgaaaagatttaatcctcctgcagatgcctggcctcaggagctggcccctattggtcacaatcggatgtacaacatggttcctttcttccctccagtgactaatgaagaactctttttaacctcagaccaacttggctacagctatgccatcgatctgccagtttcagttgaagaaactccaggttggcccacaactctcttagtagtcatgggaacactggtggctttggttggtctttttgtgctgttggcttttcttcaatatagaagacttcgaaaaggatatacacccctaatggagacacatttaagcagcaagagatacacagaagaagcctagggtgctcatgccttacctaagagaagaggctggccaagccacagttctgacgctgacaataaaggaactaatcctcactgttccttcttgagttgaagatctttgacataggttcttctatagtgatgatgatctcattcagaagatgcttagctgtagtttccgctttgcttgcttgtttaacaaacccaactaaagtgcttgaggctacctctaccttcaaataaagatagacctgacaatttgtgatatctaataataaccccccccccaatattgattaagcctcctccttttctgaaagcatttaaaaaaaa

SEQ ID NO: 28694 - DNA, 2421 bp, Homo Sapiens
catcagaatggaagtgaggaaaggcaaccagctgacacaggagccagagtgagaccagcagactctcacactcaacctacaccatgaatttgtgtctatcttctacgcgttaagagccaaggacaggtgaagttgccagagagcaatggctctcttcactccgtggaagttgtcctctcagaagctgggctttttcctggtgacttttggcttcatttggggtatgatgcttctgcactttaccatccagcagcgaactcagcctgaaagcagctccatgctgcgcgagcagatcctggacctcagcaaaaggtacatcaaggcactggcagaagaaaacaggaatgtggtggatgggccatacgctggagtcatgacagcttatgatctgaagaaaacccttgctgtgttattagataacattttgcagcgcattggcaagttggagtcgaaggtggacaatcttgttgtcaatggcaccggaacaaactcaaccaactccactacagctgttcccagcttggttgcacttgagaaaattaatgtggcagatatcattaacggagctcaagaaaaatgtgtattgcctcctatggacggctaccctcactgtgagggaaagatcaagtggatgaaagacatgtggcgttcagatccctgctacgcagactatggagtggatggatccacctgctctttttttatttacctcagtgaggttgaaaattggtgtcctcatttaccttggagagcaaaaaatccctacgaagaagctgatcataattcattggcggaaattcgtacagattttaatattctctacagtatgatgaaaaagcatgaagaattccggtggatgagactacggatccggcgaatggctgacgcatggatccaagcaatcaagtccctggcagaaaagcagaaccttgaaaagagaaagcggaagaaagtcctcgttcacctgggactcctgaccaaggaatctggatttaagattgcagagacagctttcagtggtggccctcttggtgaattagttcaatggagtgatttaattacatctctgtacttactgggccatgacattaggatttcagcttcactggctgagctcaaggaaatcatgaagaaggttgtaggaaaccgatctggctgcccaactgtaggagacagaattgttgagctcatttacattgatattgtaggacttgctcaattcaagaaaactcttggaccatcctgggttcattaccagtgcatgctccgagtccttgattcatttggtactgaacccgaatttaatcatgcaaattatgcccaatcgaaaggccacaagaccccttggggaaaatggaatctgaaccctcagcagttttataccatgttccctcataccccagacaacagctttctggggtttgtggttgagcagcacctgaactccagtgatatccaccacattaatgaaatcaaaaggcagaaccagtcccttgtgtatggcaaagtggatagcttctggaagaataagaagatctacttggacattattcacacatacatggaagtgcatgcaactgtttatggctccagcacaaagaatattcccagttacgtgaaaaaccatggtatcctcagtggacgggacctgcagttccttcttcgagaaaccaagttgtttgttggacttgggttcccttacgagggcccagctcccctggaagctatcgcaaatggatgtgcttttctgaatcccaagttcaacccacccaaaagcagcaaaaacacagactttttcattggcaagccaactctgagagagctgacatcccagcatccttacgctgaagttttcatcgggcggccacatgtgtggactgttgacctcaacaatcaggaggaagtagaggatgcagtgaaagcaattttaaatcagaagattgagccatacatgccatatgaatttacgtgcgaggggatgctacagagaatcaatgctttcattgaaaaacaggacttctgccatgggcaagtgatgtggccacccctcagcgccctacaggtcaagcttgctgagcccgggcagtcctgcaagcaggtgtgccaggagagccagctcatctgcgagccttctttcttccagcacctcaacaaggacaaggacatgctgaagtacaaggtgacctgccaaagctcagagctggccaaggacatcctggtgccctcctttgaccctaagaataagcactgtgtgtttcaaggtgacctcctgctcttcagctgtgcaggcgcccaccccaggcaccagagggtctgcccctgccgggacttcatcaagggccaggtggctctctgcaaagactgcctatagcagctacctgctcagccctgcaccatgctgctggggaagacagtggcccc

SEQ ID NO: 28695 - DNA, 3558 bp, Homo Sapiens
tcgaaggggcgtggccaagcgcaccgcctcggggcggggccggcgttctagcgcatcgcggccgggtgcgtcactcgcgaagtggaatttgcccagacaagcaacatggctcggaaacgcgcggccggcggggagccgcggggacgcgaactgcgcagccagaaatccaaggccaagagcaaggcccggcgtgaggaggaggaggaggatgcctttgaagatgagaaacccccaaagaagagccttctctccaaagtttcacaaggaaagaggaaaagaggctgcagtcatcctgggggttcagcagatggtccagcaaaaaagaaagtggccaaggtgactgttaaatctgaaaacctcaaggttataaaggatgaagccctcagcgatggggatgacctcagggactttccaagtgacctcaagaaggcacaccatctgaagagaggggctaccatgaatgaagacagcaatgaagaagaggaagaaagtgaaaatgattgggaagaggttgaagaacttagtgagcctgtgctgggtgacgtgagagaaagtacagccttctctcgatctcttctgcctgtgaagccagtggagatagagattgaaacgccagagcaggcgaagacaagagaaagaagtgaaaagataaaactggagtttgagacatatcttcggagggcgatgaaacgtttcaataaaggggtccatgaggacacacacaaggttcaccttctctgcctgctagcaaatggcttctatcgaaataacatctgcagccagccagatctgcatgctattggcctgtccatcatcccagcccgctttaccagagtgctgcctcgagatgtggacacctactacctctcaaacctggtgaagtggttcattggaacatttacagttaatgcagaactttcagccagtgaacaagataacctgcagactacattggaaaggagatttgctatttactctgctcgagatgatgaggaattggtccatatattcttactgattctccgggctctgcagctcttgacccggctggtattgtctctacagccaattcctctgaagtcagcaacagcaaagggaaagaaaccttccaaggaaagattgactgcggatccaggaggctcctcagaaacttccagccaagttctagaaaaccacaccaaaccaaagaccagcaaaggaaccaaacaagaggaaacctttgctaagggcacctgcaggccaagtgccaaagggaagaggaacaagggaggcagaaagaaacggagcaagccctcctccagcgaggaagatgagggcccaggagacaagcaggagaaggcaacccagcgacgtccgcatggccgggagcggcgggtggcctccagggtgtcttataaagaggagagtgggagtgatgaggctggcagcggctctgattttgagctctccagtggagaagcctctgatccctctgatgaggattccgaacctggccctccaaagcagaggaaagcccccgctcctcagaggacaaaggctgggtccaagagtgcctccaggacccatcgtgggagccatcgtaaggacccaagcttgccagtggcatcctcaagctcttcaagcagtaaaagaggcaagaaaatgtgcagcgatggtgagaaggcagaaaaaagaagcatagctggtatagaccagtggctagaggtgttctgtgagcaggaggaaaagtgggtatgtgtagactgtgtgcacggtgtggtgggccagcctctgacctgttacaagtacgccaccaagcccatgacctatgtggtgggcattgacagtgacggctgggtccgagatgtcacacagaggtacgacccagtctggatgacagtgacccgcaagtgccgggttgatgctgagtggtgggccgagaccttgagaccataccagagcccatttatggacagggagaagaaagaagacttggagtttcaggcaaaacacatggaccagcctttgcccactgccattggcttatataagaaccaccctctgtatgccctgaagcggcatctcctgaaatatgaggccatctatcccgagacagctgccatccttgggtattgtcgtggagaagcggtctactccagggattgtgtgcacactctgcattccagggacacgtggctgaagaaagcaagagtggtgaggcttggagaagtaccctacaagatggtgaaaggcttttctaaccgtgctcggaaagcccgacttgctgagccccagctgcgggaagaaaatgacctgggcctgtttggctactggcagacagaggagtatcagcccccagtggccgtggacgggaaggtgccccggaacgagtttgggaatgtgtacctcttcctgcccagcatgatgcctattggctgtgtccagctgaacctgcccaatctacaccgcgtggcccgcaagctggacatcgactgtgtccaggccatcactggctttgatttccatggcggctactcccatcccgtgactgatggatacatcgtctgcgaggaattcaaagacgtgctcctgactgcctgggaaaatgagcaggcagtcattgaaaggaaggagaaggagaaaaaggagaagcgggctctagggaactggaagttgctggccaaaggtctgctcatcagggagaggctgaagcgtcgctacgggcccaagagtgaggcagcagctccccacacagatgcaggaggtggactctcttctgatgaagaggaggggaccagctctcaagcagaagcggccaggatactggctgcctcctggcctcaaaaccgagaagatgaagaaaagcagaagctgaagggtgggcccaagaagaccaaaagggaaaagaaagcagcagcttcccacctgttcccatttgagaagctgtgagctgagcgcccactagaggggcacccaccagttgctgctgccccactacaggccccacacctgccctgggcatgcccagcccctggtggtggggggttctctgctgagaaggcaaactgaggcagcatgcacggaggcggggtcaggggagacgaggccaagctgaggaggtgctgcaggtcccgtctggctccagcccttgtcagattcacccagggtgaagccttcaaagctttttgctaccaaagcccactcaccctttgagctacagaacactttgctaggagatactcttctgcctcctagacctgttctttccatctttagaaacatcagtttttgtatggaagccaccgggagatttctggatggtggtgcatccgtgaatgcgctgatcgtttcttccagttagagtcttcatctgtccgacaagttcactcgcctcggttgcggacctaggaccatttctctgcaggccacttaccttcccctgagtcaggcttactaatgctgccctcactgcctctttgcagtaggggagagagcagagaagtacaggtcatctgctgggatctagttttccaagtaacattttgtggtgacagaagcctaaaaaaagctaaaatcaga

SEQ ID NO: 28696 - DNA, 4070 bp, Homo Sapiens
gaattcccttttctgggcaccgccttctgctagggggttgtagatgaaagtgcctgctcccagagaagcttgtctaacctagcacagtttctaagctacccaggctgccagaccgagcgaccgtgctgccatggacacagactctcagcgttctcatctctcttccttcaccatgaagctgatggacaaattccactcacccaaaatcaagagaacgccatcaaagaagggaaaaccagctgaggtgtccgtaaagattccagagaagcctgtgaacaaagaggcaacagacagatttctaccagagggctaccctctccccttggatctggagcagcaggcagtagaatttatgtccaccagtgctgtggcttccaggtctcaaaggcagaagaacctgagctggctggaggagaaagagaaggaagttgtcagtgccctgcgctactttaagaccattgtggacaaaatggcaattgataagaaggtactggagatgcttccagggtcagccagcaaggtgctggaggccatcttacccctggtgcagaacgatcctcgaattcagcacagctcagccctctcttcctgctatagccgagtgtaccaaagcctcgccaacctcattcgctggtctgaccaagtgatgctggaaggcgtgaactcagaagacaaggagatggtgacgactgtgaagggggtcatcaaggctgtgctggatggagtgaaggagctggtcaggctcaccatcgagaagcagggacgtccgtctccgacgagccccgtgaagcccagttcccctgccagcaagcctgatggcccagcagagctccccctgacagaccgcgaggtagagatcctaaacaagacgactgggatgtcacagtcaactgagctcctcccagatgccacggatgaagaggtcgcgccccccaagcctcctctgcctggcattcgggtggttgataatagtcctccaccagcattgacacccaagaaaagacagtcggcgccgtcccctacccgagtggctgtggtggcccccatgagccgagccaccagtggctccagtttgcctgttggaatcaataggcaggattttgatgttgactgttacgcacagaggcgactgtcaggaggcagccactcatatggtggagagtcgccccgcctctccccctgcagcagcatagacaagctcagcaagtcagacgagcagctgtcctctctggacagggacagtgggcagtgctcccggaacacaagctgtgaaacactagaccactatgatcccgactatgaattcctccagcaagacctctctaacgcagaccagatacctcagcagacggcctggaaccttagcccgttgccagagtctttgggggagtctgggtctccatttcttggccctcctttccagctgcctcttggcggccatccccagccagacggacctctggccccagggcagcagacagatacgccacctgctctccccgagaagaagcgcaggagcgcagcctcccagacggcggacggctctggctgcagggtgtcctacgagcggcatccctcgcagtatgacaacatctctggggaggacctgcagagcacagccccgatcccatccgtcccctacgcgccctttgctgctattctgccctttcagcatggaggttcctcagcccctgtcgaatttgtgggtgattttactgctcctgagtcaaccggtgacccagaaaaaccacctcctctaccagagaagaaaaacaaacacatgctggcctacatgcagttgctggaggactactcggagccgcagccctctatgttctaccagacgccacagaacgagcacatctaccagcagaagaacaagctcctcatggaggtatacggcttcagcgactccttcagtggggtggactccgtgcaggagctggccccgccgcccgccctaccccccaagcagcggcagctggagccaccggctgggaaagacggacatcccagagatccctcagcggtcagcggcgtccctgggaaggacagcagagacggcagtgagagggccccaaagtcaccagatgctctggagtcggctcagtcggaggaggaagtggacgagctgtccctcattgaccacaacgaaattatgtccaggctgacgctcaagcaggagggtgatgacgggccggacgtccgcggaggatctggggacatcttactggtccatgctactgagactgacaggaaagatttggtgttgtactgcgaggcattcctgaccacctacaggaccttcatctccccagaggagctcatcaagaagctgcagtacagatatgagaaattctctccctttgccgacacattcaagaagcgcgtcagcaagaacacgttcttcgtgctggtacgggtggtggatgagctctgcctggtggagttgacagaagagatcctgaagctgctgatggaactggtcttccgcctggtgtgcaatggggagctgagcctggcccgtgtgctccggaagaacatcctggacaaggtggaccagaagaagctactcaggtgtgccacctccagccagcccctggcagcccggggggtagcagccaggccggggaccttgcacgactttcacagccatgagatagcggagcagctaacgctgctggatgctgagctcttctataaaatagagattcctgaggttttgctttgggcaaaagagcagaatgaggagaagagccccaacttgacccagttcacggagcacttcaacaacatgtcctactgggtccggtccataatcatgttacaggaaaaggcccaggacagggaacggctgctcttgaagttcatcaagatcatgaagcacttgcggaagctgaataacttcaactcctacttggccatcctctctgccctggactcggcgcccatccgcaggctggagtggcagaagcagacttcagagggcctggccgagtactgcacactgatcgacagctcgtcctccttccgagcctaccgggccgccctctcggaggtggaaccgccgtgcatcccgtacctggggctgatcctgcaggacctgaccttcgttcacctgggaaacccagactacatcgacgggaaagtgaacttctccaagcggtggcagcagttcaacatcctcgacagcatgcgctgcttccagcaggcgcactatgacatgcggaggaacgacgacattataaacttcttcaatgacttcagtgaccacctggctgaggaggccctatgggaactgtctctgaaaattaaacccaggaacataacaaggagaaaaacagaccgggaagagaagacctaggagcagacgccgggatccaggagaatgctcgaggggcgcagagggcagctcccagaccggagaggaccttggacctgttaggcgcatggcaggagtcccggcctcggagccatgaggctggccagccctcagcggggccgggcgggagctggagcctgccagccgcttcctgcctccttcctctgtgggagcagacccgtgggcctcagggcagccagcaggcaggtcttgttgccaatttacaaaccggtggttttctggtttggttttgttttctgcttttacttccatctctcccctcttgaccttccacccactcccctccagggagagagcagcagagacctcatcagcagaccaaggaagtggtgggtgctccccctccctaagctccagggtccctgaatcttctgaaatctcaaatgagtggaggcctcctggggtggcctgtcctgcaggggccctggaatgggggcaagcagctgggtgggcagaatgcagagtagactcgggggaggatcctttcactttccgcttccccttctgatgcatggaggatggtgtgagcttttcagcaggcccggaaaggtacgcaggtgacgccttagcagccccgcagctggtgctctgccccgcggtactggcgccatcagggcctcccttgcccgcctgagagcagcagcagtctctgtcatcccgtcgcccc

SEQ ID NO: 28697 - DNA, 3661 bp, Homo Sapiens
cgcggagagatgccgcgggggccgctcgcagccgccgctgacttgtgaatgggaccgggactggggccgggactgacaccgcagcgcttgccctgcgccagggactggcggctcggaggttgcgtccaccctcaagggccccagaaatcactgtgttttcagctcagcggccctgtgacattccttcgtgttgtcatttgttgagtgaccaatcagatgggtggagtgtgttacagaaattggcagcaagtatccaatgggtgaagaagaagctaactggggacgtgggcagccctgacgtgatgagctcaaccagcagagacattccatcccaagagaggtctgcgtgacgcgtccgggaggccaccctcagcaagaccaccgtacagttggtggaaggggtgacagctgcattctcctgtgcctaccacgtaaccaaaaatgaaggagaactactgtttacaagccgccctggtgtgcctgggcatgctgtgccacagccatgcctttgccccagagcggcgggggcacctgcggccctccttccatgggcaccatgagaagggcaaggaggggcaggtgctacagcgctccaagcgtggctgggtctggaaccagttcttcgtgatagaggagtacaccgggcctgaccccgtgcttgtgggcaggcttcattcagatattgactctggtgatgggaacattaaatacattctctcaggggaaggagctggaaccatttttgtgattgatgacaaatcagggaacattcatgccaccaagacgttggatcgagaagagagagcccagtacacgttgatggctcaggcggtggacagggacaccaatcggccactggagccaccgtcggaattcattgtcaaggtccaggacattaatgacaaccctccggagttcctgcacgagacctatcatgccaacgtgcctgagaggtccaatgtgggaacgtcagtaatccaggtgacagcttcagatgcagatgaccccacttatggaaatagcgccaagttagtgtacagtatcctcgaaggacaaccctatttttcggtggaagcacagacaggtatcatcagaacagccctacccaacatggacagggaggccaaggaggagtaccacgtggtgatccaggccaaggacatgggtggacatatgggcggactctcagggacaaccaaagtgacgatcacactgaccgatgtcaatgacaacccaccaaagtttccgcagagcgtataccagatatctgtgtcagaagcagccgtccctggggaggaagtaggaagagtgaaagctaaagatccagacattggagaaaatggcttagtcacatacaatattgttgatggagatggtatggaatcgtttgaaatcacaacggactatgaaacacaggagggggtgataaagctgaaaaagcctgtagattttgaaaccaaaagagcctatagcttgaaggtagaggcagccaacgtgcacatcgacccgaagtttatcagcaatggccctttcaaggacactgtgaccgtcaagatcgcagtagaagatgctgatgagccccctatgttcttggccccaagttacatccacgaagtccaagaaaatgcagctgctggcaccgtggttgggagagtgcatgccaaagaccctgatgctgccaacagcccgataaggtattccatcgatcgtcacactgacctcgacagatttttcactattaatccagaggatggttttattaaaactacaaaacctctggatagagaggaaacagcctggctcaacatcactgtctttgcagcagaaatccacaatcggcatcaggaagccaaagtcccagtggccattagggtccttgatgtcaacgataatgctcccaagtttgctgccccttatgaaggtttcatctgtgagagtgatcagaccaagccactttccaaccagccaattgttacaattagtgcagatgacaaggatgacacggccaatggaccaagatttatcttcagcctaccccctgaaatcattcacaatccaaatttcacagtcagagacaaccgagataacacagcaggcgtgtacgcccggcgtggagggttcagtcggcagaagcaggacttgtaccttctgcccatagtgatcagcgatggcggcatcccgcccatgagtagcaccaacaccctcaccatcaaagtctgcgggtgcgacgtgaacggggcactgctctcctgcaacgcagaggcctacattctgaacgccggcctgagcacaggcgccctgatcgccatcctcgcctgcatcgtcattctcctggtcattgtagtattgtttgtgaccctgagaaggcaaaagaaagaaccactcattgtctttgaggaagaagatgtccgtgagaacatcattacttatgatgatgaagggggtggggaagaagacacagaagcctttgatattgccaccctccagaatcctgatggtatcaatggatttatcccccgcaaagacatcaaacctgagtatcagtacatgcctagacctgggctccggccagcgcccaacagcgtggatgtcgatgacttcatcaacacgagaatacaggaggcagacaatgaccccacggctcctccttatgactccattcaaatctacggttatgaaggcaggggctcagtggccgggtccctgagctccctagagtcggccaccacagattcagacttggactatgattatctacagaactggggacctcgttttaagaaactagcagatttgtatggttccaaagacacttttgatgacgattcttaacaataacgatacaaatttggccttaagaactgtgtctggcgttctcaagaatctagaagatgtgtaaacaggtatttttttaaatcaaggaaaggctcatttaaaacaggcaaagttttacagagaggatacatttaataaaactgcgaggacatcaaagtggtaaatactgtgaaataccttttctcacaaaaaggcaaatattgaagttgtttatcaacttcgctagaaaaaaaaaacacttggcatacaaaatatttaagtgaaggagaagtctaacgctgaactgacaatgaagggaaattgtttatgtgttatgaacatccaagtctttcttcttttttaagttgtcaaagaagcttccacaaaattagaaaggacaacagttctgagctgtaatttcgccttaaactctggacactctatatgtagtgcatttttaaacttgaaatatataatattcagccagcttaaacccatacaatgtatgtacaatacaatgtacaattatgtctcttgagcatcaatcttgttactgctgattcttgtaaatctttttgcttctactttcatcttaaactaatacgtgccagatataactgtcttgtttcagtgagagacgccctatttctatgtcatttttaatgtatctatttgtacaattttaaagttcttattttagtatacatataaatatcagtattctgacatgtaagaaaatgttacggcatcacacttatattttatgaacattgtactgttgctttaatatgagcttcaatataagaagcaatctttgaaataaaaaaagatttttttttaaaaaaaa

SEQ ID NO: 28698 - DNA, 6378 bp, Homo Sapiens
atggtactatctcctgagtgctgcaagttgtaacgggcaccgctgagcctgtttccctttggagcacttcttatctagaagcagtgtttagtttcttccaaactgggccacttcgtccacctactctgttctgagtaaggaaacagcctccaagcatcagcagagcccagatgagcacgggccgcggagccgcttagcagtctcccgggacccagctccggaggagccgcaagcatgcaccctgggttgtggctgctcctggttacgttgtgcctgaccgaggaactggcagcagcgggagagaagtcttatggaaagccatgtgggggccaggactgcagtgggagctgtcagtgttttcctgagaaaggagcgagaggacgacctggaccaattggaattcaaggcccaacaggtcctcaaggattcactggctctactggtttatcgggattgaaaggagaaaggggtttcccaggccttctgggaccttatggaccaaaaggagataagggtcccatgggagttcctggctttcttggcatcaatgggattccgggccaccctggacaaccaggccccagaggcccacctggtctggatggctgtaatggaactcaaggagctgttggatttccaggccctgatggctatcctgggcttctcggaccacccgggcttcctggtcagaaaggatcaaaaggtgaccctgtccttgctccaggtagtttcaaaggaatgaagggggatcctgggctgcctggactggatggaatcactggcccacaaggagcacccggatttcctggagctgtaggacctgcaggaccaccaggattacaaggtcctccagggcctcctggtcctcttggtcctgatgggaatatggggctaggttttcaaggagagaaaggagtcaagggggatgttggcctccctggcccagcaggacctccaccatctactggagagctggaattcatgggattccccaaagggaagaaaggatccaagggtgaaccagggcctaagggttttccaggcataagtggccctccaggcttcccgggccttggaactactggagaaaagggagaaaagggagaaaagggaatccctggtttgccaggacctaggggtcccatgggttcagaaggagtccaaggccctccagggcaacagggcaagaaagggaccctgggatttcctgggcttaatggattccaaggaattgagggtcaaaagggtgacattggcctgccaggcccagatgttttcatcgatatagatggtgctgtgatctcaggtaatcctggagatcctggtgtacctggcctcccaggccttaaaggagatgaaggcatccaaggcctacgtggcccttctggtgtccctggattgccagcattatcaggtgtcccaggagccctagggcctcagggatttccagggctgaagggggaccaaggaaacccaggccgtaccacaattggagcagctggcctccctggcagagatggtttgccaggcccaccaggtccaccaggcccacctagtccagaatttgagactgaaactctacacaacaaagagtcagggttccctggtctccgaggagaacaaggtccaaaaggaaacctaggcctcaaaggaataaaaggagactcaggtttctgtgcttgtgacggtggtgttcccaacactggaccacccggggaaccaggcccacctggtccatggggtctcataggccttccaggccttaaaggagccagaggagatcgaggctctgggggtgcacagggcccagcaggggctccaggcttagttgggcctctgggtccttcaggacccaaaggaaagaagggggaaccaattctcagtacaatccaaggaatgccaggagatcggggtgattctggctcccagggcttccgtggtgtaataggagaaccaggcaaggacggagtaccaggtttaccaggtctgccaggccttccgggtgatggtggacagggcttcccaggtgaaaaggggttacctggacttcctggtgaaaaaggccatcctggtccacctggcctcccaggaaatgggttaccaggacttcctggaccccgtgggcttcctggagataaaggcaaggatggattaccgggacaacaaggccttcccggatctaagggaatcaccctgccctgtattattcctgggtcatacggtccatcaggatttccaggcactcccggattcccaggccctaaagggtctcgaggcctccctgggaccccaggccagcctgggtcaagtggaagtaaaggagagccagggagtccaggattggttcatcttcctgaattaccaggatttcctggacctcgtggggagaagggcttgcctgggtttcctgggctccctggaaaagatggcttgcctgggatgattggcagtccaggcttacctggttccaagggagccactggtgacatctttggtgctgaaaatggtgctccgggggaacaaggcctacaaggattaacagggcacaaaggatttcttggagactctggccttccaggactcaagggtgtgcacgggaagcctggcttactaggccccaaaggtgagcggggcagccctgggacaccaggacaggtgggacagccaggcaccccaggatctagtggtccatatggcatcaagggcaaatctgggctcccaggagcaccaggcttcccaggcatctcaggacatcctggaaagaaaggaacaagaggcaagaaaggtcctcctggatcaattgtaaagaaagggctgccagggctaaaaggccttcctggaaatccaggcctagtaggactgaaaggaagcccaggctctccaggggtcgctgggttgccagccctctctggacccaagggagagaaggggtctgttggattcgtaggttttccaggaataccaggtctgcctggtatttctggaacaagaggattaaaaggaattccaggatcaactggaaaaatgggaccatctggacgcgctggtactcctggtgaaaagggagacagaggcaatccggggccagtcggaatacctagtccaagacgtccaatgtcaaacctttggctcaaaggagacaaaggctctcaaggctcagccggatccaatggatttcctgggccaagaggtgacaaaggagaggctggtcgacctggaccaccaggcctacctggagctcctggcctcccaggcattatcaaaggagttagtggaaagccagggccccctggcttcatgggaatccggggtttacctggcctgaaggggtcctctgggatcacaggtttcccaggaatgccaggagaaagtggttcacaaggtatcagagggtcgcctggactcccaggagcatctggtctcccaggcctgaaaggagacaacggccagacagttgaaatttccggtagcccaggacccaagggacagcctggcgaatctggttttaaaggcacaaaaggaagagatggactaataggcaatataggcttccctggaaacaaaggtgaagatggaaaagttggtgtttctggagatgttggccttcctggagctccaggatttccaggagttgccggcatgagaggagaaccaggacttccaggttcttctggtcaccaaggggcaattgggcctctaggatcccccggattaataggacccaaaggcttccctggatttcctggtttacatggactgaatgggcttccgggcaccaagggtacccatggcactccaggacctagtatcaccggtgtgcctgggcctgctggtctccctggacccaaaggagaaaaaggatatccaggaattggcatcggagctccagggaagccgggcctgagagggcaaaaaggtgatcgaggtttcccaggtctccagggccctgctggtctccccggtgccccaggcatctccttgccctcactcatagcaggacagcctggtgaccccgggcgaccaggcctagatggagaacgaggccgcccaggccccgctggacccccaggtccccctgggccatcctcgaatcaaggcgacaccggagaccctggcttccctggaattccaggtttttctggcctccctggagagctaggactgaaaggcatgagaggtgagcctggcttcatggggactccaggcaaggttgggccacctggagacccaggatttcccggaatgaaggggaaggcaggggcaagaggctcttctggcctccaaggtgatcctggacaaacaccaactgcagaagctgtccaggttcctcctggacccttgggtctaccagggatcgatggcatccctggcctcactggggaccctggggctcaaggccctgtaggcctacaaggctccaaaggtttacctggcatccccggtaaagatggccccagtgggctcccaggcccacctggggctcttggtgatcctggtctgcctggactgcaaggccctccaggatttgaaggagctccagggcagcaaggccccttcgggatgcctggaatgcctggccagagcatgagagtgggctacacgttggtaaagcacagccagtcggaacaggtgcccccgtgtcccatcgggatgagccagctgtgggtggggtacagcttactgtttgtggaggggcaagagaaagcccacaaccaggacctgggctttgctggctcctgtctgccccgcttcagcaccatgcccttcatctactgcaacatcaacgaggtgtgccactatgccaggcgcaatgataaatcttactggctctccactaccgcccctatccccatgatgcccgtcagccagacccagattccccagtacatcagccgctgctctgtgtgtgaggcaccctcgcaagccattgctgtgcacagccaggacatcaccatcccgcagtgccccctgggctggcgcagcctctggattgggtactctttcctcatgcacactgccgctggtgccgagggtggaggccagtccctggtctcacctggctcctgcctagaggactttcgggccactcctttcatcgaatgcagtggtgcccgaggcacctgccactactttgcaaacaagtacagtttctggttgaccacagtggaggagaggcagcagtttggggagttgcctgtgtctgaaacgctgaaagctgggcagctccacactcgagtcagtcgctgccaggtgtgtatgaaaagcctgtagggtggcacctgccactctgccccttgccctcccctgcccctcacaacagtcacctcacaaacctgaatggtctgaagaaggaaggcctgagcccctttgcctgtcaagttgtacattggagtctcatttgggctagactaccggacactcgtcaccccagccctcgggtccatagagatgagcccaccctgctgagatctgctgtcctgtttctgtcaagctggtgctactgtttgatttggatgattgtgtgactattcatggctacctcagaaagatttgatgggccacaactgtcttagactgctagctttctccttaccgtcttgatcggaaagctcttccgaatcgctaatcagtcatttcttcatgtacagaggtcagcacacattatttggcttaaaccagaacccagtgtttccacacttaaattctctaaccgaatattcatggatggctcaagtctgcacagagcaagtcctcactcttcaaggaggcccactgtgtctaggcaggcaagagaattgaaatgaggtgccacccagtagcccagagtgagctttagctctagaatgagcaagactgggccccacatggcttagagaggcttgaaggccagcagctgggttgggggtggtggtcattaatggcatatggtcctagacaaaccatctcctccttgccggctccccctccagccagagacagaggatgtggcctggttcaaagtaaagcagaggatgcaacaaatgtggccaagctatcaaaggaaatgagaatgacagccttttttcctgggccagaagtagagggggtgggtgcgtaggatgtgtgagttttgcttttgactccaggaacaaaaaggtaaatcccacatcccagtttctcagaagtccctgtttattccaattgccatcagatgtgtgcaatgtggcaaactgaagctgcacagtgttggtttccttgtattctgaggatgttaaagactttgttaaatggttatccaattgctctttcacaggtagcctattaaactattttaatatgtttttttaaacctcataaaaatctagcacactcttctcttgagcagttagcagaccaccg

SEQ ID NO: 28699 - DNA, 1411 bp, Homo Sapiens
cgggaaacggcaaacagcgagatatccgagcgagagtcccgccctgcatcagtttgcggaaccgccttggtagaaggagagaaggggagtggaggaagcacgggactggagggaccaaagttccccgatggcggcccaggggtgcgcggcatcgcggctgctccagctgctgctgcagcttctgcttctactgttgctgctggcggcgggcggggcgcgcgcgcggtggcgcgcggagggcaccagcgcacacttgcgggacatcttcctgggccgctgcgccgagtaccgcgcactgctgagtcccgagcagcggaacaagaactgcacagccatctgggaagcctttaaagtggcgctggacaaggatccctgctccgtgctgccctcagactatgacctttttattaacttgtccaggcactctattcccagagataagtccctgttctgggaaaatagccacctccttgttaacagctttgcagacaacacccgtcgttttatgcccctgagcgatgttctgtatggcagggttgcagatttcttgagctggtgtcgacagaaaaatgactctggactcgattaccaatcctgccctacatcagaagactgtgaaaataatcctgtggattccttttggaaaagggcatccatccagtattccaaggatagttctggggtgatccacgtcatgctgaatggttcagagccaacaggagcctatcccatcaaaggtttttttgcagattatgaaattccaaacctccagaaggaaaaaattacacgaatcgagatctgggttatgcatgaaattgggggacccaatgtggaatcctgcggggaaggcagcatgaaagtcctggaaaagaggctgaaggacatggggttccagtacagctgtattaatgattaccgaccagtgaagctcttacagtgcgtggaccacagcacccatcctgactgtgccttaaagtcggcagcagccgctactcaaagaaaagccccaagtctttatacagaacaaagggcgggtcttatcattcccctctttctggtgctggcttcccggactcaactgtaactggaaactgtgttgctctaaccctcctccagccctgcagcctccccttgcagtcatcattcgtgttctgtgtataccaaatgattctgttatctaaagaagctttttgctgggaaaacgatgtcctgaaaatggtatttcaatgaggcatatgttcaggatttcagaaacaagaagttagttctatttagcaggttaaaaaatgctgcattagaattaaagcaagttattttcttatttgtataatgacacaaagcattgggagtcagactgcttgtatattatcaaacattttaagagaattctaataaagctgtattttacatc

SEQ ID NO: 28700 - DNA, 2967 bp, Homo Sapiens
acgagagggcgcagcgcggcgcggcagggattcgcgggcgaccacccggcgcaggagcggccgcgtttcggcctcagaatccattgaagacttgaacaagtgggccctatttcttgtgtctccttttatacttgaagcagaacacatagcatttgtgacggagagcatttgggtacaaagtgagaatttacagagatcatcctcttcagaaacagttcggtttttgcccactagggatgatgtggtttctcatgaggttacttgctctaaaggactttatattttggaaccataagagcacccttgtggcccaggcactttatggatgatcccttttagtgctcccagtaaccttccaagattgtcaagtggtcagactgttgtttgccattagcttgcagacctggggatccttatcggctaattgctgaagcaagtgtggacaacttcagcaagctgggggtggcgttcatggaagatagactccacatggataatggactggtaccccaaaagattgtgtcggtgcacttgcaggactccactctgaaggaagttaaggatcaggtctcaaacaagcaagcccagatcctagagccgaagcctgaaccttctcttgagattaagcctgagcaggacggtatggagcatgttggcagagatgacccaaaggctcttggtgaagaacccaaacaaaggagaggcagtgcctctgggagtgagcctgctggggacagtgacaggggagggggccccgttgagcattatcacctccatctgtctagttgccacgagtgtctggaacttgagaacagcaccattgagtcagtcaagtttgcgtctgccgagaacattccagaccttccctacgattatagcagcagtttggagagtgttgctgatgagacctcccccgaaagagaagggaggagagtcaacctcacgggaaaggcacccaacatcctcctctatgtgggctccgactcccaggaagccctcggccggttccacgaggtccggtctgtgctggccgactgtgtggacattgacagttatattctctaccacctgctggaggacagtgctctcagagacccgtggacggacaactgtctgctgttggtcattgctaccagggagtccattcccgaagacctgtaccagaagttcatggcctatctttctcagggagggaaggtgttgggcctgtcttcatccttcacctttggtggctttcaggtgacaagcaagggtgcactgcacaagacagtccagaacttggttttctccaaggctgaccagagcgaggtgaagctcagcgtcttgagcagtggctgcaggtaccaggaaggccccgtccggctcagccccggcaggctccagggccacctggagaatgaggacaaggacaggatgattgtgcatgtgccttttggaactcgcgggggagaagctgttctttgccaggtgcacttagaactacctcccagctccaacatagtgcaaactccagaagattttaacttgctcaagtcaagcaattttagaagatacgaagtccttagagagattctgacaacccttggcctcagctgtgacatgaaacaagttcctgccttaactcctctttacttgctgtcagctgcggaggaaatcagggatcctcttatgcagtggcttgggaaacatgtggactccgagggagaaataaaatccggccagctctctcttagatttgtttcatcctacgtgtctgaagtagaaataaccccatcttgtatacctgtggtgaccaacatggaggccttctcatcagaacatttcaacttagagatctatcgccaaaatctgcagaccaagcagttggggaaagtaattttgtttgccgaagtgacccccacaacgatgcgtctcctggatgggctgatgtttcagacaccgcaggaaatgggcttaatagtgatcgcggcccggcagaccgagggcaaaggacggggagggaatgtgtggctgagccctgtgggatgtgctctttctactctgctcatctccattccactgagatcccagctgggacagaggatcccgtttgtccagcatctgatgtccgtggctgtcgtggaagcagtgaggtccattcccgagtatcaggatatcaacttacgagtgaagtggcccaacgatatttattacagtgacctcatgaagatcggcggagttctggttaactcaacactcatgggagaaacattttatatacttattggctgtggatttaatgtgactaacagtaaccctaccatctgcatcaacgacctcatcacagaatacaataaacaacacaaggcagaactgaagcccttaagagccgattatctcatcgccagagtcgtgactgtgctggagaaactgatcaaagagtttcaggacaaagggcccaacagcgtccttcccctttattaccgatactgggtccacagtggtcagcaagtccatctgggcagcgcagagggaccaaaggtgtccatcgttggcctggacgattctggcttcctccaggttcaccaggagggcggcgaggttgtgactgtgcacccggacggcaactccttcgacatgctgagaaacctcatcctccccaaacggcggtaatgccgggcgtccccgagacgcggctgcctgtccgtgcccatgcatctggaaatctaatttagagttgtaggtgaattttcttttcctccaattcatttgttaagtctttgttctttttctgtgtttctgtttgtttttaggtttgttttgttgtcgttttctttggtgtttgaagaggctctgggatagatggttaagaagtagaaaatttagtttagggaaagccctcccacaggtgggaaattgctctcccctctgtggcttggacttacgtttattgtcaaggggagtttttacatggaaatgacaatggga

SEQ ID NO: 28701 - DNA, 1219 bp, Homo Sapiens
ggctactctcggcttcctggcaacgccgagcgaaagctatgactgcggccgcgggttcggcgggccgcgccgcggtgcccttgctgctgtgtgcgctgctggcgcccggcggcgcgtacgtgctcgacgactccgacgggctgggccgggagttcgacggcatcggcgcggtcagcggcggcggggcaacctcccgacttctagtaaattacccagagccctatcgttctcagatattggattatctctttaagccgaattttggtgcctctttgcatattttaaaagtggaaataggtggtgatgggcagacaacagacggcactgagccctcccacatgcattatgcactagatgagaattatttccgaggatacgagtggtggttgatgaaagaagctaagaagaggaatcccaatattacactcattgggttgccatggtcattccctggatggctgggaaaaggtttcgactggccttatgtcaatcttcagctgactgcctattatgtcgtgacctggattgtgggcgccaagcgttaccatgatttggacattgattatattggaatttggaatgagaggtcatataatgccaattatattaagatattaagaaaaatgctgaattatcaaggtctccagcgagtgaaaatcatagcaagtgataatctctgggagtccatctctgcatccatgctccttgatgccgaactcttcaaggtggttgatgttataggggctcattatcctggaacccattcagcaaaagatgcaaagttgactgggaagaagctttggtcttctgaagactttagcactttaaatagtgacatgggtgcaggctgctggggtcgcattttaaatcagaattatatcaatggctatatgacttccacaatcgcatggaatttagtggctagttactatgaacagttgccttatgggagatgcgggttgatgacggcccaagagccatggagtgggcactacgtggtagaatctcctgtctgggtatcagctcataccactcagtttactcaacctggctggtattacctgaagacagttggccatttagagaaaggaggaagctacgtagctctgactgatggcttagggaacctcaccatcatcattgaaaccatggtaaacttttgttgttgctattggattaactcacttctttactattggaaaaataaaatataaaactg

SEQ ID NO: 28702 - DNA, 3588 bp, Homo Sapiens
ccgcgctcggcgccctgctcgccgggcagaggggaaggcggccggctggggatgggcggcccggctgcgccgaggggcgccgggaggctccgcgcgctgctgctggcgctggtggtcgcggggatccccgcgggcgcctacaacctcgacccgcagcgccccgtgcacttccagggccccgctgactcgttcttcggctacgcagttctggagcatttccacgacaacacgcgctgggtccttgtgggcgcaccaaaggcagattccaaatacagcccttcagtgaagtctcctggggctgtgtttaagtgccgtgttcacaccaaccctgaccggagatgcaccgaactggacatggctcgagggaagaatcggggcacgtcctgcggaaagacctgccgggaagaccgcgatgatgagtggatgggggtgagcctggcccgacagcccaaggctgatggccgtgtgttggcctgtgctcatcgctggaagaacatctactatgaagccgaccacatcctaccccatggcttctgctacatcatcccctccaacctccaggccaaaggcaggacactgatcccttgctatgaagagtataagaagaagtacggagaggaacacggctcctgccaggctgggatagcgggcttcttcactgaggagctggtggtgatgggtgctccagggtcattttattgggctggaaccatcaaagtgctgaaccttacggacaacacctatttaaaactgaacgacgaagtgatcatgaacaggcggtacacctacctgggctacgcagtgaccgctggccacttctctcacccgtccaccattgatgtggtaggaggtgccccacaggacaaaggcatcggcaaggtttatattttcagagctgaccgaagatcaggcaccttaattaagatctttcaagcatcaggtaaaaagatgggctcttacttcggctcctccttgtgcgcagttgacctgaatggggacggcctctctgacctgctggtgggggcccccatgttttctgagatcagggatgagggacaggtcactgtctacatcaacagaggaaatggagccctcgaggagcagctggctctgactggggatggtgcctacaatgcgcactttggagagagcattgccagcctggacgatctggacaatgatgggttcccagatgtggccattggtgcacccaaggaggatgacttcgcaggggcggtctatatctatcatggtgatgccggtgggatagtccctcagtactcaatgaaactgtctgggcagaagataaatccagtgctccggatgtttggtcagtccatatcgggaggcattgatatggatggaaatggctatcctgatgtcactgttggagccttcatgtccgacagcgtggttcttctcagagcaaggcctgtcattacggtggatgtctccatcttcctcccgggctccatcaacatcacagcgcctcagtgtcacgacggacagcagcctgtgaactgcctgaacgtcaccacctgcttcagcttccatggcaaacacgttccagaagagattggcctgaattatgttctgatggctgacgtggccaaaaaggagaagggccagatgcccagggtctactttgtgctgctgggagagaccatgggtcaggtcacagagaagctgcagctgacttacatggaggagacgtgtcgtcactatgtggcccatgtgaagcggagggtgcaggacgtcatcagcccgatcgtgtttgaagcagcctacagcctcagtgagcatgtgactggagaggaggagagggaactgccgcctctgacaccagttctccgctggaaaaagggacaaaagattgcccaaaagaatcagactgtttttgaaaggaattgccgttcagaggactgtgccgcagacctgcagcttcagggtaaactgctgctctccagtatggatgagaaaaccctgtatctagctttgggggctgtgaagaacatctccctaaacatctctatctccaacctcggagatgatgcctatgatgccaacgtgtccttcaatgtttcccgggagctcttcttcatcaacatgtggcagaaggaggagatgggcatctcctgtgagctgctggaatcggacttcctcaaatgcagcgtgggatttcctttcatgaggtcaaagtcaaagtatgaattcagcgtgatctttgatacaagccacctgtctggggaagaggaagttctcagcttcattgttactgctcagagtggcaacacggagcgctctgaatccctgcatgacaacaccctcgtgctgatggtgccactgatgcacgaggtggacacgtccatcaccggaatcatgtctccaacctcctttgtatatggcgagtccgtggacgcagccaacttcattcagctggatgacctggagtgtcactttcagcccatcaatatcacccttcaggtctacaacactggcccaagcacccttccagggtcatctgtcagcatctctttccctaatcgactctcatctggtggtgcagagatgtttcatgtccaggaaatggtggtgggccaagagaagggaaactgctctttccagaaaaacccaactccctgcatcatccctcaagaacaagaaaatatcttccacacaatatttgcttttttcacaaagtctggaagaaaagtcttggactgtgaaaaaccaggaatttcttgcctaacagcacactgtaactttagtgctcttgctaaagaagaaagtcgtactatagacatttacatgctgctgaacacagaaatactgaaaaaggacagttcgtctgtcatccagttcatgtcccgcgccaaggtgaaggtggatcctgccctaagggtggtggaaatagctcatgggaacccagaagaggtgacggtggtcttcgaggccctgcacaatctggagccccgtggctacgtcgtggggtggatcatcgccatcagtttgttggtgggaatcctcatcttcctgctgctggccgtgctgctctggaagatgggcttctttcgccgaaggtacaaagaaattatcgaagctgagaagaaccggaaagagaatgaagacagttgggactgggtccagaaaaaccagtgagctgccacaccagtcacatgacctgatcactagcctgtcatccttggtctttgtatcttccatatttggaaaaaaaaaatcttctccagatttttcggaggccccactgatgctgttctcttcttcattctatcaagcccaggtgccagcctgaggcagccacttcggccaggtcacacgaccgggggcagcaccacttcgctttaaagactctgaactttggagagtgacagagccgagcaatatttaggatgcaacacgcatggtcaccctcaggggaaaactgttaaagtatttttataaatataagccttttatactgattattcttttatatttgtatcgatattatttctattaaatagttataattcactcaagcactgattctggcctaaaatcttggaagtccatgaatacaaattttaa

SEQ ID NO: 28703 - DNA, 5257 bp, Homo Sapiens
aaaaattttctgttaccaaattttacaacttctaataagactactataactttatgtaaactgatgaagatgtgctgattaacatattctgtgatatggtttacaacttttaatcataattgtccatgattttggaatgctgttatttatcagtaaatgtaaaatatttgaggcatttagccatacacacactagaactttttaaaactttgtcctatagtgtaattataaactgatgactattatcttcatacattgagtcttcatgcatcaatgaaatgaaaaatataggagtagatgtccacgcccacagaccctggtgcgatgccccacccagggccttcgccggggcctgggccttcccctgggccaattcttgggcctagtccaggaccaggaccatccccaggttccgtccacagcatgatggggccaagtcctggacctccaagtgtctcccatcctatgccgacgatggggtccacagacttcccacaggaaggcatgcatcaaatgcataagcccatcgatggtatacatgacaaggggattgtagaagacatccattgtggatccatgaagggcactggtatgcgaccacctcacccaggcatgggccctccccagagtccaatggatcaacacagccaaggttatatgtcaccacacccatctccattaggagccccagagcacgtctccagccctatgtctggaggaggcccaactccacctcagatgccaccaagccagccgggggccctcatcccaggtgatccgcaggccatgagccagcccaacagaggtccctcacctttcagtcctgtccagctgcatcagcttcgagctcagattttagcttataaaatgctggcccgaggccagcccctccccgaaacgctgcagcttgcagtccaggggaaaaggacgttgcctggcttgcagcaacaacagcagcagcaacagcagcagcagcagcagcagcagcagcagcagcagcagcaacagcagccgcagcagcagccgccgcaaccacagacgcagcaacaacagcagccggcccttgttaactacaacagaccatctggcccggggccggagctgagcggcccgagcaccccgcagaagctgccggtgcccgcgcccggcggccggccctcgcccgcgccccccgcagccgcgcagccgcccgcggccgcagtgcccgggccctcagtgccgcagccggccccggggcagccctcgcccgtcctccagctgcagcagaagcagagccgcatcagccccatccagaaaccgcaaggcctggaccccgtggaaattctgcaagagcgggaatacagacttcaggcccgcatagctcataggatacaagaactggaaaatctgcctggctctttgccaccagatttaagaaccaaagcaaccgtggaactaaaagcacttcggttactcaatttccagcgtcagctgagagaggaggtggtggcctgcatgcgcagggacacgaccctggagacggctctcaactccaaagcatacaaacggagcaagcgccagactctgagagaagctcgcatgaccgagaagctggagaagcagcagaagattgagcaggagaggaaacgccgtcagaaacaccaggaatacctgaacagtattttgcaacatgcaaaagattttaaggaatatcatcggtctgtggccggaaagatccagaagctctccaaagcagtggcaacttggcatgccaacactgaaagagagcagaagaaggagacagagcggattgaaaaggagagaatgcggcgactgatggctgaagatgaggagagttatagaaaactgattgatcaaaagaaagacaggcgtttagcttaccttttgcagcagaccgatgagtatgtagccaatctgaccaatctggtttgggagcacaagcaagcccaggcagccaaagagaagaagaagaggaggaggaggaagaagaaggctgaggagaatgcagagggtggggagtctgccctgggaccggatggagagcccatagatgagagcagccagatgagtgacctccctgtcaaagtgactcacacagaaaccggcaaggttctgttcggaccagaagcacccaaagcaagtcagctggacgcctggctggaaatgaatcctggttatgaagttgcccctagatctgacagtgaagagagtgattctgattatgaggaagaggatgaggaagaagagtccagtaggcaggaaaccgaagagaaaatactcctggatccaaatagcgaagaagtttctgagaaggatgctaagcagatcattgagacagctaagcaagacgtggatgatgaatacagcatgcagtacagtgccaggggctcccagtcctactacaccgtggctcatgccatctcggagagggtggagaaacagtctgccctcctaattaatgggaccctaaagcattaccagctccagggcctggaatggatggtttccctgtataataacaacttgaacggaatcttagccgatgaaatggggcttggaaagaccatacagaccattgcactcatcacttatctgatggagcacaaaagactcaatggcccctatctcatcattgttcccctttcgactctatctaactggacatatgaatttgacaaatgggctccttctgtggtgaagatttcttacaagggtactcctgccatgcgtcgctcccttgtcccccagctacggagtggcaaattcaatgtcctcttgactacttatgagtatattataaaagacaagcacattcttgcaaagattcggtggaaatacatgatagtggacgaaggccaccgaatgaagaatcaccactgcaagctgactcaggtcttgaacactcactatgtggcccccagaaggatcctcttgactgggaccccgctgcagaataagctccctgaactctgggccctcctcaacttcctcctcccaacaatttttaagagctgcagcacatttgaacaatggttcaatgctccatttgccatgactggtgaaagggtggacttaaatgaagaagaaactatattgatcatcaggcgtctacataaggtgttaagaccatttttactaaggagactgaagaaagaagttgaatcccagcttcccgaaaaagtggaatatgtgatcaagtgtgacatgtcagctctgcagaagattctgtatcgccatatgcaagccaaggggatccttctcacagatggttctgagaaagataagaaggggaaaggaggtgctaagacacttatgaacactattatgcagttgagaaaaatctgcaaccacccatatatgtttcagcacattgaggaatcctttgctgaacacctaggctattcaaatggggtcatcaatggggctgaactgtatcgggcctcagggaagtttgagctgcttgatcgtattctgccaaaattgagagcgactaatcaccgagtgctgcttttctgccagatgacatctctcatgaccatcatggaggattattttgcttttcggaacttcctttacctacgccttgatggcaccaccaagtctgaagatcgtgctgctttgctgaagaaattcaatgaacctggatcccagtatttcattttcttgctgagcacaagagctggtggcctgggcttaaatcttcaggcagctcatacagtggtcatctttgacagcgactggaatcctcatcaggatctgcaggcccaagaccgagctcaccgcatcgggcagcagaacgaggtccgggtactgaggctctgtaccgtgaacagcgtggaggaaaagatcctcgcggccgcaaaatacaagctgaacgtggatcagaaagtgatccaggcgggcatgtttgaccaaaagtcttcaagccacgagcggagggcattcctgcaggccatcttggagcatgaagaggaaaatgaggaagaagatgaagtaccggacgatgagactctgaaccaaatgattgctcgacgagaagaagaatttgacctttttatgcggatggacatggaccggcggagggaagatgcccggaacccgaaacggaagccccgtttaatggaggaggatgagctgccctcctggatcattaaggatgacgctgaagtagaaaggctcacctgtgaagaagaggaggagaaaatatttgggagggggtcccgccagcgccgtgacgtggactacagtgacgccctcacggagaagcagtggctaagggccatcgaagacggcaatttggaggaaatggaagaggaagtacggcttaagaagcgaaaaagacgaagaaatgtggataaagatcctgcaaaagaagatgtggaaaaagctaagaagagaagaggccgccctcccgctgagaaactgtcaccaaatccccccaaactgacaaagcagatgaacgctatcatcgatactgtgataaactacaaagatagttcagggcgacagctcagtgaagtcttcattcagttaccttcaaggaaagaattaccagaatactatgaattaattaggaagccagtggatttcaaaaaaataaaggaaaggattcgtaatcataagtaccggagcctaggcgacctggagaaggatgtcatgcttctctgtcacaacgctcagacgttcaacctggagggatcccagatctatgaagactccatcgtcttacagtcagtgtttaagagtgcccggcagaaaattgccaaagaggaagagagtgaggatgaaagcaatgaagaggaggaagaggaagatgaagaagagtcagagtccgaggcaaaatcagtcaaggtgaaaattaagctcaataaaaaagatgacaaaggccgggacaaagggaaaggcaagaaaaggccaaatcgaggaaaagccaaacctgtagtgagcgattttgacagcgatgaggagcaggatgaacgtgaacagtcagaaggaagtgggacggatgatgagtgatcagtatggacctttttccttggtagaactgaattccttcctcccctgtctcatttctacccagtgagttcatttgtcatataggcactgggttgtttctatatcatcatcgtctataaactagctttaggatagtgccagacaaacatatgatatcatggtgtaaaaaacacacacatacacaaatatttgtgaccaaatgggcctcaaagattcagattgaaacaaacaaaaagctttt

SEQ ID NO: 28704 - DNA, 3262 bp, Homo Sapiens
gcgccgagccggtttccccgccggtgtccgagaggcgcccccggcccggccgcccccagccccagccccgccgggccccgccccccgtcgagtgcatgaggttgacgctactttgttgcacctggagggaagaacgtatgggagaggaaggaagcgagttgcccgtgtgtgcaagctgcggccagaggatctatgatggccagtacctccaggccctgaacgcggactggcacgcagactgcttcaggtgttgtgactgcagtgcctccctgtcgcaccagtactatgagaaggatgggcagctcttctgcaagaaggactactgggcccgctatggcgagtcctgccatgggtgctctgagcaaatcaccaagggactggttatggtggctggggagctgaagtaccaccccgagtgtttcatctgcctcacgtgtgggacctttatcggtgacggggacacctacacgctggtggagcactccaagctgtactgcgggcactgctactaccagactgtggtgacccccgtcatcgagcagatcctgcctgactcccctggctcccacctgccccacaccgtcaccctggtgtccatcccagcctcatctcatggcaagcgtggactttcagtctccattgaccccccgcacggcccaccgggctgtggcaccgagcactcacacaccgtccgcgtccagggagtggatccgggctgcatgagcccagatgtgaagaattccatccacgtcggagaccggatcttggaaatcaatggcacgcccatccgaaatgtgcccctggacgagattgacctgctgattcaggaaaccagccgcctgctccagctgaccctcgagcatgaccctcacgatacactgggccacgggctggggcctgagaccagccccctgagctctccggcttatactcccagcggggaggcgggcagctctgcccggcagaaacctgtcttgaggagctgcagcatcgacaggtctccgggcgctggctcactgggctccccggcctcccagcgcaaggacctgggtcgctctgagtccctccgcgtagtctgccggccacaccgcatcttccggccgtcggacctcatccacggggaggtgctgggcaagggctgcttcggccaggctatcaaggtgacacaccgtgagacaggtgaggtgatggtgatgaaggagctgatccggttcgacgaggagacccagaggacgttcctcaaggaggtgaaggtcatgcgatgcctggaacaccccaacgtgctcaagttcatcggggtgctctacaaggacaagaggctcaacttcatcactgagtacatcaagggcggcacgctccggggcatcatcaagagcatggacagccagtacccatggagccagagagtgagctttgccaaggacatcgcatcagggatggcctacctccactccatgaacatcatccaccgagacctcaactcccacaactgcctggtccgcgagaacaagaatgtggtggtggctgacttcgggctggcgcgtctcatggtggacgagaagactcagcctgagggcctgcggagcctcaagaagccagaccgcaagaagcgctacaccgtggtgggcaacccctactggatggcacctgagatgatcaacggccgcagctatgatgagaaggtggatgtgttctcctttgggatcgtcctgtgcgagatcatcgggcgggtgaacgcagaccctgactacctgccccgcaccatggactttggcctcaacgtgcgaggattcctggaccgctactgccccccaaactgccccccgagcttcttccccatcaccgtgcgctgttgcgatctggaccccgagaagaggccatcctttgtgaagctggaacactggctggagaccctccgcatgcacctggccggccacctgccactgggcccacagctggagcagctggacagaggtttctgggagacctaccggcgcggcgagagcggactgcctgcccaccctgaggtccccgactgagccagggccactcagctgcccctgtccccacctctggagaatccacccccaccagattcctccgcgggaggtggccctcagctgggacagtggggacccaggcttctcctcagagccaggccctgacttgccttctcccaccccgtggaccgcttcccctgccttctctctgccgtggcccagagccggcccagctgcacacacacaccatgctctcgccctgctgtaacctctgtcttggcagggctgtcccctcttgcttctccttgcatgagctggagggcctgtgtgagttacgcccctttccacacgccgctgccccagcaaccctgttcacgctccacctgtctggtccatagctccctggaggctgggccaggaggcagcctccgaaccatgccccatataacgcttgggtgcgtgggagggcgcacatcagggcagaggccaagttccaggtgtctgtgttcccaggaaccaaatggggagtctggggcccgttttccccccagggggtgtctaggtagcaacaggtatcgaggactctccaaacccccaaagcagagagagggctgatcccatggggcggaggtccccagtggctgagcaaacagccccttctctcgctttgggtcttttttttgtttctttcttaaagccactttagtgagaagcaggtaccaagcctcagggtgaagggggtcccttgagggagcgtggagctgcggtgccctggccggcgatggggaggagccggctccggcagtgagaggataggcacagtggaccgggcaggtgtccaccagcagctcagcccctgcagtcatctcagagccccttcccgggcctctcccccaaggctccctgcccctcctcatgcccctctgtcctctgcgttttttctgtgtaatctattttttaagaagagtttgtattattttttcatacggctgcagcagcagctgccaggggcttgggattttatttttgtggcgggcgggggtgggagggccattttgtcactttgcctcagttgagcatctaggaagtattaaaactgtgaagctttctcagtgcactttgaacctggaaaacaatcccaacaggcccgtgggaccatgacttagggaggtgggacccacccacccccatccaggaaccgtgacgtccaaggaaccaaacccagacgcagaacaataaaataaattccgtactccccaccc

SEQ ID NO: 28705 - DNA, 8404 bp, Homo Sapiens
cgttgctgtcgggcgggcgcgccaagacgtgggcacctcctcacccggaccccgggccccgccgagccgcctcctggctcccgtggccgccagcccgccccggccgcaccgagcgtcgggatccgaggtgggagcgtacccctccccgctccccggacgcctcagtcctccgcactgagcttggccacgcgcccctaggcgccccccacgccctgggccccggagggccgcagccatgagtgaaatgtccagctttcttcacatcggggacatcgtctccctgtacgccgagggctccgtcaatggcttcatcagcactttggggctggtggatgaccgctgtgtggtggagcccgcggccggggacctggacaacccccctaagaagttccgtgactgcctcttcaaggtgtgccccatgaaccgctactcggcccagaagcagtactggaaggccaagcagactaagcaggacaaggagaagatcgctgatgtggtgttgctgcagaagctgcagcatgcggcgcagatggagcagaagcaaaatgacacggagaacaagaaggtgcatggggatgtcgtgaagtatggcagtgtgatccagctcctgcacatgaagagcaacaagtacctgacagtgaacaagcggcttccggccttgctggagaagaacgccatgcgggtgactctggatgccacaggcaacgagggttcctggctcttcatccagcccttctggaagctgcggagcaacggggacaacgtggtcgtgggggacaaggtgatcctgaatcctgtcaatgccgggcagcctctgcatgccagcaattacgagctcagcgacaacgccggctgcaaggaggtcaattctgtgaactgcaacaccagctggaagatcaacctgtttatgcagtttcgggaccacctggaggaggtgttgaaagggggagacgtggtgcggctgttccatgcggagcaggagaagttcctgacgtgtgacgagtacaagggcaagctgcaggtgttcctgcgaactacactgcgccagtctgccacctcggccaccagctccaatgctctctgggaggtggaggtggtccaccacgacccctgccgtggaggagctgggcactggaatggcttgtaccgcttcaagcacctggctacaggcaactacctggctgctgaggagaaccccagttacaaaggtgatgcctcagatcccaaggcagcaggaatgggggcacagggccgcacaggccgcaggaatgctggggagaagatcaagtactgcctggtggctgtgcctcatggcaatgacatcgcctctctctttgagctggaccccaccaccttgcagaaaaccgactctttcgtgccccggaactcgtacgtccggctgcggcacctctgcaccaacacgtggattcagagcaccaatgtgcccattgacatcgaggaggagcggcccatccggctcatgctgggcacctgccccaccaaggaggacaaggaggcctttgccatcgtgtcagtgcccgtgtctgagatccgagacctggactttgccaatgacgccagctccatgctggccagtgccgtggagaaactcaacgagggcttcatcagccagaatgaccgcaggtttgtcatccagctgctggaagacctggtgttctttgtcagcgatgtccccaacaatgggcagaatgtcctggacatcatggtcactaagcccaaccgggaacggcagaagctgatgagggagcagaacatcctcaaacaggtctttggcattctgaaggccccgttccgtgagaaggggggtgaaggtcccctggtgcggctggaggagctgtcagaccagaagaacgccccctaccagcacatgttccgcctgtgctaccgcgtgttgcggcattcccaggaggactaccgcaagaaccaggagcacattgccaagcagtttgggatgatgcagtcccagattggctacgacatcctggccgaggacaccatcactgccctgctgcacaacaaccgcaagctcctggaaaagcacatcaccaagaccgaggtggagaccttcgtcagccttgtgcgcaagaaccgggagcccaggttcctggactacctctctgacctgtgtgtgtccaaccacatcgccatccccgtcacccaagagctcatctgcaagtgtgtgctggaccccaagaacagtgacattctcatccggaccgagcttcggcccgtgaaggagatggcccaatcccacgagtacctgagcatcgagtactcagaagaggaagtgtggctcacgtggactgacaagaataacgagcatcatgagaagagtgtgaggcagctggcccaggaggcgcgggccggcaacgcccatgacgagaatgtgctcagctactacaggtaccagctgaagctctttgcccgcatgtgcttggaccgccagtacttggccatcgacgagatctcccagcagctgggtgtggacctgattttcctgtgcatggcagacgagatgctgccctttgacctgcgcgcctccttctgccacctgatgctgcacgtgcacgtggaccgtgacccccaggagctggtcacgccggtcaagtttgcccgtctctggactgagatccccacagccatcaccatcaaggactatgattccaacctcaacgcgtcccgagatgacaagaagaacaagtttgccaacaccatggagttcgtggaggactacctcaacaatgtagtcagcgaggccgtgccctttgccaacgaggagaagaacaagctcacttttgaggtggtcagcctggcgcacaatctcatctacttcggcttctacagcttcagcgagctgctgcggctcactcgcacactgctgggcatcatcgactgtgtgcaggggcccccggccatgctgcaggcctatgaggaccccggtggcaagaatgtgcggcggtccatccagggcgtggggcacatgatgtccaccatggtgctgagccgcaagcagtccgtcttcagtgcccccagcctgtctgctggggccagtgctgctgagccgctggacagaagcaagtttgaggagaatgaggacattgtggtgatggagaccaagctgaagatcctggaaatccttcagttcatcctcaacgtccgcctggattaccgcatatcccacctgctgtctgtcttcaagaaggagtttgtggaggtgtttcccatgcaggacagtggggctgatggcacagcccctgccttcgactctaccactgccaacatgaacctggatcgcatcggggagcaggcggaggccatgtttggagtggggaagacaagcagcatgctggaggtggatgacgagggcggccgcatgttcctgcgcgtgctcatccacctcaccatgcacgactatgcgccgctggtctcgggtgccctgcagctgctcttcaagcacttcagccagcgccaggaggccatgcacaccttcaagcaggttcagctgctgatctcagcgcaggacgtggagaactacaaggtgatcaagtcggagctggaccggctgcggaccatggtggagaagtcagagctgtgggtggacaagaagggcagtggcaagggtgaggaggtggaggcaggcgccgccaaggacaagaaagagcgtcccacggacgaggagggctttctgcacccaccaggggagaaaagcagtgagaactaccagatcgtcaagggcatcctggaaaggctgaacaagatgtgcggggttggggagcaaatgaggaagaagcagcaacggctgctgaagaacatggatgcccacaaggtcatgctggacctgctgcagatcccctatgacaagggtgatgccaagatgatggagatcctgcgctacacgcaccagttcctgcagaagttctgtgcagggaaccccggcaaccaggccctgctgcacaaacacctgcacctcttcctcacgccagggctcctggaggcagagaccatgcagcacatcttcctgaacaactatcagctctgctccgagatcagcgagcctgtgttgcagcacttcgtgcacctgctggccacgcacgggcgccatgtgcagtacctggacttcctgcacaccgtcattaaggccgagggcaagtacgtcaagaagtgccaggacatgatcatgactgagctgaccaatgcaggtgacgatgtggtcgtgttctacaatgataaggcatcgctggcccacctgctggacatgatgaaggccgcccgcgacggcgtggaggaccacagccccctcatgtaccacatttccctggtggacctgctggccgcctgtgccgagggcaaaaacgtctacactgagatcaagtgcacctccctgctgccgctggaggacgtggtgtctgtggtgacgcatgaggactgcatcactgaggtgaaaatggcctatgtgaacttcgtgaaccactgctacgtggacacggaggtggagatgaaggagatctacaccagcaaccacatctggacgctctttgagaacttcaccctggacatggctcgggtctgcagcaagcgtgagaagcgcgtggctgaccccaccttggagaagtacgtgctgagcgttgtgctggacaccatcaacgccttcttcagctccccattctctgagaacagcacttccctgcagacacaccagacgattgtggtgcagctgctgcagtctaccacacgcctcctcgagtgtccgtggctacagcagcagcacaagggctccgtggaggcctgcatccggaccctcgccatggtggccaagggccgggccatcttgctgcccatggacctggatgcccacatcagctcgatgctcagcagtggagccagctgtgcagctgccgcccagcggaacgcctccagctacaaggcaaccacgcgggccttcccccgcgtcacccctaccgccaaccagtgggactacaagaacatcattgagaagctgcaggacatcatcacagccctggaggagcggctgaagcccctggtacaggctgagctgtccgtgctggtggatgtcctgcactggcctgagctgctcttcctggagggcagtgaggcctaccagcgctgcgagagtgggggcttcctgtccaagctgatccagcacaccaaggacctcatggagtcggaggagaagctgtgcatcaaggtgctgcggaccctgcagcagatgctgctcaagaagaccaagtacggggaccggggcaaccagctgcgcaagatgctgctgcaaaactacctccagaaccggaagtccacctcgcggggggaccttcccgaccccataggcactggcctggacccagactggtcggcaatcgcagccacccagtgccggctggacaaggagggggccaccaagttggtatgcgacctcatcaccagcaccaagaacgagaagatcttccaggagagcatcggcctggccatccacctgctggatggtggcaacacagagatccagaaatccttccacaacctgatgatgagtgacaagaagtcagagcgcttcttcaaggtgctgcacgaccgcatgaagcgggcccagcaggagaccaagtccacggtggcagtcaacatgaatgacctgggcagccagccacatgaggaccgcgagccagtcgaccccaccaccaaaggccgcgtggcctccttctcgatacctggttcctcatcccgctactcgctgggccccagcctgcgccgggggcacgaggtgagcgaacgtgtgcagagcagtgagatgggcacatccgtgctcatcatgcagcccatcctgcgctttctgcagctgctgtgtgagaaccacaaccgggacctgcagaacttcctgcgctgtcagaacaacaaaaccaactacaacttggtatgcgagacgctgcagttcctggacatcatgtgcggcagcaccacgggcggcctggggctgctggggctctacatcaatgaggacaacgtgggcctcgtcatccagaccttggagaccctcactgagtactgccagggcccctgccatgagaaccagacttgcattgtgactcacgagtccaatggcatagacatcatcaccgcactgatcctcaatgacatcagccccctgtgcaagtaccgcatggatctggtgctgcagctcaaggacaatgcctccaagctgctcctggctctgatggagagccggcatgacagtgaaaatgctgagcgaatcctcatcagcctgcggccccaggagctggtggacgtcatcaagaaggcctacctgcaggaggaagagcgtgagaactcggaggtgagcccacgtgaagtgggccataacatctatatcctggcgctgcagctctccaggcacaataaacagctgcagcacctgctgaagccggtgaagcgcattcaagaggaggaggccgagggtatctcttccatgctcagcctcaacaacaagcagctgtcacagatgctcaagtcctcagcgccagcacaggaggaggaggaagaccccctggcctactatgagaaccacacgtcccagatcgagattgtgcggcaggaccgcagcatggagcagatcgtgttcccagtgcccggcatctgccagttcctgacggaggaaaccaagcaccggctcttcaccactactgagcaggacgagcagggcagcaaagtgagcgacttcttcgaccagtcctccttcctgcacaacgagatggagtggcagcgcaacgtccgcagcatgccgctgatctactggttctcccgccgcatgaccctgtggggcagcatctccttcaacctggccgtgtttatcaacatcatcattgccttcttctacccttacatggagggcgcgtccacaggcgtgctggactcccctctcatctcattgctcttctggatcctcatctgcttctccatcgcggccctgttcaccaagcgctacagcatccgccccctcatcgtggcgctcatcctgcgctccatctactatctgggcatcgggcccacactcaacatcctgggtgccctcaatctgaccaacaagatcgtgtttgtggtgagcttcgtgggcaaccgtggcaccttcatccggggctataaggccatggtcatggacatggaattcctctaccacgtgggctacatcctgaccagtgtcctgggcctctttgctcatgagctgttctacagcatcctgctctttgacctcatctaccgcgaggagacgctgttcaacgtcatcaagagtgtgacccgcaatggccgctccatcctgctgacagccctgctggccctcatcctggtctacctcttctccatcgtcggcttcctcttcctcaaggatgacttcattctcgaggtcgaccggctgcccaacaaccactccacagccagccccctggggatgccacatggagctgctgcatttgtggacacctgcagtggggacaagatggactgtgtctcaggggtctcggtgcctgaggtcctggaagaggacagggagctggacagcacagagcgggcctgtgacactctgttgatgtgcatcgtcactgtcatgaaccatgggctacgcaacggtggtggcgtgggcgacattctccgcaagccctccaaagatgagtctctcttcccagcccgagtggtctatgacctcctgttcttcttcatcgtcatcatcattgtgctgaacctcatctttggggtaatcatcgacaccttcgctgacctgcgtagtgagaagcagaagaaggaggagattcttaagacgacatgcttcatctgtggtctggagagggacaagtttgataacaagacagtgtcatttgaggaacacatcaagctggagcacaacatgtggaactacttgtacttcattgtgctggtccgcgtgaagaacaagaccgactacacgggccctgagagctacgtggcccagatgatcaagaacaagaacctggactggttcccccggatgcgggccatgtcccttgtcagcaatgagggcgagggggagcagaatgagattcggattctccaggacaagctcaactccaccatgaagctggtgtcccacctcactgcccagctcaacgagctcaaggagcagatgacggagcagcggaaacgcaggcaacgcctaggctttgtggatgtccagaactgcattagccgctgaggagagccaccgaaggccccaacaggggatgctcatcactggagactgcgactgggaagaacactgccccctccctcgggttgggtggcccagccagctggccagcctccactcccactctgccagacaccctgacacccacccaggctttcg

SEQ ID NO: 28706 - DNA, 6586 bp, Homo Sapiens
ctggggagccggcgctggaggtggtgagtggcgtggggactgtgtcgagggggtccccaaggtgccggaccctgcggaggggcgaagtttcggcactggggagggcgtgcggacgctttccctacaggcgaccactgctctgcgggcgggtggtcttagctccagtcccccattcagttcctcagcattccaggtcggcggcgaaggggtccccgaacgaagggcgcaaggcagcgtctctgctgggaccgggaagccggacttcagggcctctcggcccgtgggcttctccccgagtctccccgagtcggttggcattaagagtttagcagatactttcagaaatggatacataagaaatggctggaaatcaaatgaatgtccaaagaagagcttagggtcttagtaacattcttttttaaaataactgtctgccaaaatgtcattacacagtactcataatagaaataacagcggtgatattcttgatattccttcttcccaaaatagttcatcactgaatgccctcacccacagtagccgacttaagctgcatttgaagtcggatatgtcagaatgtgaaaatgatgatccattattgagatctgcaggtaaagtcagagacataaatagaacttatgttatttctgccagtagaaaaacagcagacatgccccttacccctaatcctgtaggtagattggcacttcagaggagaactacaaggaacaaagaatcatctttgcttgttagtgagttggaagacacaactgaaaaaacagcagaaacacgtcttacattacaacgtcgtgctaaaacagattctgcagaaaagtggaaaacagctgaaatagattctgtcaaaatgacactgaatgtgggaggtgaaacagaaaataatggtgtttctaaggaaagtagaacaaatgtaaggattgtaaataatgctaaaaactcttttgttgcctcttctgtacctttagatgaagatccacaggtcattgaaatgatggctgataagaaatacaaagaaacattttctgcccccagtagagcaaatgaaaatgttgcacttaagtactcaagtaatagaccacccattgcttccctgagtcagactgaagttgttagatcaggacacttgacaacgaaacctactcagagcaagttggatatcaaagtgttgggaacaggaaacttgtatcatagaagtattgggaaggaaattgcaaaaacttcaaataaatttgggagcttagaaaaaagaacacctacaaaatgtacaacagaacacaaactgacaacaaagtgcagcctgcctcagcttaagagcccagctccatcaatactgaagaatagaatgtctaaccttcaagttaaacaaagaccaaaaagttcctttcttgcaaataaacaggaaagatccgcagaaaatacaattcttcccgaagaagaaactgtagttcagaacacctctgcaggaaaagaccccttaaaagtagagaatagtcaagtgacagtggcagtacgcgtaagacctttcaccaagagagagaagattgaaaaagcatcccaggtagtcttcatgagtgggaaagaaataactgtggaacaccctgacacgaaacaagtttataattttatttatgatgtttcattctggtcttttgatgaatgtcatcctcactacgctagccagacaactgtctatgagaagctagcagcaccactcctagaaagagccttcgaaggcttcaatacctgtctttttgcttatggtcagactggctctggaaaatcatatacgatgatgggatttagtgaagaaccaggaataattccaagattttgtgaagatcttttttctcaagtagccagaaaacaaacccaagaggtcagctatcacattgaaatgagcttctttgaagtatataatgaaaaaattcacgaccttctggtttgtaaagatgaaaatgggcagagaaagcaaccactgagagtgagggaacatcctgtttatggaccatatgttgaagcactgtcaatgaacattgtcagttcttacgctgatatccagagttggctagaattgggaaataaacaaagagctactgctgctactggtatgaatgataaaagttcccgatctcattcagttttcaccctggtgatgacccagaccaagacagaatttgtggaaggggaagaacacgatcacagaataacaagtcgaattaacctaatagatctggcaggcagtgagcgctgctctacggctcacactaatggagatcgactaaaggaaggtgtgagtattaataagtccttgctaactttgggaaaagttatatctgcactttcggaacaagcaaaccaaaggagtgtttttattccttatcgtgaatctgttcttacatggctgttaaaagaaagtctgggtggaaattcaaaaactgcaatgattgctacgattagtcccgctgccagcaacatagaagaaacattaagcacacttagatatgctaaccaagcccgtttaatagtcaacattgctaaagtaaatgaagatatgaacgctaagttaattagagaattgaaggcagaaattgcaaagctaaaagctgctcagagaaacagtcggaatattgaccctgaacgatacaggctctgtcggcaagaaataacatccttaagaatgaaactgcatcaacaggagagagacatggcagaaatgcaaagagtgtggaaagaaaagtttgaacaagctgaaaaaagaaaacttcaagaaacaaaagagttacagaaagcaggaattatgtttcaaatggacaatcatttaccaaaccttgttaatctgaatgaagatccacaactatctgagatgctgctatatatgataaaagaaggaacaactacagttggaaagtataaaccaaactcaagccatgatattcagttatctggggtgctgattgctgatgatcattgtactatcaaaaattttggtgggacagtgagtattatcccagttggggaagcaaagacatatgtaaatggaaaacatattttggaaatcacagtattacgtcatggtgatcgagtgattcttggtggagatcattattttagatttaatcatccagtagaagtccagaaaggaaaaaggccatctggaagagatactcctataagtgagggtccaaaagactttgaatttgcaaaaaatgagttgctcatggcacagagatcacaacttgaagcagaaataaaagaggctcagttgaaggcaaaggaagaaatgatgcaaggaatccagattgcaaaagaaatggctcagcaagagctttcttctcaaaaagctgcatatgaaagcaaaataaaagcactggaagcagaactgagagaagagtctcaaaggaaaaaaatgcaggaaataaataaccagaaggctaatcacaaaattgaggaattagaaaaggcaaagcagcatcttgaacaggaaatatatgtcaacaaaaagcgattagaaatggagacattggctacaaaacaggctttagaagaccatagcatccgccatgcaagaattctggaagctttagaaactgaaaagcaaaaaattgctaaagaagtacaaattctacagcagaatcggaataatagggataaaacttttacagtgcagacaacttggagctctatgaaactctcaatgatgattcaggaagccaatgctatcagcagcaaattgaaaacatactatgtttttggcagacatgatatatcagataaaagtagttctgacacttctattcgggttcgtaacctgaaactaggaatctcaacattctggagtctggaaaagtttgaatctaaacttgcagcaatgaaagaactttatgagagtaatggtagtaacaggggtgaagatgccttttgtgatcctgaagatgaatgggaacccgacattacagatgcaccagtttcttcactttctagaaggaggagtaggagtttgatgaagaacagaagaatttctggttgtttacatgacatacaagtccatccaattaagaatttgcattcttcacattcatcaggtttaatggacaaatcaagcactatttactcaaattcagcagagtcctttcttcctggaatttgcaaagaattgattggttcttcgttagatttttttggacagagttatgatgaagaaagaactatagcagacagcctaattaatagttttcttaaaatttataatgggctatttgccatttccaaggctcatgaagaacaagatgaagaaagtcaagataacttgttttcttctgatcgagcaatccagtcacttactattcagactgcatgtgcttttgagcagctagtagtgctaatgaaacactggctgagtgatttactgccttgtaccaacatagcaagacttgaggatgagttgagacaagaagttaaaaaactgggaggctacttacagttatttttgcagggatgctgtttggatatttcatcaatgataaaagaggctcaaaagaatgcaatccaaattgtacaacaagctgtaaagtatgtggggcagttagcagttctgaaagggagcaagctacattttctagaaaacggtaacaataaagctgccagtgtccaggaggaattcatggatgctgtttgtgatggtgtaggcttaggaatgaagattttattagattctggactggaaaaagcaaaagaacttcagcatgaactctttaggcagtgtacaaaaaatgaggttaccaaagaaatgaaaactaatgccatgggattgattagatctcttgaaaacatctttgctgaatcgaaaattaaaagtttcagaaggcaagtacaagaagaaaactttgaataccaagatttcaagaggatggttaatcgtgctccagaattcttaaagttaaaacattgcttagagaaagctattgaaattattatttctgcactgaaaggatgccatagtgatataaatcttctccagacttgtgttgaaagtattcgcaacttggccagtgatttttacagtgacttcagtgtgccttctacttctgttggcagctatgagagtagagtaactcacattgtccaccaggaactagaatctctagctaagtctctcctcttttgttttgaatctgaagaaagccctgatttgttgaaaccctgggaaacttataatcaaaataccaaagaagaacaccaacaatctaaatcaagcgggattgacggcagtaagaataaaggtgtaccaaagcgtgtctatgagctccatggctcatccccagcagtgagctcagaggaatgcacacccagtaggattcagtgggtgtgaatactgatgtgtaggcacttttatgaccacccatgaaagaaaaagaacacttgctcggtaattttctttatgcaggagagtttaagagaaatcagcacagatatttcaaaaaagtccatgtctttttatctttaaaatatctatttatcaaaggccagacacagtggctcacgcctgtaatcccagcactttgggaggcgggcagatcacaaggtcaggagtttgagaccggcctggccaacatggtgaaaccccgtctctactaaaaatacaaaaatttgctgggcatggtggcgcgtgcctgtaatcccagctactaggggggctgaggcaggaggatcgcttgaacctgagaggcagaggttgcagtgagccaagatcatgccactttactccagtctgagcaacagaacgagacttagtcaaaataaataaataaataagtaaataaataaataaataaaatatcttttatctttaaagtgtttaacattggtatactgtctgtagttggttcattagtcgtttataaagggttattttctcatgagtggaaacctgaacaatcagttacctttgtgcctatgccttctctctcctcagacagctgggatgtttatggtgaaatggcctgtacaagtttaactaagacaacttaacttgcattgttaatcaaaaattcttttctcaaagggttaactggttgccattttgaatagtatgttcaagggtgtagcttcctgtttctttccaaattataagtagctacctaaatatagtataattatatattaataatatggcttgctggcacagtagtttaccctgttatctgtgtttcataatgggggctgtatgaatattatttaaaactaataaaatgttgccagaattatactaaactgttggatgagattaggagatcagaggctggaccttctcttgataatgcttgttttgttaaaggtataatgaaataatttgtatatgatttgatgaagattaaagacccttattttccacagctttaaaaaaaaacctttatttatgatcaagtaataaagataatattctacttgtgggatcttacattatggaaatagtttgacgtttttgacctcaagagtatgtataatttgaagagatactttgtaactatgcttgggtgatattgagcagttcctaaagaataattcattt

SEQ ID NO: 28707 - DNA, 3236 bp, Homo Sapiens
gacccggccatgcgcggcctcgggctctggctgctgggcgcgatgatgctgcctgcgattgcccccagccggccctgggccctcatggagcagtatgaggtcgtgttgccgcggcgtctgccaggcccccgagtccgccgagctctgccctcccacttgggcctgcacccagagagggtgagctacgtccttggggccacagggcacaacttcaccctccacctgcggaagaacagggacctgctgggttccggctacacagagacctatacggctgccaatggctccgaggtgacggagcagcctcgcgggcaggaccactgcttataccagggccacgtagaggggtacccggactcagccgccagcctcagcacctgtgccggcctcaggggtttcttccaggtggggtcagacctgcacctgatcgagcccctggatgaaggtggcgagggcggacggcacgccgtgtaccaggctgagcacctgctgcagacggccgggacctgcggggtcagcgacgacagcctgggcagcctcctgggaccccggacggcagccgtcttcaggcctcggcccggggactctctgccatcccgagagacccgctacgtggagctgtatgtggtcgtggacaatgcagagttccagatgctggggagcgaagcagccgtgcgtcatcgggtgctggaggtggtgaatcacgtggacaagctatatcagaaactcaacttccgtgtggtcctggtgggcctggagatttggaatagtcaggacaggttccacgtcagccccgaccccagtgtcacactggagaacctcctgacctggcaggcacggcaacggacacggcggcacctgcatgacaacgtacagctcatcacgggtgtcgacttcaccgggactactgtggggtttgccagggtgtccgccatgtgctcccacagctcaggggctgtgaaccaggaccacagcaagaaccccgtgggcgtggcctgcaccatggcccatgagatgggccacaacctgggcatggaccatgatgagaacgtccagggctgccgctgccaggaacgcttcgaggccggccgctgcatcatggcaggcagcattggctccagtttccccaggatgttcagtgactgcagccaggcctacctggagagctttttggagcggccgcagtcggtgtgcctcgccaacgcccctgacctcagccacctggtgggcggccccgtgtgtgggaacctgtttgtggagcgtggggagcagtgcgactgcggcccccccgaggactgccggaaccgctgctgcaactctaccacctgccagctggctgagggggcccagtgtgcgcacggtacctgctgccaggagtgcaaggtgaagccggctggtgagctgtgccgtcccaagaaggacatgtgtgacctcgaggagttctgtgacggccggcaccctgagtgcccggaagacgccttccaggagaacggcacgccctgctccgggggctactgctacaacggggcctgtcccacactggcccagcagtgccaggccttctgggggccaggtgggcaggctgccgaggagtcctgcttctcctatgacatcctaccaggctgcaaggccagccggtacagggctgacatgtgtggcgttctgcagtgcaagggtgggcagcagcccctggggcgtgccatctgcatcgtggatgtgtgccacgcgctcaccacagaggatggcactgcgtatgaaccagtgcccgagggcacccggtgtggaccagagaaggtttgctggaaaggacgttgccaggacttacacgtttacagatccagcaactgctctgcccagtgccacaaccatggggtgtgcaaccacaagcaggagtgccactgccacgcgggctgggccccgccccactgcgcgaagctgctgactgaggtgcacgcagcgtccgggagcctccccgtcctcgtggtggtggttctggtgctcctggcagttgtgctggtcaccctggcaggcatcatcgtctaccgcaaagcccggagccgcatcctgagcaggaacgtggctcccaagaccacaatggggcgctccaaccccctgttccaccaggctgccagccgcgtgccggccaagggcggggctccagccccatccaggggcccccaagagctggtccccaccacccacccgggccagcccgcccgacacccggcctcctcggtggctctgaagaggccgccccctgctcctccggtcactgtgtccagcccacccttcccagttcctgtctacacccggcaggcaccaaagcaggtcatcaagccaacgttcgcacccccagtgcccccagtcaaacccggggctggtgcggccaaccctggtccagctgagggtgctgttggcccaaaggttgccctgaagccccccatccagaggaagcaaggagccggagctcccacagcaccctaggggggcacctgcgcctgtgtggaaatttggagaagttgcggcagagaagccatgcgttccagccttccacggtccagctagtgccgctcagccctagaccctgactttgcaggctcagctgctgttctaacctcagtaatgcatctacctgagaggctcctgctgtccacgccctcagccaattccttctccccgccttggccacgtgtagccccagctgtctgcaggcaccaggctgggatgagctgtgtgcttgcgggtgcgtgtgtgtgtacgtgtctccaggtggccgctggtctcccgctgtgttcaggaggccacatatacagcccctcccagccacacctgcccctgctctggggcctgctgagccggctgccctgggcacccggttccaggcagcacagacgtggggcatccccagaaagactccatcccaggaccaggttcccctccgtgctcttcgagagggtgtcagtgagcagactgcaccccaagctcccgactccaggtcccctgatcttgggcctgtttcccatgggattcaagagggacagccccagctttgtgtgtgtttaagcttaggaatgccctttatggaaagggctatgtgggagagtcagctatcttgtctggttttcttgagacctcagatgtgtgttcagcagggctgaaagcttttattctttaataatgagaaatgtatattttactaataaattattgaccgagttctgtagattcttgttaga

SEQ ID NO: 28708 - DNA, 1339 bp, Homo Sapiens
acagtgagatgagtcagaaaccggccaaggagggtcccagactctccaaaaaccagaagtactccgaacacttcagcatacactgctgcccgccgttcaccttcctcaattccaagaaggagatagtggatcggaaatacagcatctgtaagagcggctgcttctaccagaagaaagaggaggactggatctgctgcgcctgccagaagaccagaaccagccgccgtgccaagccccctcagaggcccaagcaacagccagctgcgccccccgcggtggtcagagcgccagccaagccacggtcccctccgaggtctgagcgtcagccacggtcccctccgaggtctgagcgtcagccacggtcccctccgaggtctgagcgtcagccacggtcccctccgaggtctgagcgtcagccacgtccccgcccagaggtccgaccaccgccagccaagcagcgtccccctcagaagtccaagcaacagccgcgcagcagccccctcagagggccaggcgccagccgtggggggtcccccgtcaaagcttctaggttctggtaacaccatctcttcccttttgttccccagccctaagattgaaaaggaagatcaggccaaccccaaagaagaagtgaccaaggaggagtttaaactgaatgaacaaccttggctcctggactcattgcttcacaacccatctacccctggatgaagttatctggcttcaaatattatgcaggggcaaacacctgctgatgtggcaactgctgatgctcatggtccccatggcatgggggcctcagggcagcctgcctggagtactttgaagatgtcatcccattgtcttctgacctctataattgccactgagagatctgctgtcagtctgcttatccttccacggactcaagtttcttcaatctgaagatacatgtctttctccagggacatgtgggaaaaaaaaagatgttatacaaccatcaaagtggcaaaaataaaaaaaatcaagtattggcaaagatgtggggaaaattctcataagctactgatgagaatttataaattattatgacacctttgggttcaatctggggatactggcaaagcagaaaattgtacaacctgtggtcaagcaataataattttaggcacccatcctagagaaaacttgaattcatagaaaaagtaggtacacgtaaatctgttcaaggaatcattgtttggcattgaaaataggagagagatcatgagaaattaccaaaatgtccaccaatagaatgagtgaatcacccgtggtatatttataaataaaatcttaaatagaaggtaaaacaaatcag

SEQ ID NO: 28709 - DNA, 3288 bp, Homo Sapiens
gctgtattgagttggtattctggatgatacaatttttagggctagaaagtttagagtgttggctggctcacaggctgcaaaggaaataatggtggagtccagaccacagcagtaatttcaattactaacacaaagaaacccattgtctgcaataatgaatataactgcagtgtcttgttttgttttaaattcttgtgtgcgatgaagggggcgaatctatcagacaacctatcaattgggctgatgatgtcagtgttccagtggcttctaacaggcgttaatacctgttggaaatggattatcattggctgggacgattgatccacagaccagcatggctgccactgctgctgtgagtcccagtgactacctgcagcctgccgcctccaccacccaggactcccagccatctcccttagccctgcttgctgcaacatgtagcaaaattggccctccagcagttgaagctgctgtgacacctcctgctcccccacagcccacaccgcggaaacttgtccctatcaaacctgcccctctccctctcagccccggcaagaatagctttggaatcttgtcctccaaaggaaatatacttcagattcaggggtcacaactgagcgcctcctatcctggagggcagctggtgttcgctatccagaatcccaccatgatcaacaaagggacccgatcaaatgccaatatccagtaccaggcggtccctcagattcaggcaagcaattcccaaaccatccaagtacagcccaatctcaccaaccagatccagatcatccctggcaccaaccaagccatcatcaccccctcaccgtccagtcacaagcctgtccccatcaagccagcccccatccagaagtcgagtacgaccaccacccccgtgcagagcggggccaatgtggtgaagttgacaggtgggggcggcaatgtgacgctcactctgcccgtcaacaacctcgtgaacgccagtgacaccggggcccctactcagctcctcactgaaagccccccaaccccactgtctaagactaacaagaaagcaaggaagaagagccttcctgcctcccagccccctgtggctgtggctgagcaggtggagacggtgctgatcgagaccaccgcggacaacatcatccaggcaggaaataacctgctcattgttcagagccctggtgggggccagccagctgtggtccagcaggtccaggtggtgccccccaaggccgagcagcagcaggtggtacagatcccccagcaggctctgcgggtggtgcaggcggcatctgccaccctccccactgtaccccagaagccctcccagaactttcagatccaggcagctgagccgacacctactcaggtctacatccgcacgccttccggtgaggtgcagacagtccttgtccaggacagccccccagcaacagctgcagccacctctaacaccacctgtagcagccctgcatcccgtgctccccatctgagtgggaccagcaaaaagcactcagctgcaattctccgaaaagagcgtcccctgccaaagattgccccagccgggagcatcatcagcctgaatgcagcccagttggcggcagctgcccaggcaatgcagaccatcaacatcaatggtgtccaggtccagggcgtgcctgtcaccatcaccaacacaggcgggcagcagcagctgacagtgcagaatgtttctgggaacaacctgaccatcagtgggctgagccccacccagatccagctgcaaatggaacaagccctggccggagagacccagcccggggagaagcggcgccgcatggcctgcacgtgtcccaactgcaaggatggggagaagaggtctggagagcagggcaagaagaagcacgtttgccacatccccgactgtggcaagacgttccgtaagacgtccttgctgcgtgcccatgtgcgcctgcacactggcgagcggccctttgtctgcaactggttcttctgtgggaagaggttcacacggagtgacgagctccaacggcatgctcgcacccacacaggggacaaacgcttcgagtgcgcccagtgtcagaagcgcttcatgaggagtgaccacctcaccaagcattacaagacccacctggtcacgaagaacttgtaaggccaactgcggcgggaggccctgaagatgcagtcccccacctgtgtcctccctgggcccctggtggaaaggagccctgtggctgccttgggcctgccctcagccccactcctgttctgcaactgtccccacaggaaggggctctgttccctgtattgtcctccttctgaagccccttggctctgccttggcccttcccctcaccacgagctcccggcctgcccagactgtggacactggccgtgcccaatgagacgttctaaaccaggacgcgtgggaacccttatttccaaaggaaaaacatgcatttcactccgtcgaggagcaaagtgagcccctaccccccaccccgatccccgctcccaacactgccggagtcgcgtcatgccatgccccctctcctgcacctccctggccctgccggccactgtggacgccctggggcttggcacccacctctggagaaactcggggccacctccactccatgtgcccagccccgccacaacctctcctccagcacattccagctctatttaaaaagtaaagacacccaccgactcctgatccccctctttttctatggagaacgttgccttatactctctacttcagatgatgaacactgtgtactgtgtgtgctttaaagaagttttatttaattgctcccttcttcctttccttgttattcacctccctgatgcctgctttcagttgagggttgggggcaatgatgagcatatgaattttttctcactctagcaattcccttttctaaatgacacagcatttaaactcaaatctggattcagataacagcacctgcacatcctgcacctcctccctctcccttcacctcacccctgcccggcccaagctctacttgtgtacagtgtatattgtataatagacaattgtgtctactacatgtttaaaaacacattgcttgttatttttgaggcttttaaattaaacaaaaatccaactttatttttagttgtaactgcttgaggtatgttttatgaattaagtgacagatttgttatcctttattaacgtactttgttggtcagcactgggctgacaaaaattttttcttgctaataaatttagttgcctgaggcaaaatcttc

SEQ ID NO: 28710 - DNA, 11390 bp, Homo Sapiens
aattcgtttttctcttaattttcccctgtaatttacactgggagagctgggaaatatgtggatgtaaatttctcagccacagagatgcaaagttatactgtggggaaaaaaaacttgagttaaatccttacatattttaggttttcattaacttaccaatgtagttttgttggaggccattttttttattgcagacttgaagagctattactagaaaaatgcatgacagttaaggtaagtttgcatgacacaaaaaaggtaactaaatacaaattctgtttggattccaacccccaagtagagagcgcacactttcaaacgtgaatacaaatccagagtagatctgcgctcctacctacattgcttatgatgtacttaagtacgtgtcctaaccatgtgagtctagaaagactttactggggatcctggtacctaaaacagcttcacatggcttaaaataggggaccaatgtcttttccaatctaagtcccatttataataaagtccatgttccatttttaaaggacaatcctttcggtttaaaaccaggcacgattacccaaacaactcacaacggtaaagcactgtgaatcttctctgttctgcaatcccaacttggtttctgctcagaaaccctccctctttccaatcggtaattaaataacaaaaggaaaaaacttaagatgcttcaaccccgtttcgtgacactttgaaaaaagaatcacctcttgcaaacacccgctcccgacccccgccgctgaagcccggcgtccagaggcctaagcgcgggtgcccgcccccacccgggagcgcgggcctcgtggtcagcgcatccgcggggagaaacaaaggccgcggcacgggggctcaagggcactgcgccacaccgcacgcgcctacccccgcgcggccacgttaactggcggtcgccgcagcctcgggacagccggccgcgcgccgccaggctcgcggacgcgggaccacgcgccgccctccgggaggcccaagtctcgacccagccccgcgtggcgctgggggagggggcgcctccgccggaacgcgggtgggggaggggagggggaaatgcgctttgtctcgaaatggggcaaccgtcgccacagctccctaccccctcgagggcagagcagtccccccactaactaccgggctggccgcgcgccaggccagccgcgaggccaccgcccgaccctccactccttcccgcagctcccggcgcggggtccggcgagaaggggaggggaggggagcggagaaccgggcccccgggacgcgtgtggcatctgaagcaccaccagcgagcgagagctagagagaaggaaagccaccgacttcaccgcctccgagctgctccgggtcgcgggtctgcagcgtctccggccctccgcgcctacagctcaagccacatccgaagggggagggagccgggagctgcgcgcggggccgccggggggaggggtggcaccgcccacgccgggcggccacgaagggcggggcagcgggcgcgcgcgcggcggggggaggggccggcgccgcgcccgctgggaattggggccctagggggagggcggaggcgccgacgaccgcggcacttaccgttcgcggcgtggcgcccggtggtccccaaggggagggaagggggaggcggggcgaggacagtgaccggagtctcctcagcggtggcttttctgcttggcagcctcagcggctggcgccaaaaccggactccgcccacttcctcgcccgccggtgcgagggtgtggaatcctccagacgctgggggagggggagttgggagcttaaaaactagtacccctttgggaccactttcagcagcgaactctcctgtacaccaggggtcagttccacagacgcgggccaggggtgggtcattgcggcgtgaacaataatttgactagaagttgattcgggtgtttccggaaggggccgagtcaatccgccgagttggggcacggaaaacaaaaagggaaggctactaagatttttctggcgggggttatcattggcgtaactgcagggaccacctcccgggttgagggggctggatctccaggctgcggattaagcccctcccgtcggcgttaatttcaaactgcgcgacgtttctcacctgccttcgccaaggcaggggccgggaccctattccaagaggtagtaactagcaggactctagccttccgcaattcattgagcgcatttacggaagtaacgtcgggtactgtctctggccgcaagggtgggaggagtacgcatttggcgtaaggtggggcgtagagccttcccgccattggcggcggatagggcgtttacgcgacggcctgacgtagcggaagacgcgttagtgggggggaaggttctagaaaagcggcggcagcggctctagcggcagtagcagcagcgccgggtcccgtgcggaggtgctcctcgcagagttgtttctcgagcagcggcagttctcactacagcgccaggacgagtccggttcgtgttcgtccgcggagatctctctcatctcgctcggctgcgggaaatcgggctgaagcgactgagtccgcgatggaggtaacgggtttgaaatcaatgagttattgaaaagggcatggcgaggccgttggcgcctcagtggaagtcggccagccgcctccgtgggagagaggcaggaaatcggaccaattcagtagcagtggggcttaaggtttatgaacggggtcttgagcggaggcctgagcgtacaaacagcttccccaccctcagcctcccggcgccatttcccttcactgggggtgggggatggggagctttcacatggcggacgctgccccgctggggtgaaagtggggcgcggaggcgggaattcttattccctttctaaagcacgctgcttcgggggccacggcgtctcctcggcgagcgtttcggcgggcagcaggtcctcgtgagcgaggctgcggagcttcccctccccctctctcccgggaaccgatttggcggccgccattttcatggctcgccttcctctcagcgttttccttataactcttttattttcttagtgtgctttctctatcaagaagtagaagtggttaactattttttttttcttctcgggctgttttcatatcgtttcgaggtggatttggagtgttttgtgagcttggatctttagagtcctgcgcacctcattaaaggcgctcagccttcccctcgatgaaatggcgccattgcgttcggaagccacaccgaagagcggggagggggggtgctccgggtttgcgggcccggtttcagagaagatatcaccacccagggcgtcgggccgggttcaatgcgagccgtaggacaaagaaaccattttatgtttttcctgtcttttttttcctttgagtaacggttttatctgggtctgcagtcagtaaaacgacagatgaaccgcggcaaaataaacataaattggaagccatcggccacgaggggcagggacgaaggtggttttctgggcgggggagggatattcgcgtcagaatcctttactgttcttaaggattccgtttaagttgtagagctgactcattttaagtaatgttgttactgagaagtttaacccttacgggacagatccatggacctttatagatgattacgaggaaagtgaaataacgattttgtccttagttatacttcgattaaaacatggcttcagaggctccttcctgtaatgcgtatggattgatgtgcaaaactgttttgggcctgggccgctctgtatttgaactttgttacttttctcattttgtttgcaatcttggttgaacattacattgataagcataaggtctcaagcgaagggggtctacctggttatttttctttgaccctaagcacgtttataaaataacattgtttaaaatcgatagtggacatcgggtaagtttggataaattgtgaggtaagtaatgagtttttgctttttgttagtgatttgtaaaacttgttataaatgtacattatccgtaatttcagtttagagataacctatgtgctgacgacaattaagaataaaaactagctgaaaaaatgaaaataactatcgtgacaagtaaccatttcaaaagactgctttgtgtctcataggagctagtttgatcatttcagttaattttttctttaatttttacgagtcatgaaaactacaggaaaaaaaatctgaactgggttttaccactactttttaggagttgggagcatgcgaatggagggagagctccgtagaactgggatgagagcagcaattaatgctgcttgctaggaacaaaaaataattgattgaaaattacgtgtgactttttagtttgcattatgcgtttgtagcagttggtcctggatatcactttctctcgtttgaggttttttaacctagttaacttttaagacaggtttccttaacattcataagtgcccagaatacagctgtgtagtacagcatataaagatttcagctctgaggtttttcctattgacttggaaaattgttttgtgcctgtcgcttgccacatggccaatcaagtaagcttcagctttcagtaattgttatcttagagattatgccacgtgaatgtattttattgtacatatggttaagctgagtaattcatattctgtattgtcatatatcaaatatagacatgtccaccaaaaattaaactttttaagcttcgagtgctgctggtcataaaaattaatttgtcctggttataagagtaatttttaaggttatttctaatgcatatctttaaatattttcgtaactgagagtcatatggagaaacttagtgtttgttgtaaaaagttgtgtttttttggctgagatacttagaatcaccaccagagggggcagttaagggaaaataaatgatacttttcagatattgaatagtgaaataaaaactttgggtcataagtaatgaaccaagagttattttctgatgtttaaaaatagaaatttgcgtttttaggttgtagggttgaaatttttggtaaagattctttaataatcctttgataatcacggtctacatttgtttatttttccttagaaagttttttttttaattaataatttaagataatttaatgttgagtaaatttatatcaagcattaatgactttgaaacttgtgtagatcagctgaggcaattttttggtgtaacacaactaatatgcagtttaacatatggtttaaatttgatgtaagtttttttttccccccagaaaactttagaaactgttcctttggagaggaaaaaggtactctgccagcaggtcacctcatatttaagaatttaatttcctgcatacaaagaggaaaatgtaaataaaaattgaaatggtattttcctttgcagagagaaaaggaacagttccgtaagctctttattggtggcttaagctttgaaaccacagaagaaagtttgaggaactactacgaacaatggggaaagcttacagactgtgtggtatgtaaattactgaattgttactggatattagtcttttagctgtatgttaagtgaatcatggaggaataactatcagcatagtaaaaaattctattatgacttcacttataagctataatgagattaaatgctaaagtttaccctttggtttgaaaggtaatgagggatcctgcaagcaaaagatcaagaggatttggttttgtaactttttcatccatggctgaggttgatgctgccatggctgcaagacctcattcaattgatgggagagtagttgagccaaaacgtgctgtagcaagagaggtaagcaaacaatgactgtcttgtgcattaacatgaagaacgctgccctgctgaaaatcagaaactatttctgaatttagttttaactcaagattttttctcttattaaaggtgtgttgggtttctggaccattttcttaagctagcttatttttcaaaagctaggtccctaaaagctattttatatctggtagttttaaggtggatacaagcgaagtatggtactacggttgggtgctttgaattatgcttgtgtttttttctgtttggatgacttttaccccaccactattttaggaatctggaaaaccaggggctcatgtaactgtgaagaagctgtttgttggcggaattaaagaagatactgaggaacatcaccttagagattactttgaggaatatggaaaaattgataccattgagataattactgataggcagtctggaaagaaaagaggctttggctttgttacttttgatgaccatgatcctgtggataaaatcgtatgtaagtgtctaaccacaaatgtactgtttttttccagtgtatcaattttgtgtatgttaacatctgtaactttattgaaaggtaaacttttgaagctgcttaatattgttgatttaatttaaaaggagtctgaatttttcattccagtgcagaaataccataccatcaatggtcataatgcagaagtaagaaaggctttgtctagacaagaaatgcaggaagttcagagttctaggagtggaagaggaggtaatttaattctgttctctttatttttgttcatatataagggcttgcttctaactggggcatttattgtaggcaactttggctttggggattcacgtggtggcggtggaaatttcggaccaggaccaggaagtaactttagaggaggatctggtgagtttcaagttctacgtgtttaaaggatgagtgtgcttttattttaaatatgattaggttttcattagtagaatcaagaaatccaacctaagtcaattttcctaagacttcaaatagattgtatcctggcaagctcttgtgatttggccagacaagaagttaatagagttgtattaataacagttgtatttatctggattaataatgtaacatgaagtgtcatccgaaaagctttgacccccatcaagtgtcattcttacgtataaataggatggaatctctaagattgagacttgttaagagagcccaaaattagctggagattaattatatgcttcatgttttgtgggtaaactggtagcactggtgtgtccttttctgcggttcttaattattgtgctgaggtagtaagagaactgaaaatgaatattagcaataatgctgaacagtttatagtaaacgtaatctttttttggcccctaacagatggatatggcagtggacgtggatttggggatggctataatgggtatggaggaggacctggaggtcagttttcctctacgttttggtttgtttatgtgactaatacttaactatatcgtatatttacttcatttatattttgagtttttaaacattttatattagtgtctataaatggcttgggtgatagtggtccagttatttctaagtagttttgccatcttagctgttatagcctaaggaatagagtgccattttaaatgaaaatgtaaagataaccatcagagtatctcatcttttctcaagcaaaatgattggatctagatatatctttgtacgtgccttctctggaaaagtacagaatactggatttaacagagtaaaacctaagggggtggtatatgtaggaaaaaatatgaaatatgtctaaacccgtaactagatgggaagcatcccaggataactttcaaaaagcgtaacctacggaaatgttccaaaatgtttagtgtgctcctggctgcagataaggttgtgaactaccattaaacatgaagtgtgatatatcattggcgtacagaaaaggctgatacacactgacagattttgtaacaagggacatttaaaactgagctggtaatagacttgatttctggtgttgccactcaataggcatgactaaatagtgtatctcactgttctactttttataattaaaattttagaggaagctgagttcttgtatttaactacaagttagagactcagcccacaagctttttttttttttttaatatggtttcttttttttttttttttttgagacggagccttgctctgtcacccaggctggagtgtagtggcgcgtctctgctcactgcaatctctgccttcccggtccaagtgattctcctgcctcagcctcctgagtagctgggattaccggcgtgcaccaccacgccagctaattttagtatttttagtagagacgggtttcccatgttggtcaggctggtcttgaactcctgacctcgtgaactgcccaccttggcctcccaaaaacgctggggttacaggcgtgagcaaccatgcccagccttttttttttttttatttttgttttgcagtatgtgaatgtgtaaatttttgtttatgtccgcacttctatttacagtaaagaacatactgtgtggagtgttgggtctgttttttttctttgaaatggggtctggctttgttgctcagactggagtgcagtggtgtgatcttggcttactgcaatcttagtctcaagccatcctcccacctcagcctcctgggtagctggaactacggggtgtgccaccatgaccggctaattttgtgtttttttgtagaggtgtgggggttttgctgtgttgccctggctggtcttgaattcctgggctcaagcaatccacccgcctcaacttcccgtactgctgggattacaggtgtgagctgctgcgcccagccaagaacattgtttcgttttttgagagggagtctctctctgtcgcccaggctggagtgcagtggtgtgatctcagctcactgcaacctctgcctcccgggttcacgccattctcctgcctcagcctccagagtagctagtactacaggttgctgccaccatgtccggctaatgttttgtatttttagtagagatggggtttcaccgtgttagccagggtggtctcaatctcttgacctcgtgatccgtccgcctcggccttcccaaagtgctgggattacaggcatgagccactgtgcccaaccgagaacattgttttaagatatgtaattcgtagagagacataatagaaactttatcttttgggccagtaggaggaagtgctcttttactttccctctagcccacactactagtctagcctcacagtccttacccacaatatacatgaagtatttcaagatacttaagatttttagttttgagggaaagctgtggaattacaggtatttaactgtgtgcacatggtgttatccatttggctgagtaaccccagccaccaaatgtttaccaaggatagttattcagtccttgaagctattttagaggaatttcattaaatatttcacatggaaacttggaaagctggaaatggatgtgaggagacagttcaaaatggtattgaaaatattaagtgattacttaaaggcttattttataataggtggcaattttggaggtagccccggttatggaggaggaagaggaggatatggtggtggaggacctggatatggcaaccagggtgggggctacggaggtggttatgacaactatggaggaggtaataaattcacctgcaacctttatgtgggaatttggaattaatgtctttgtaacacttgatcttttgtttccatgtttgtcactagatgcccataaaatttgtggataagtgtttgcttttatttgtttttatgggagctttgtcctaagtccttggtttaatgtttgtattgttctgagtattccaattttttaataggaaattatggaagtggaaattacaatgattttggaaattataaccagcaaccttctaactacggtccaatgaagagtggaaactttggtggtagcaggaacatggggggaccatatggtggaggtaatttataaaaattgaggttattcagatttttgtgattaaaggattagccttttgtgacttaaagggaagataacatactaagtagtttgtactgtgggcagtgctccatgtacggtcttagtgaaaataaagaaattttgcataaatctccacagaagtactcagcaagcagttatgacatcaaattgggattaggtagttggaggtgggtgtcagtagtttaatttctggtgggactcataaacagctaaatacagttgcaacccacattgcaagtggtatacattggaatgagggtctttgaagttaaatccttaaaccatgattcaaaccattgcttagcttatttttgaggtttttagctaggagtaaactagctttgtcttgggcttgatgtacttttaaaaaaatcccttactcagtccaaatgaggatgagagggtgaaaggaccctttatttaaaagaatagggtcagccacgaaataaaaatgtctatgaacccgagtaatttatctcctgagtaattctgctaactggctgcaaaggattaggatctgcttgtttaaaagactggatggatataaaatagaatcaactgtagtgttaggctgatcatgggaaatcaaagtaagtttgttttctcttgctgttccaacaattataggaaactatggtccaggaggcagtggaggaagtgggggttatggtgggaggagccgatactgagcttcttcctatttgccatgggtaagtagcttttgagttttacaattattattatcttgggagacatagctgcaggagtaaaagctttttaggatcatggttatctttccttaaaatctggttagatggataatttcataacccattttttttttaccctttacttctgttgaaacaggcttcactgtataaataggagaggatgagagcccagaggtaacagaacagcttcaggttatcgaaataacaatgttaaggaaactcttatctcagtcatgcataaatatgcagtgatatggcagaagacaccagagcagatgcagagagccattttgtgaatggattggattatttaataacattaccttactgtggaggaaggattgtaaaaaaaaatgcctttgagacagtttcttagctttttaattgttgtttctttctagtggtctttgtaagagtgtagaagcattccttctttgataatgttaaatttgtaagtttcaggtgacatgtgaaaccttttttaagatttttctcaaagttttgaaaagctattagccaggatcatggtgtaataagacataacgtttttcctttaaaaaaatttaagtgcgtgtgtagagttaagaagctgttgtacatttatgatttaataaaataattctaaaggaaattgtgtaattatagactttttatttttaaataagttaaggagtgggtagtataattaaggtcgttcaaagctg

SEQ ID NO: 28711 - DNA, 3650 bp, Homo Sapiens
cggcggccgcggatcccggcggcgatccgacctcgcagtctccccaggtccgccagcagccggttcagccagaatactgggatcttcagtggcaggaggagtaatcagaagacggagatgaattttaacactattttggaggagattcttattaagaggtcacagcagaaaaagaagacatcgcccttaaactacaaagagagactttttgtacttacaaagtccatgctaacctactatgagggtcgagcagagaagaaatacagaaaggggtttattgatgtttcaaaaatcaagtgtgtggaaatagtgaagaatgatgatggtgtcattccctgtcaaaataagtatccatttcaggttgttcatgatgctaacacactttacatttttgcacctagtccacaaagcagggacctgtgggtgaagaagttaaaagaagaaataaagaacaacaataatattatgattaaatatcatcctaaattctggacagatggaagttatcagtgttgtagacaaactgaaaaattagcacccggatgtgaaaaatacaatctttttgagagcagtataagaaaagcactacctccagcaccagaaacaaagaagcgaaggcctcccccaccaattccactagaagaagaagataatagtgaagaaatcgttgtagccatgtatgatttccaagcagcagaaggacatgatctcagattagagagaggccaagagtatctcattttagaaaagaatgatgtgcattggtggagagcaagagataaatatgggaatgaaggatatatcccaagtaattacgtaacgggaaagaaatcaaacaacttagatcaatatgaatggtattgcagaaatatgaatagaagcaaggcagagcaactcctccgcagtgaagataaagaaggtggttttatggtaagggattccagtcaaccaggcttgtacacagtctccctttataccaagtttggaggagaaggttcatcgggttttaggcattatcatataaaggaaacaacaacatctccaaagaagtattacctagctgaaaaacatgcttttggctccattcctgagattattgaatatcataagcacaatgcagcaggacttgtcaccaggcttcggtacccagttagtgtgaaagggaagaatgcacccaccactgcaggattcagctatgagaaatgggagattaacccttcagaactgacctttatgagggaattgggaagtggactgtttggagtggtgaggcttggcaaatggcgagcccagtacaaagtcgcaatcaaagctattcgggaaggtgcaatgtgcgaggaggactttatagaagaagctaaagtgatgatgaagctgacacacccgaagttagtgcagctttatggtgtgtgcacccagcagaaaccaatatacattgttactgagttcatggaaaggggctgccttctgaatttcctccgacagagacaaggtcatttcagtagagacgtactgctgagcatgtgtcaggatgtgtgtgaagggatggagtatctggagagaaacagcttcatccacagagatctggctgccagaaattgtctagtaagtgaggcgggagttgtaaaagtatctgattttggaatggccaggtattttctggatgatcagtacacaagttcttctggtgctaagtttcctgtgaagtggtgtccacctgaagtgtttaattacagccgcttcagcagcaaatcagatgtctggtcatttggtgttttaatgtgggaagtattcacggaaggcagaatgccttttgaaaaatacaccaattatgaagtggtaaccatggttactcgaggccaccgactctaccagccgaagttggcgtccaactatgtgtatgaggtgatgctgagatgttggcaggagaaaccagagggaaggccttctttcgaagatctgctgcgcacaatagatgaactagttgaatgtgaagaaacttttggaagataagtgatgtgtgaccagtggctcccagattcccaagcacaaggaaggatgggcattttgtggcttttaatttattgagcacttggacatgtagatcattttacttatacagtggaaacacataaataatttgcttctagaccagcctctgtctagacttgcttctagacagaatctcccagagtgtggaaatgttgccttagaaatggtgattaaaatcactcatttctattcattcctcaggcacttgagtgacagttgtttaccaggcactgtgtgtagccccagggtttggccattcaggggtgcacacatgggaccatgttagctgatgccagttgaaggccagggtatttgggaaggggaagggtattagagtcatgaccaagcaacccttctttttccctttgacttctacagaaatctgggcctgagacattgtctacaattgggttctagatacatcaggaacccatcttggataaataaatacctatcttttgttttgaaaacatctcagttttcaagactgctcttagtattacatgaacaatatttgtatgctgtatatattgtaaatatatataatatataaagttatatatttatgagaaacacgaattgtcttttaattgaaacttttaatcctgtagtataggagttcaccttcttaggactagagactgtgccttatagctgttaattcatttccccctgaacatcaaatatgcctgaagagaagaaagtctagattcttctatgagtaacgccccctcctcactcaggtaaatgtgtctggggatgcctgtccagcttaaccacgtgcatttggcctatgtaatcctgcccatggtggccgcagctaatcagaatcagatggaaaattaaaccgggtaatctacttctaagccttaagaatattccctgggacacagacactataattggaagtgctgagctctggggcagaaggatcaggtgaccttcgcaacaaagtttgcccccacctcacataggacccggaagcagcctgagctgtggcggaggatccaggaagctacggagagaagcagccagcatggtgttccgtgcctcccggacgtttttcaggaggcctggttggacttgggttcctggatggtgggattgttgtacagcctctcaggagaccctgctgtcaagactgtgtgtgtggatttcccacccttagaagctctactaagacatcaacggaattagggccttcctttttgccttgtgagcgccaaggaaaagaaactatctcggtcacgtgagcgccacgaaagaaactgtatcagtcatccagagaccgtttattgcccaacacgttattcttgctgttggtggggtaactagccgaggaagacacagcgccttcccttcaggagttgcgtctcctctgcaggccacgatggtctgctctggagcattgggtgaacacacaggctggctgctctgggcagcgccttcactctgaccctggagaaccatttcatttcatcctggtcagtctagagtctgtgcaccaggcagtccatccactgaaggctgtgtttattcttttcctgtgcccctcataatggaagaaagtaaactgcttatcccgagccttaaaaaaa

SEQ ID NO: 28712 - DNA, 4080 bp, Homo Sapiens
gcgcctgcggcgccgcgggcgggtcgcctcccctcctgtagcccacacccttcttaaagcggcggcgggaagatgaggcttcgggagccgctcctgagccggagcgccgcgatgccaggcgcgtccctacagcgggcctgccgcctgctcgtggccgtctgcgctctgcaccttggcgtcaccctcgtttactacctggctggccgcgacctgagccgcctgccccaactggtcggagtctccacaccgctgcagggcgggtcgaacagtgccgccgccatcgggcagtcctccggggacctccggaccggaggggcccggccgccgcctcctctaggcgcctcctcccagccgcgcccgggtggcgactccagcccagtcgtggattctggccctggccccgctagcaacttgacctcggtcccagtgccccacaccaccgcactgtcgctgcccgcctgccctgaggagtccccgctgcttgtgggccccatgctgattgagtttaacatgcctgtggacctggagctcgtggcaaagcagaacccaaatgtgaagatgggcggccgctatgcccccagggactgcgtctctcctcacaaggtggccatcatcattccattccgcaaccggcaggagcacctcaagtactggctatattatttgcacccagtcctgcagcgccagcagctggactatggcatctatgttatcaaccaggcgggagacactatattcaatcgtgctaagctcctcaatgttggctttcaagaagccttgaaggactatgactacacctgctttgtgtttagtgacgtggacctcattccaatgaatgatcataatgcgtacaggtgtttttcacagccacggcacatttccgttgcaatggataagtttggattcagcctaccttatgttcagtattttggaggtgtctctgcttcaagtaaacaacagtttctaaccatcaatggatttcctaataattattggggctggggaggagaagatgatgacatttttaacagattagtttttagaggcatgtctatatctcgcccaaatgctgtggtcgggacgtgtcgcatgatccgccactcaagagacaagaaaaatgaacccaatcctcagaggtttgaccgaattgcacacacaaaggagacaatgctctctgatggtttgaactcactcacctaccaggtgctggatgtacagagatacccattgtatacccaaatcacagtggacatcgggacaccgagctagcgttttggtacacggataagagacctgaaattagccagggacctctgctgtgtgtctctgccaatctgctgggctggtccctctcatttttaccagtctgagtgacagctccccttggctcatcattcagatggctttccagatgaccaggacaggtgggatattttgcccccaacttggctcggcatgtgaattcttagctctgcaaggtgtttatgcctttgcgggtttcttgatgtgttcgcagtgtcacccaagagtcagaactgtagacatcccaaaatttggtggccgtggaacacattcccggtgatagaattgctaaattgtcgtgaaataggttagaatttttctttaaattatggttttcttattcgcgaaaattcggagagtgctgctaaaattggattggtgtcatctttttggtagttgtaatttaacagaaaaacacaaaatttcaaccattcttaatgttacgtcctccccccacccccttctttcagtggtatgcaaccactgcaatcaatgtgtcatatgtcttttcttagcaaaaggatttaaaacttgagccctggaccttttgcctatgtgtgtggattccagggcaactctagcatcagagcaaaagccttgggtttctcgcattcagtggcctatctccagattgtctgatttctgaatgtaaagttgttgtgtttttttttaaatagtaggtttgtagtattttaaagaaagaacagatcgagttctaattatgatctagcttgattttgtgttgatccaaatttgcatagctgtttaatgttaagtcatgacaatttatttttcttggcatgctatgtaaacttgaatttcctaagtatttttattctggtgttttaaatatggggaggggtattgagcattttttagggagaaaaataaatatatgctgtagtggccacaaataggcctatgatttagctggcaggccaggttttctcaagagcaaaatcaccctctggccccttggcaggtaaggcctcccggtcagcattatcctgccagacctcggggaggatacctgggagacagaagcctctgcacctactgtgcagaactctccacttccccaaccctccccaggtgggcagggcggagggagcctcagcctccttagactgacccctcaggcccctaggctggggggttgtaaataacagcagtcaggttgtttaccagccctttgcacctccccaggcagagggagcctctgttctggtgggggccacctccctcagaggctctgctagccacactccgtggcccaccctttgttaccagttcttcctccttcctcttttcccctgcctttctcattccttccttcgtctccctttttgttcctttgcctcttgcctgtcccctaaaacttgactgtggcactcagggtcaaacagactatccattccccagcatgaatgtgccttttaattagtgatctagaaagaagttcagccgcacccacaccccaactccctcccaagaacttcggtcctaaagcctcctgttccacctcaggttttcacaggtgctcacaccacagttgaggctcacacacaggtctgtctgtcacaaacccacctctgttgggagctattgagccacctgggatgagatgacacaagacactcctaccactgagcgcctttgtccaggtgccagcctgggctcaggttccaagactcagctgcctaatcccagggttgagccttgtgctcgtgtcggaccccaaaccactgccctcctggtaccagccctcagtgtggaggctgagctggtgcctggccccagtcttatctgtgcctttactgctttgcgcatctcagatgctaacttggttctttttccagaaggctttgtattggttaaaaattattttctattgcagagagcagctgtgactcatgcaaaaagtattttctctgtcagatccccactctataccaaggatattattaaaactagaaatgactgcattgagagggagttgtgggaaataagaagaatgaaagcctctctttctgtccgcagatcctgacttttccaaagtgccttaaaagaaatcagacaaatgccctgagtggtaacttctgtgttattttactcttaaaaccaaactctaccttttcttgtttttttttttttttttttttttttttttggttaccttctcattcatgtcaagtatgtggttcattcttagaaccaagggaaatactgctccccccatttgctgacgtagtgctctcatgggctcacctgggcccaaggcacagccagggcacagttaggcctggatgtttgcctggtccgtgagatgccgcgggtcctgtttccttactggggatttcagggctgggggttcagggagcatttccttttcctgggagttatgtaccgcgaagtgtgtcatgtgccgtgcccttttctgtttctgtgtatcctattgctggtgactctgtgtgaactggcctttgggaaagatcagagaggcagaggtggcacaggacagtaaaggagatgctgtgctgcctacagcctggacagggtctctgctgtactgccaggggcgggggctctgcatagccaggatgacgcctttcatgtcccagagacctgttgtgctgtgtattttgatttcctgtgtatgcaaatgtgtgtatttaccattgtgtagggggctgtgtctgatcttggtgttcaaaacagaactgtatttttgcctttaaaattaaataatataacgtgaataaatgaccctaactttgt

SEQ ID NO: 28713 - DNA, 4859 bp, Homo Sapiens
cacgttgggtgacataatggggtttttttaattatagattcacactgcatttattcatcacccctgtcctctcatccataactcaaatttactaccagcaacacaaaatacaaagatgtgtccagtttcactacagctcttcgcgtttacaagtgtcgagcgcttgctttcggaacgcccttgtgattggccgagccaatgccagtgacatcaaccaacttacttttgattggaaggctggttgctgggactgtagcgtttgcaggaagtcacttaactgtttgggagctggaaaaccgaagctgaagttctcttttgccataggaacgagcgcaactgactaggaaagatgtgtcccaaagctccgcaagctggaacgtgagccaggaggcccggaccggccacgggaccgcgaggcactccgaaagtgtgcggctgccccttccctgcctcccagctgttacccttttaaatgtcagtgttcgaggctgtaggggtagcacgaggcagcgaaacggaacagtcggattggccgcacgcctcagttctagacgcacctctccaccgaagccgttctgactggcagggggagaaagtaaacagagttgaatcaccctccccactggccaattggagggggtttggtttgtgacgtgatgggattctgcgaaattgttactgagcaagagaatgccggaacgtgcggaccggccggagcaggggttcagaagccgtcagtggactcgggaaaaagtgtctcttagacctggcgctcggcggggccctcgccacccgcgtcggggtgatcgggtgaatgtcctggggctttggctcgacggcgaggcggccgagggcgtgcacctctcttgcagtttcctctcccagcgcctcgggggcgttttcagtcgaataaacttgcgaccgccacgtgtggcatctttccaagggagccggctcagaggggccggcgcgcccgtcgggggatcgcggccggcgcggggcaggggcggcggctagaggcggcggcgcggcggagcccggggccgtggatgctgcgtgcggaggcgctgccggttacgtaaagatgaggggctgaggtcgcctcggcgctcctgcgagtcggaagcgccccgcgcccccgcccccttggccgccgcgccgtgccgggcgggcgggtcgtcgtccgaggccagggagggcgagccgaacctccgcagccaccgccaagtttgtccgcgccgcctgggctgccgtcgcccgcaccatgtccgcggccgcctacatggacttcgtggctgcccagtgtctggtttccatttcgaaccgcgctgcggtgccggagcatggggtcgctccggacgccgagcggctgcgactacctgagcgcgaggtgaccaaggagcacggtgacccgggggacacctggaaggattactgcacactggtcaccatcgccaagagcttgttggacctgaacaagtaccgacccatccagaccccctccgtgtgcagcgacagtctggaaagtccagatgaggatatgggatccgacagcgacgtgaccaccgaatctgggtcgagtccttcccacagcccggaggagagacaggatcctggcagcgcgcccagcccgctctccctcctccatcctggagtggctgcgaaggggaaacacgcctccgaaaagaggcacaagtgcccctacagtggctgtgggaaagtctatggaaaatcctcccatctcaaagcccattacagagtgcatacaggtgaacggcccttcccctgcacgtggccagactgccttaaaaagttctcccgctcagacgagctgacccgccactaccggacccacactggggaaaagcagttccgctgtccgctgtgtgagaagcgcttcatgaggagtgaccacctcacaaagcacgcccggcggcacaccgagttccaccccagcatgatcaagcgatcgaaaaaggcgctggccaacgctttgtgaggtgctgcccgtggaagccagggagggatggaccccgaaaggacaaaagtactcccaggaaacagacgcgtgaaaactgagccccagaagaggcacacttgacggcacaggaagtcactgctctttggtcaatattctgattttcctctccctgcattgtttttaaaaagcacattgtagcctaagatcaaagtcaacaacactcggtccccttgaagaggcaactctctgaacccgtctctgactgttggagggaaggcaaatgcttttgggttttttggtttttgtttttgtttttttttctccttttatttttttgcgggggagggtagggagtgggtgggggggagggggtaaggccaagactgggtagattttaaagattcaacactggtgtacatatgtccgctgggtgagttgacctgtggcctcgcacagtgattctaggccctttatgcttgctgtctctcagaattgttttcttaccttttaatgtaatgacgagtgtgcttcagtttgtttagcaaaaccactctcttgaatcacgttaacttttgagattaaaaaaaaaaacgccatagcacagctgtctttatgcaagcaagagcacatctactccagcatgatctgtcatctaaagacttgaaaacaaaaaacagttacttatagtcaatgggtaagcagagtctgaatttatactaatcaagacaaacctttgaaaggttacactaagtacagaacttttaaaccttgctttgtatgagttgtactttttgaacataagctgcacttttattttctaatgcagaggatgaataagttaaatacatgctttgaggatagaagcagatgttctgtttggcaccacgttataatctgcttattttacaatatacacgtttccctaagaaatcatgcgcagagatgtgagggcagaatatacacaacagatgctgaaggagaaggagggtagtgttttgcaaaagaaaaagaaaagaaccaacagaattttaactctattaacttttccaaattttcctatgcttttagttaacatcattattgtatcctaatgccactaggggagagagcttttgactctgttgggttttatttgaatgtgtgcataacagtaatgagatctggaaacacctattttttggggaaaaaggtttgttggtctccttcctgtgttcctacaaaactcccactctcaggtgcaagagttatgtagaaggaaagggagctgaaataggaacagaaaaatcaacccctataactagtgaacaccaagggaaaataccacaatgatttcagaggagactctgcaaaatcgtcccttgtggagaatgcaggcaacatggaatactacgaatgaaatcacatcactgtatcttttacatcaatagcctcaccactaatatatcttgtatctaggtgtctataatggctgaaaccactacatccatctatgccatttacctgaaaacttaactgtggcctttatgaggccagaaaagtgaactgagttttgtagttaagacctcaaatgaggggagtcagcagtgatcatgggggaaatgtttacattttttttttcttcagaagtaacgctttctgatgattttatctgatatttaaaacagggagctatggtgcactctagtttatacttgcgctctgaaatgtgtaaacatagggtgcctacctatttcacctgacccatactcgtttctgattcagaatcagtgtgggctcctgcagtgggcgcgggtcacggctgactccaacttccaatacaacagccatcactagcacagtgtttttttgtttaaccaacgtagtgttattagtagttctataaagagaactgcttttaacattagggactgggagcagtccatgggataaaaaggaaagtgttttctcacgagaaaacatgtcaggaaaaataaagaacactttctacctctgtttcagatttttgaaacacttattttaaaccaaattttaatttctgtgtccaaaataagttttaaggacatctgttcttccatacgaaataggttaggctgcctatttctcactgagctcatggaatggttctgcttatgatactctgcacgctgccttttagtgagtgaggagtttggggttgcctagcacttgctaacttgtaaaaagtcatctttccctcacagaaagaaacgaaagaaagcaaagcaaagtcagtgaaagacaatctttatagtttcaggagtaaatctaaatgtggcttttgtcaagcacttagatggatataaatgcagcaacttgttttaaaaaaatgcacatttacttcccaaaaaagttgttacttgccttttcaagtgtgacaaactcacatttgatattctcttatatgttatagtaatgtaacgtataaactcaagcctttttattctttgtgattaaatcctgttttaaaatgtcacaaaacaggaaccagcattctaattagatttactatatcaagatatggttcaaataggactactagagttcattgaacactaaaactatgaaacaattactttttatattaaaaagaccatggatttaacttatgaaaatccaaatgcaggatagtaatttttgtttacttttttaaccaaactgaatttttgaaagactattgcaggtgtttaaaaagaaagaaaagttgttttatctaatactgtaagtagttgtcatattctggaaaatttaatagttttagagttaagatatctcctctctttggttagggaagaagaaagcccttcaccattgtggaatgatgccctggctttaaggtttagctccacatcatgcttctctt

SEQ ID NO: 28714 - DNA, 6974 bp, Homo Sapiens
cggtgctggagaagtttgcgctgcggttcgtgagcgcagggtgcgggccccgccggccgctgcgcgcccgctgccatggctttccgcaggaggacgaaaagttacccgctcttcagccaggagttcgtcatccacaaccatgcggacatcggcttctgcctggtgctctgcgtcctcatcgggcttatgttcgaggtcacagccaagactgcctttctatttattttacctcagtataacattagcgtgcctacagcagacagtgagaccgtgcactaccactatggccctaaggacctggtcacaatcttgttctacatcttcatcaccatcatcttgcatgctgtggttcaggagtacattttagataaaatcagcaaacggcttcatctctccaaagtcaaacacagcaagttcaatgaatctggacagctggtcgtctttcatttcacctcggtgatttggtgcttctacgtggtggtgacggaaggatacttaacaaacccaagaagcctctgggaagactacccgcatgtgcacctccccttccaggtgaagtttttctacctatgccagctggcctactggctgcacgcacttcctgagctatacttccagaaggtacggaaggaggaaattccccgccagctccagtatatttgcctgtacctggtgcatatagctggagcatacctcttaaacctgagccgcctgggcctgatcttgctgctgctgcagtactcaactgagttcctcttccacacggctagactcttctactttgcagatgaaaacaacgagaaactgttcagtgcctgggctgctgtttttggggttacccgcctcttcatcctcacccttgccgtgctggccattggctttggactggctcgcatggaaaaccaggcatttgatcccgagaaagggaacttcaacactttgttttgcaggctctgcgtgctgctgctggtgtgtgccgcccaggcctggctcatgtggcgcttcatccactcccagctgcggcactggcgggaatactggaatgagcagagtgcaaagcggagagtcccagccacacccagactaccagccaggctcatcaagagggaatctggttaccatgaaaatggagtggtgaaggcagagaacggaacctccccacggactaagaaactcaagtctccctaaggccaaagtgctaagaacaggaatcctcttggtgggggccgagcagggggcaaggagcccaggccccctccctgcctcctccttcctgcctgtgatgctccgtctcaaacagccgaaacctgtcttgcaatggggggagggggcgtttcgctttccttcttcttggcttcctcttattcttccacaaaccattctcaataaagccaaaaatctttctctttctccccctcaggccacctcctgtcctcactcctgtcctgtgctggcttttctggaacgccaggcgcccatggctggcacctttctgcttgctctgtttcttgccttatggctgctgcttttcctttttacttcctattttcaccttatcttgcaatttttctgtctgatttttacaatgggaggggagctaagattgcagtcctgtccttcggtcccccagggcctgccggtcagaagcctggggctggtaggcccttggtggtcctcatgtggatgggcaagaagagagcggccatctcggatcataatctccttggtgctgattaactgacgagatatatgattccagttctgcatgtaccatcttgaggcacagcagccactgctcgttgtaaatgccaaggcatttggctttgggacgtgacaactcaatccagaaggatggtgtgaactcggttgggtcccgtgactcgagctcctaccagtggctggccgcggattggaagccagcctgctgtcgctctgtggggaggacatgtcttcccactgcttagagcgagagcagagcaaactgcgcagcaggcacctccagaaaggtaatggtggcagaacccacagtggagtcgacctaggcctttctccagcagtcccagtcgccattgctttttcagccattcacaagcattcaaaaccaaaccaaacagcagttcatatacctgcctgagataggctggtcctcacctccagagccagccagccccgtcaggggccaaacttactaccttgacttcatctctagctgcagaaacactaagtctcaagggcttcagccccatgctggtcccttggtgttcagggagggtcacttggaccgctgttcatctggccgcccttgttgagtgttctttggaattgtcgttttttgagcacaactacagcattttagactgcatgaaaccatgactgactgagagtcactctctgggtagatgataggcgcctttctggccccttccctcacagattctttcccctcccctccacctgaagagaaggcctccaagtccttttggtgccttgtgaggacttttagaaggggcgttcagctttaaaaagccggtcctaattacggccggacgcagtagcttacgcctgttatcccagcactttgggaggtcgaggtgggcagatcacctgaggttaggagttcaagaccagcctggccaacatggtgaaaccccatctctactaaaaatacaaaaaattaggtgtagtggcaggcacctgtaatcccagctactcgggaggctgaggcaggagaatcgcttgaacctagaaggtggaggttgcagtgagcggagattgtaccatggcactccagcctggacaacaagagcgaaattctgtctaaaaaaacaaaagtcccaattaagaacctccgaactctgttttgaggcaaaggggagtagttcttggtaggtgcaggaatagtagtgtcatttggaatactggtcatctttctgacatcacagtagaaaccaaaccttggatttagattcaaaaggggggaaatgggtcttttcatcaaggcaactccccttctccaagtcacttacatcatagataaattttagcttcccagtaactgagggatttgtttcctaacgccattggaggccttcatccctctctacgataaggttgcagaaatgggaagagctacccgtggttgcttttgattacccttaggaagtgagacagtgtttttgaaaatatgtatttctcccatttctccctctccttccctgacacttctctgggctgcacagcagaaacgttggtaaaagggcagtttggtttcaacacagcagacctgatatgggatcccttagccactttagtcaaacagccctgacagagtctataattgagttcaggccccccaccttgcctaataactgcaaatcgcatgttcagccagcagcctcctaagcccaccttcctcccccattagagaacacccatcctaggtgctctccaggctgtgtcattggcagggcttcacatgcaggaggcctctctcaggtgagtccaggttaaactgttgagttgtggcttcaacagatatgtatggcatgctgggatgtgccaggtgcctgcgttgtgccagttgctggagaggtagtgtgagcagagcagctgaaatcttgccatcaagcaaccctcattctcatgcctgtaggtttccattgctctgtcccaggacacttgcgtgccagagacgccacaacttcatgtccctgtctcttgcaagctccccgtgctgccagtacttcatgccttggatgtggtcccaccagcccagtggctggggtcagcttaggctctgcttcccagtggacgggtgtgctaagggtttattttatgtaaaaaaaaaaaaaaaacaaaaaaaaaccctgagaccatgagtggggctggcatcttgccagcctgggcttcagggatgtttggggggggtggttagagggtagttgtagggtactttgtcacccccctccccctgccaccctccctggcacgtttatttcacagcagagccaagtctgtggcaggttgacacagactgtgttgccagagctgaaataattccacttcatcctatgagcgtgttgggctagcttgttctaattttggccactttggctgttttcttcagttttatgcattctctcctgccccaaagtgccaagccatttgtgaaggctctgccagacacctccaagcttgagagctcagcaccatgcaccaagagcaggagaaaagacgtaaacctaccccagcaactgtggcctctcgacagccctggctaactaacttacatttgtggggaagccaacagacacagcaggaggagagggaggtggcgctggtggaccaaggatctgtgctacccgctcccctccttggaggtgcagtgatgatgggagttatttttaccatccgggcgctgatagctgcactattaataaattgcatgtgttccttttgaaggtaggggatggttctgggtgagaggggagcaggctgagccggcgggggatctgctgtcctcccttttgagtcagttctaatcccatgtgtgtctgggccaccagaccgaaatggttgctgagaaacttgtctgttcatgtcccaaggcataacttcccaacatttaagaaaccccaatagacacctctgccctggccacgttcacagatccttctcttgaccggaaaccctgggaccctaagaacccctgaagcttggggtgggtgtgtgcttctggggtctcttttgggacctcctttgtcagtaccccttcttttttctaagcagctaataagaggttgggtgaaagagtgcatctcctcccaggattccacaacaaaattcttatcttccatggatgctttaattggaagtgggttgccgacccccttgtgcctagaaaaggcctttgcttgggtttcctttgtatgcttcagccttcctagttggtttttctaggcctggtgtgagaggtagggaagtctgcacataactaattcttttgcttaagggcctatggcacaagtgcacaaacttcaattcttgatgttctaagctctctcctctaacagagggagtgctgaaagcttttgagtcaagacaatggagtgctcttcctccctcactctgccttccgagcttatggttccttttctcaggagaggattttcaggattattggaggattaggtcattgtcagatgactggaaaacctaaataggatctctctccagctcaaggttgtcccagtgaggaagactttaccaacttctcactctaccccactactcacatgagtgttagctccaccttgcaaaggctgaagaccagttctccccagtgaaagctgcctcattcttttatggagttccctggagtggcagagctataaagacgagcattgggatttgcagtctccatgtagcctttcgtgcttggcaacccctgtagactttttgtcccaagcagattgcgtgcgtgcgcctgtgtgtgagaataagtgccttactttgctgtgtggttttcaacttgtactccgtggccagcccccagttgccagggctcgacggcagccaaggacaccatacctcagtatagttatatataaaatggacacggattgtgacagtttcaccccatttgtttctaaccccgctgcccaggattagggtctgtggtgtgttctgttttgtttttggtttctcccttgtgtcagttctcttctggcccagctgggtggctgtggaagtctgtgaggtggcccaaccacaagcatacctattaagagaagcccagagcttccagcccccacttcgaaaactctcctctggccccacatagcaaactccttctccgttattttccccacccccagattttttttaaaaggcccacttgccataacctcttttggtctattttgcttcccattcagcccaaagtttatatgataaaggtgtttacttttacttcccagtctccaagtgctaacacataaacacatacatgtctgactgttgcagaactgttcgagctcctaattcagtgttaccttgttttagtcgcagcaaccctctcccctaccccttgcccgcccacgtttttctcactcttccgggttgtgcaataactctcccagccagtggtcctttccacagcctttctgtcccttaaaacacctgcaactgggggagaaatgggacccatgggagggggagtcatcatcccttacacaagaaatagccactttccttttgttgtcattcttgtgatcctgggtgggtttctgtggcactcttttagaacatgtagcatcatcttagaggtctatttttaaaaaatgtgttgaagaggaaaaaaccattctcacgatggggcttaagtcattgtccaggaataagattggcgtggtgcccatgacatcaccgtcactctgcctaaaagcactctagagctacttgttcacgtggagaggaaggatattttgcgaagcaacagccgcaggtggagagccctgttcacctgatagggtctagctgtgacagtaaatataataccgctgtttccttgggtacagatttgagtgttcatgtgatgagactgtaaacctcatttttcggttcctctgtttaaaaaaacatctgaaggatgaactaaggctgctggtgccctgagcaactgataatgcaaatgtggacaaagtgtctgttttctactctagcctgttcatatggaccaaatttcaacaaggaactcaaggaaaatttgtacctgccgtatttatgctttcatgtaaaaaagggttggggggaggggtgtctttttgcttttggtgaactttttttcaaaatcatttttccactgtttctgtctggttttaaaacaaattacagttttgtatggattttttaaatgtacattttggaacaaatgatcaaatattttctgaaataacaataaaaggcagaaaatt

SEQ ID NO: 28715 - DNA, 1096 bp, Homo Sapiens
gaattcattagccatggatgtattcatgaaaggactttcaaaggccaaggagggagttgtggctgctgctgagaaaaccaaacagggtgtggcagaagcagcaggaaagacaaaagagggtgttctctatgtaggctccaaaaccaaggagggagtggtgcatggtgtggcaacagtggctgagaagaccaaagagcaagtgacaaatgttggaggagcagtggtgacgggtgtgacagcagtagcccagaagacagtggagggagcagggagcattgcagcagccactggctttgtcaaaaaggaccagttgggcaaggaagggtatcaagactacgaacctgaagcctaagaaatatctttgctcccagtttcttgagatctgctgacagatgttccatcctgtacaagtgctcagttccaatgtgcccagtcatgacatttctcaaagtttttacagtgtatctcgaagtcttccatcagcagtgattgaagtatctgtacctgcccccactcagcatttcggtgcttccctttcactgaagtgaatacatggtagcagggtctttgtgtgctgtggattttgtggcttcaatctacgatgttaaaacaaattaaaaacacctaagtgactaccacttatttctaaatcctcactatttttttgttgctgttgttcagaagttgttagtgatttgctatcatatattataagatttttaggtgtcttttaatgatactgtctaagaataatgacgtattgtgaaatttgttaatatatataatacttaaaaatatgtgagcatgaaactatgcacctataaatactaaatatgaaattttaccattttgcgatgtgttttattcacttgtgtttgtatataaatggtgagaattaaaataaaacgttatctcattgcaaaaatattttatttttatcccatctcactttaataataaaaatcatgcttataagcaacatgaattaagaactgacacaaaggacaaaaatataaagttattaatagccatttgaagaaggaggaattttagaagaggtagagaaaatggaacattaaccctacactcggaattc

SEQ ID NO: 28716 - DNA, 5241 bp, Homo Sapiens
ggcagctcgggctcgtccagcgacgaggagcacggtggcggtggcatgagggtcggaccccagtaccaggcggtggtgcccgacttcgaccccgccaaactggcaagacgcagtcaagaacgggacaatcttggcatgttggtctggtcacccaatcaaaatctgtcagaagcaaagttggatgaatacattgccattgccaaagaaaagcatgggtacaacatggaacaggctcttgggatgctcttctggcataaacataatatcgaaaagtcattggctgatttgcccaactttacccctttcccagatgagtggactgtggaagataaagtcttatttgagcaagcctttagttttcatgggaaaacttttcatagaatccaacaaatgcttccagataaatctatagcaagtctggtgaaattttactattcttggaagaagacgaggactaaaactagtgtgatggatcgccatgcccggaaacaaaaacgggagcgggaggagagcgaggatgaactggaagaggcaaatggaaacaatcccattgacattgaggttgatcaaaacaaggaaagcaaaaaggaggttccccctactgagacagttcctcaggtcaaaaaagaaaaacatagcacacaagctaaaaatagagcaaaaaggaaacctccaaaaggaatgtttctttctcaagaagatgtggaggctgtttctgccaatgccactgctgctaccacggtgctgagacaactagacatggaattggtttcagtcaaacgacagatccagaatattaaacagacaaacagtgctctcaaagaaaaacttgatggtggaatagaaccatatcgacttccagaggtcattcagaaatgtaatgcacgttggactacagaagagcagcttctcgccgtacaagccatcaggaaatatggccgagattttcaggcaatctcagacgtgattgggaacaaatcagtggtacaagtgaaaaacttttttgtaaattatcgacgccgcttcaacatagatgaagttttacaagaatgggaggcagaacatggtaaagaagagaccaatgggcccagtaaccagaagcctgtgaagtccccagataattccattaagatgcccgaagaggaagacgaggctcctgttctggatgtcagatatgcatctgcctcctgagaaactggtggctttgaacacttggtgtggactactgtgttatccgggatatcaggtattatgagacatcacctagccatctgcatcacatctctctggacaagcagctattaccaaaaaaggcatatacttccagtcctgtgctccatctgccttaattctttgctcgttcctccatgttggcgccacttcccagagagctccactgcatctcacactctgcccacgtgctggggaagtctcacggcctgcacatctcttgtgactctgggaaccgcctctcccgccggagcccccgagccccaccaatggcagctcttcccagtcagcagcttcagagcaggcagtctccttggaaggcccgactctgttcctgcatggcctgcagtttctactttgtgcatagagtcattttcagagtcaccgcgaccctgttggccttctagaaagtttcttttgttcttttctgagacaaccacctaagtgataatacgcttttttggaaactaatatatattgccagactgcatcataacctttatcatgccaagcatcctgatgcaactcacatttccctaaacatggggtacagttatgatttataaattgagttggcttaaatctccctcttctcccttcccaagtgttacaaagatcatttactgcaactgtcgttggacactgtagcttaaagggaacgtggacctcaatgctttctgccttcaacttttcagcattgtgaccccagggtggttgccaccccatcttttcctgaccccccccacccccccacctccaagaggttcggcccacatcactgtacctggtgcttgtaaatttggaattggtgccttctccttttggcaaccatggttatcaatcctttttctgttttagtgtcttatttcttctttcaagttatttgctagccaaagatgacatcactgagattaggagacaggggagagcttgctgcagattctgacagtgcagattttaaatgtcaggatattagaatagctggcgctggtttatgaaagctgcgcgttgttccgcgttctctcggtgtgcctggccttttatgtggcactctgtatgtcagtttgtgtccttcatgtgctgatgtgattacacaaacaccatgcactctcttttcatatcagagtacaggacagagaagtgatcaatgtattggtctagtgagactgagatgaaaagaaataacctacagagtggtctgtaatgccttttggttggactgggaacaagtaaaaatttctaataaacattttgagacttccagaatcacttttgttatcttatcagaccatgggcctgctgagggttgagcagacagcctgcattctaacataccctgttcccaccccacggccattcagactgcactcaatacgctgaagtcgcttttgttgttgttgttgttgtttgcatcatttggatttttttcctgctttcaataccaaaaaaatgcagatgctttaaggcctaaacagaattctgaagaatttaaaatatgcaattaaagtttgatatgttttgtctcccaagcaccttgttttttgttgttgttgttgttgttgaagtcagctgattttctctttagaaagagggtcagctagaaacctaggttttttggaattgtaaatttttttttagtatagtctggagagaaaggtcattcaaaaggaaagtacaatgggacttgctgcccttcatcatctcgttcccgtgccaggtgtgtgttggtcacgtaaaagcctgggaagcatcagaggagtcccggattgctgctgctacctggagacagggttagcaaaataacactagtgatgagggagaggcttcttttcaccataagcctgctgtgtacaccgagggcggcaggagaagcatgggaaggagtcagcctaagtttgcacattgcataaagggtacactaaggtatgagctgaagctttaggttctccgtgcttccctcaagacctccttcttgctaacagaagcagtaggcaattgctgcagtgcgtttctcaccctgccaataggtctgtctgtatctctgttaaggaaaatagcctggtccctcctggcagtgcttggaagcttgatgctaatttttatatagcgtggcaaactgaccagcagtgccaggccttgatctgtattctgcactatccctttacttggttcctggcactgaatggtctccagccctgaagaatcacgtgtgatcacagcagctgacctgggctttctccccgagaggaaggggcatgtcatttttatttgacagagggaaaatgggagctgtccttgactgcctttgttgtgctttcccgcgtaagatagcactgtgttttaaactgttgcattacactgtctttgcaatgatgtaaatgtaagaaatcacttagctttaaaagcgcagtggtttgatcttatttatatgaagactttttaacatatcaagaattaggtgcattggcaggtagggtttggggtgtgataactgcttcagatggaatgttcacttaagctttgtcttcttaaaaattatcaatgtgaatgtcataattatatatatttttgtggaaaattttctcctaagtataagttattgtgcaaaatatagtgtcattgatgcaaataatagtttaacttttagtttagaactcctaaaagatataaattgtattgcatatgcattaaaagtttgttttatttaattttatgtagatgtgtgaagtgttaggtaaaatttttttcacttatccatttaaacaccttgttacttgaatattgtgttgactggtctgcaacagtgatccattctgtaatatagctcttttaactgggaaggaaccacaccccagttgtgccgattacattagtgttggcacacagtcgggtgctagtgtaacacaaatgccgcgttgtctgggtgtacagtgtttgtggagacgccacttcctcaaaatggtttttgattgtttttaacctataagacgttctgatgctcacaaacctctattcaacacacaaaacaaacatgaaaaggtagttagttgggttgtaacagcttactggggtggactcataaaacagtggctttctgttcatctaaagtttcctcagataccacagaccactgttaagtgtgctcattgtcactttaaatttcaacgataccctatttttgtcattctaaatatcagatgtactattggtataattgcacaccaaaaataagccaaacagtgcattacgctaactggatccctgcttttatgtgagctaaggaaagatggagccaactccaacgagggcctctttttctctcttgtctagcctgtttctaaaccgaatgatccaggattcaagcttctattgtcaagtgaaactttcctcagatggactccaggtagccaggtcacctaaacctagtggtcctgtgcgatgctctttctgccagtccctgaatctctgcagcttctcttacctgtcttacctgtagtaaagcacaattgcagtggcgtcgcattcagaagaagggaaggtcagcagaggctatgcatgttgtgtgatgatgagtgtttacagccaccttctcctaaaacgaaatttataccggggtggatagtattccattaggtagacttatcgactttgctaagtgctttttagacagcttaaaaaattttcaagattttaaaagatgtataaggttaagtttgcaaatataatggaaatgctgtatatcttttgaagtgatgaaatccacgttggaattttaaagaaaatatgttgtaataatgctgttgtaagtaatattttaatgtctctttgcctgttttctatttcagcacattcattgtggtgaatgttcatagcattataactgcttagccattgaatgataacatttgttagtggaaattggaaaatttatttgtgaaattctgcagaattcatttttctatttccaatatttgctgaggggttaaataaaaattttcaagccattgatgt

SEQ ID NO: 28717 - DNA, 3066 bp, Homo Sapiens
ggcacgagggcggaggcagcccgagggggcggttgcatgtgtgccagacgttcgtagcccactgagcttcctcacgccggctgtcgcagcgcctagccccacccggcggcctctcctgcgcttccggggccgtggcgagctagtgcgcctgcgtgccggcccatccgcgcgccttgcagctgtccttgcgtcggccagcggccagacagttcctgcagcgcttaccgcctggcctctcggttccgcggcgcaccggagggcagcatgtcgcggcggcggcacagcgacgagaacgacggtgggcagcctcacaaaaggagaaagacctctgatgcaaatgaaactgaagatcatttggaatctttaatatgtaaagtaggagaaaagagtgcctgctctttggagagcaacctagaaggcttggctggtgttttggaagctgatcttcctaactacaagagcaagatcttaaggcttctttgtacagttgcacgcctattacctgagaagctgacaatttatacaacattagttggactactgaatgccaggaattacaattttggtggagaatttgtagaagccatgattcgtcaacttaaagaatcattgaaagcaaacaattataatgaagccgtgtatttggtccgttttttatctgatcttgtgaattgtcatgtgattgccgccccatcaatggttgctatgtttgaaaattttgtaagcgtaactcaggaagaagatgtacctcaggtgcgacgagattggtatgtgtatgcatttctgtcatctttgccctgggttggaaaggagttgtacgaaaagaaagatgcagagatggaccgcatctttgccaacactgaaagctatcttaaaagacgccaaaagactcatgtacccatgttacaggtatggactgctgataaaccacatccacaagaagagtatttagattgcctgtgggcccagattcagaaattgaaaaaggatcgctggcaggaacggcacatcctaagaccttatcttgcctttgacagcatcctgtgtgaagcactgcagcacaatctgcctccttttacaccacctcctcacactgaagattcagtgtacccaatgccaagggtcatcttcagaatgtttgattacacagatgatcccgagggtcctgtcatgccagggagtcattcagtggaaagatttgtaatagaagagaatcttcactgcatcattaagtcccactggaaggaaaggaagacttgtgctgcacagttagtgagctatccagggaagaacaagatccccttgaactaccacatagttgaggtgatctttgcagagctgtttcaacttccagcaccccctcacattgatgtgatgtacacaacactcctcattgaactgtgcaaacttcaacctggctctctaccccaagttcttgcacaggcaactgaaatgctatacatgcgtttggacacaatgaacactacctgtgtagacaggtttattaattggttttctcatcatctaagtaacttccagttccgttggagctgggaagattggtcagattgtcttagtcaagatcctgaaagtcccaaaccgaagtttgtaagagaagttctagaaaaatgtatgaggttgtcttaccatcagcgtatattagatattgttcctcctaccttctcagctctgtgtcctgcaaacccaacctgcatttacaagtatggagatgaaagtagcaattctcttcctggacattctgttgccctctgtttagctgttgcctttaaaagtaaggcaaccaatgatgaaatcttcagcattctgaaagatgtaccaaatcctaaccaggatgatgacgacgatgaaggattcagttttaacccattgaaaatagaagtctttgtacagactctgctacacttggcagccaaatcattcagccactccttcagtgctcttgcaaagtttcacgaagtcttcaaaaccctagctgaaagtgatgaaggaaagttacatgtgctaagagttatgtttgaggtctggaggaaccatccacagatgattgctgtactagtggataagatgattcgtacacaaatagttgattgtgctgccgtagcaaattggatcttctcttcagaactatctcgtgactttaccagattgtttgtttgggaaattttgcactctacaattcgtaagatgaacaaacatgtcctgaagatccagaaagagctggaagaagctaaagagaaacttgctaggcaacacaaacggcgaagtgatgatgacgacagaagcagtgacaggaaagacggggttcttgaggaacaaatagaacgacttcaggaaaaagtggaatctgctcagagtgaacaaaagaatcttttcctcgttatatttcagcggtttatcatgatcttgaccgagcacctagtacgatgcgaaactgatgggaccagtgtattaacaccatggtataagaactgtatagagaggctgcagcagatcttcctacagcatcaccaaataatccagcagtacatggtgaccctggagaaccttctcttcactgctgaattagaccctcatatcttggccgtgttccagcagttctgtgccctgcaggcctaagggtcattttttcctcatgtcaaggtttttttgatatcttaaaataatttgtcttattttttgatggtttgaatgcttgctttcttgtagtatcctttcacttgttaaaggaaacaaaggggaagaggacagtgaatgaacatggcattacttttaattgccctgaaaagcaaatacttcctaacggcagtaatgtgactatgaccatgatatattatatatgtgacagatacaaattctctgtgatcagtttgttattttttttctccttaaggcacaaaataattggtttgaggtatgtgaaacactagaggtcaaccttacatagtatatagaactgatgggtttacccagctacccagtagcataacttttcacagctcggggatgaattaacatggctgaaataaaactaaaagtatggttttt

SEQ ID NO: 28718 - DNA, 2087 bp, Homo Sapiens
caccacgcttcctatgtgacccgcctgggcaacgccgaacccagtcgcgcagcgctgcagtgaattttccccccaaactgcaataagccgccttccaaggccaagatgttcataaatataaagagcatcttatggatgtgttcaaccttaatagtaacccatgcgctacataaagtcaaagtgggaaaaagcccaccggtgaggggctccctctctggaaaagtcagcctaccttgtcatttttcaacgatgcctactttgccacccagttacaacaccagtgaatttctccgcatcaaatggtctaagattgaagtggacaaaaatggaaaagatttgaaagagactactgtccttgtggcccaaaatggaaatatcaagattggtcaggactacaaagggagagtgtctgtgcccacacatcccgaggctgtgggcgatgcctccctcactgtggtcaagctgctggcaagtgatgcgggtctttaccgctgtgacgtcatgtacgggattgaagacacacaagacacggtgtcactgactgtggatggggttgtgtttcactacagggcggcaaccagcaggtacacactgaattttgaggctgctcagaaggcttgtttggacgttggggcagtcatagcaactccagagcagctctttgctgcctatgaagatggatttgagcagtgtgacgcaggctggctggctgatcagactgtcagatatcccatccgggctcccagagtaggctgttatggagataagatgggaaaggcaggagtcaggacttatggattccgttctccccaggaaacttacgatgtgtattgttatgtggatcatctggatggtgatgtgttccacctcactgtccccagtaaattcaccttcgaggaggctgcaaaagagtgtgaaaaccaggctgccaggctggcaacagtgggggaactccaggcggcatggaggaacggctttgaccagtgcgattacgggtggctgtcggatgccagcgtgcgccaccctgtgactgtggccagggcccagtgtggaggtggtctacttggggtgagaaccctgtatcgttttgagaaccagacaggcttccctccccctgatagcagatttgatgcctactgctttaaacgacctgatcgctgcaaaatgaacccgtgccttaacggaggcacctgttatcctactgaaacttcctacgtatgcacctgtgtgccaggatacagcggagaccagtgtgaacttgattttgatgaatgtcactctaatccctgtcgtaatggagccacttgtgttgatggttttaacacattcaggtgcctctgccttccaagttatgttggtgcactttgtgagcaagataccgagacatgtgactatggctggcacaaattccaagggcagtgctacaaatactttgcccatcgacgcacatgggatgcagctgaacgggaatgccgtctgcagggtgcccatctcacaagcatcctgtctcacgaagaacaaatgtttgttaatcgtgtgggccatgattatcagtggataggcctcaatgacaagatgtttgagcatgacttccgttggactgatggcagcacactgcaatacgagaattggagacccaaccagccagacagcttcttttctgctggagaagactgtgttgtaatcatttggcatgagaatggccagtggaatgatgttccctgcaattaccatctcacctatacgtgcaagaaaggaacagttgcttgcggccagccccctgttgtagaaaatgccaagacctttggaaagatgaaacctcgttatgaaatcaactccctgattagataccactgcaaagatggtttcattcaacgtcaccttccaactatccggtgcttaggaaatggaagatgggctatacctaaaattacctgcatgaacccatctgcataccaaaggacttattctatgaaatactttaaaaattcctcatcagcaaaggacaattcaataaatacatccaaacatgatcatcgttggagccggaggtggcaggagtcgaggcgctgatccctaaaatggcg

SEQ ID NO: 28719 - DNA, 3344 bp, Homo Sapiens
ggtacagctgcgcgtctgcgggaataggtgcagcgggcccttggcgggggactctgagggaggagctggggacggcgaccctaggagagttctttggggtgactttcaagatggactctactctaacagcaagtgaaatccggcagcgatttatagatttcttcaagaggaacgagcatacgtatgttcactcgtctgccaccatcccattggatgaccccactttgctctttgccaatgcaggcatgaaccagtttaaacccattttcctgaacacaattgacccatctcaccccatggcaaagctgagcagagctgccaatacccagaagtgcatccgggctgggggcaaacaaaatgacctggacgatgtgggcaaggatgtctatcatcacaccttcttcgagatgctgggctcttggtcttttggagattactttaaggaattggcatgtaagatggctctggaactcctcacccaagagtttggcattcccattgaaagactttatgttacttactttggcggggatgaagcagctggcttagaagcagatctggaatgcaaacagatctggcaaaatttggggctggatgacaccaaaatcctcccaggcaacatgaaggataacttctgggagatgggtgacacgggcccctgtggtccttgcagtgagatccactacgaccggattggtggtcgggacgccgcacatcttgtcaaccaggacgaccctaatgtgctggagatctggaaccttgtgttcatccagtataacagggaagctgatggcattctgaaacctcttcccaagaaaagcattgacacagggatgggcctggaacgactggtatctgtgctgcagaataagatgtccaactatgacactgacctttttgtcccttactttgaagccattcagaagggcacaggtgcccgaccatacactgggaaagttggtgctgaggatgccgatgggattgacatggcctaccgggtgctggctgaccatgctcggaccatcactgtggcactggctgatggtggccggcctgacaacacagggcgtggatatgtgttgagacggattctccgccgagctgtccgatacgcccatgaaaagctcaatgccagcaggggcttctttgctacgttagtggatgttgtcgtccagtccctgggagatgcatttcctgagctgaagaaggacccagacatggtgaaggacatcattaatgaagaagaggtgcagtttctcaagactctcagcagagggcgtcgcatcctggacaggaaaattcagagcctgggagacagcaagaccattcccggagacactgcttggctcctctatgacacctatgggtttccagtggatctgactggactgattgctgaagagaagggcctggtggtagacatggatggctttgaagaggagaggaaactggcccagctgaaatcacagggcaagggagctggtggggaagacctcattatgctggacatttacgctatcgaagagctccgggcacggggtctggaggtcacagatgattccccaaagtacaattaccatttggactccagtggtagctatgtatttgagaacacagtggctacggtgatggctctgcgcagggagaagatgttcgtggaagaggtgtccacaggccaggagtgtggagtggtgctggacaagacctgtttctatgctgagcaaggaggccagatctatgacgaaggctacctggtgaaggtggatgacagcagtgaagataaaacagagtttacagtgaagaatgctcaggtccgaggagggtatgtgctacacattggaaccatctacggtgacctgaaagtgggggatcaggtctggctgtttattgatgagccccgacgaagacccatcatgagcaaccacacagctacgcacattctgaacttcgccctgcgctcagtgcttggggaagctgaccagaaaggctcattggttgctcctgaccgcctcagatttgactttactgccaagggagccatgtccacccaacagatcaagaaggctgaagagattgctaatgagatgattgaggcagccaaggccgtctatacccaggattgccccctggcagcagcgaaagccatccagggcctacgggctgtgtttgatgagacctatcctgaccctgtgcgagtcgtctccattggggtcccggtgtccgagttgctggatgacccctctgggcctgctggctccctgacttctgttgagttctgtgggggaacgcacctgcggaactcgagtcatgcaggagcttttgtgatcgtgacggaagaagccattgccaagggtatccggaggattgtggctgtcacaggtgccgaggcccagaaggccctcaggaaagcagagagcttgaagaaatgtctctctgtcatggaagccaaagtgaaggctcagactgctccaaacaaggatgtgcagagggagatcgctgaccttggagaggccctggccactgcagtcatcccccagtggcagaaggatgaattgcgggagactctcaaatccctaaagaaggtcatggatgacttggaccgagccagcaaagccgatgtccagaaacgagtgttagagaagacgaagcagttcatcgacagcaaccccaaccagcctcttgtcatcctggagatggagagcggcgcctcagccaaggccctgaatgaagccttgaagctcttcaagatgcactcccctcagacttctgccatgctcttcacggtggacaatgaggctggcaagatcacgtgcctgtgtcaagtcccccagaatgcagccaatcggggcttaaaagccagcgagtgggtgcagcaggtgtcaggcttgatggacggtaaaggtggtggcaaggatgtgtctgcacaggccacaggcaagaacgttggctgcctgcaggaggcgctgcagctggccacttccttcgcccagctgcgcctcggggatgtaaagaactgagtggggaaggaggaggctcccactggatccatccgtccagccaagagctcttcatctgctacaagaacatttgaatcttgggacctttaaagagcccctcctaacccagcagtaactggaacacacttgggagcagtcctatgtctcagtgccccttaaatttctgccctgagccctccacgtcagtgccatcggtctagaaccactaaccccgcattgctgttgatcgtcacgctcgcatctatagataacggctctccagacctgagctttccgcgtcagcaagtaggaatcgtttttgctgcagagaataaaaggaccacgtgc

SEQ ID NO: 28720 - DNA, 3113 bp, Homo Sapiens
gaattccgcagagagtccgcaggcagaattctggacagacggacagactgagcccgcggcagctggccttggagtagagaccgagaggcccaagcaaaagacggagccagacaggtccagcctccggacgcatctagaatggagctggtcagagctggagacgacttgtctttggacggagaccgggacagatggcctttggactgatccgcacaggtccgacctccagtttcagcccgaggaggccagcccctggacacagccaggggttcatgggccctggacagagctggaaacgcatgggtcacagactcagccagagagggtcaagtcctgggctgataacctctggacccaccagaacagttccagcctccagactcacccagaaggagcctgtccctcaaaagagccaagtgctgatggctcctggaaagaattgtatactgatggctccaggacacaacaggatattgaaggtccctggacagagccatatactgatggctcccagaaaaaacaggatactgaagcagccaggaaacagcctggcactggtggtttccaaatacaacaggatactgatggctcctggacacaacctagcactgacggttcccagacagcacctgggacagactgcctcttgggagagcctgaggatggcccattagaggaaccagagcctggagaattgctgactcacctgtactctcacctgaagtgtagccccctgtgccctgtgccccgcctcatcattacccctgagacccctgagcctgaggcccagccagtgggacccccctcccgggttgaggggggcagcggcggcttctcctctgcctcttctttcgacgagtctgaggatgacgtggtggccgggggcggaggtgccagcgatcccgaggacaggtctgggagcaaaccctggaagaagctgaagacagttctgaagtattcaccctttgtggtctccttccgaaaacactacccttgggtccagctttctggacatgctgggaacttccaggcaggagaggatggtcggattctgaaacgtttctgtcagtgtgagcagcgcagcctggagcagctgatgaaagacccgctgcgacctttcgtgcctgcctactatggcatggtgctgcaggatggccagaccttcaaccagatggaagacctcctggctgactttgagggcccctccattatggactgcaagatgggcagcaggacctatctggaagaggagctagtgaaggcacgggaacgtccccgtccccggaaggacatgtatgagaagatggtggctgtggaccctggggcccctacccctgaggagcatgcccagggtgcagtcaccaagccccgctacatgcagtggagggaaaccatgagctccacctctaccctgggcttccggatcgagggcatcaagaaggcagatgggacctgtaacaccaacttcaagaagacgcaggcactggagcaggtgacaaaagtgctggaggacttcgtggatggagaccacgtcatcctgcaaaagtacgtggcatgcctagaagaacttcgtgaagctctggagatctcccccttcttcaagacccacgaggtggtaggcagctccctcctcttcgtgcacgaccacaccggcctggccaaggtctggatgatagacttcggcaagacggtggccttgcccgaccaccagacgctcagccacaggctgccctgggctgagggcaaccgtgaggacggctacctctggggcctggacaacatgatctgcctcctgcaggggctggcacagagctgagctgctcagccaccatcaggttaattggatggcgccagtctggctggaggagccctgagatgccatgggaggcctgaggttggccacgggggagctggcctccagggacgggagagattgtgtcatgtgccacacgagaccaacgtggaaaagtctgaagggccttgggagaccaggtagcacctggccccatcatgatgcaggggttttggggacctggaaggaaggtgatgaggcagtgagtcagaaaaaccagaacggggtccccggatctgccgggaaggcttctgaggggctgccctgagagcattcagttcacatgtcacagggtatggtgtgacagggtgcctgtggacacatgaatcacttctaacctgcctccctgtcagcctccaggctgccagctggctgaggccagggactgggtcaggctcatctgtggcgcctcagagggtcagcatcattggtgaacagatgcaggcgctgctggaccatctggggagagtgacagtccatgtcttcaccagggagccatttgagtgctgagcgacaagaggctcagagggcatgaccccatgggactggatgcggcctgagggctgataccgctgggcggtatcctgccctgctgtggccctgtgggatcctccgtgttcctcggcggactctgctgacctcctgcagacccaaaccacagccacatcccagcttctgtgccagcactgtgacagtacctcgctcctctgtgcaccagatccggcctcaggacttacacctcctgcctgacccccaggcttctctctcctttctcccagcaaactgcagtggcagaaaggaggttcagaggctgggaaagtgggcctccccttgcaactcagagctgctgcactcaggagggccccatccaatccccggcttttccctgcagggaaaagcgctgggtgtgtgtcagaggcgcagggtgggtgggctgccagccaggaccctggcctgcagcctgatccaaaccaaagactgtagaaccctggggtgtggctaacggcccctccagcacccatagccaggtcttcctggcccttgaggctgggctggcggacaggcacctacctcttccttaagctgaagctcccacactgtcttccagggctgaggagatgctctccttttctactgaccatcttgatacttatttatacgagaggcagttgctggacggggtagtactgggaagcaggaggcagaatggctctgctgagcctcctacccatgacaacaccccaataaacagaacattcag

SEQ ID NO: 28721 - DNA, 3461 bp, Homo Sapiens
gctgagagcagcaaggccagagttgaaaacttacagagtcctgaggcttcagactgaaaaaggcttcttctgtcactgacaatcgccaccatgatccatagtcttttcttgatcaactcctctggagacattttcctggagaaacattggaaaagtgtggtcagccgttctgtttgtgattacttttttgaggcgcaagagagagctactgaggcagaaaatgtgcctccggttatccctacccctcaccactatctcttaagtgtttaccgccacaagatcttttttgtggccgtgatccagacggaggtcccccctctgtttgtcattgagtttcttcaccgagtggtggacacatttcaggattattttggagtctgttcagagccagtgatcaaagacaatgtagttgtggtttatgaggtattggaagagatgcttgacaatggttttccattggctaccgagtcgaacattcttaaagaactcataaagcctcctaccatccttcgaacggttgtcaacaccatcacaggaagcacgaatgtgggtgaccagcttcccactgggcagctgtcagtggtgccttggcgacggactggggtgaaatataccaacaatgaggcctattttgatgtgattgaagagattgatgcaattattgataaatcaggctccacaattactgctgagatccagggggtgattgatgcctgtgtcaagctgactggcatgccagaccttacactttccttcatgaaccctaggttgttggatgatgtcagcttccatccttgtgttcgtttcaaacgctgggaatctgagcgcatcctctccttcatccctcctgatggaaacttccgcctgctgtcttaccatgtcagtgcacagaatctggttgcaatcccagtgtatgtcaaacataacatcagtttccgggacagtagttcccttggacgctttgaaataacggtgggacccaagcagacgatggggaagaccattgagggagtgactgtcaccagccagatgcccaagggggtcctgaacatgagccttactccatcacaggggacacacacattcgacccagtcacaaagatgctgtcttgggatgtaggaaaaataaatccacaaaagctaccaagtttgaaggggaccatgagtcttcaggctggagcttccaaaccagatgaaaaccccacaattaacctgcagtttaagatccagcagctggccatttctggactcaaggtgaatcgtctggatatgtatggagaaaagtacaaaccctttaagggcataaaatacatgaccaaagctgggaagttccaagttcgaacctgaagggagcatttgctgagggaatagtcttgcacattttttcatttcttacttgtctaaaagtaaaaaaaaatatcagcctgtctcctaggtcagtcccctcctggacccacccgctcccttttttccttagccttcagtgccatggaactaatcaagggaggaaaaggtcaccagggagaactggacagaactgaaacacagcaacaccagttctcaaggacaaggtgtgtgatgggggtaggaagcttggtgcttatgtaaccattttaaacgtggtttctataggaaagaccaacatttgtttagcttgcttggctttaattatctaaagccaatgaaagacttctttgttgattttttaagatagaaagattaaaaagaaagaaagatgggaagaaaatgaatgtcagtcaaggaaaggccacttaaggatctgctctatgaaggagaagaaagaggaaaaagaagtaaaggagttaggaggagacacttaaatgaaagattggcaagaaaagcagtcggactctaccttaaggagggatgggaaggaaagagtgtgttggtttctttctgattcctctactcatgtagaaaacacttgtacttctggaaatggactggagactttttaaatttgagtccactattgacatggaaaccccagtggaatcagattttccctcaaagaccatgatggtatcggactagttttcagacactgcctgttgctgtccatcagcacttggtctcttatcttcagtgagaaggtgacccgccttcttcccatggtggctgcctaaagtgcttcttttctaacccaaaacagttctactcacttccttttacagaattcaccggccattttcctgttacctgatccttctacaggatttttaaaaagtaagagagtttcagagaagccgatcccataatccccagtgcagccagggcccgtgtgtcatcgtactggagtagagggccgactcttcccatgaaggtgagcacagctgtgagtgagtgagctcatatctccatttgtcagtgctggactggtaccagatcgtaaccttcccgttggtcggaaacttttccatctgtcaccctagaaaaagagaaagcttaccatcgagggtgtggttgatccttgaagctgcttggtaaagttatcatttctcagtcttttcttttgtactcctatcatgtattcattaatatctaccagtcccttttcattctaagacaaaacatttctcctaaatctctgaataaaatcagtgctgtaggaagatggactgtgttgatcatgggtgtaagcaacccagtttaagaaacatggcaactaaagggatacctcaggctttctttcccagtgggtcatttttgtcctagttcagtgtgtctgttactatttaaatatttatacaaaagggtttttgtttatagcttaaggaatgatactgtgctctgcttggtgcatggagaaaaaggaagacccgtactctccacaccctagagctttctctaaatattgtgcaaagtttttgctagttttatcttctgactttggactagtttttgcctgcagttgtgttgctttgtgattttcctctgggatagtgtactgtacacaaccagatgtgttccacactccgtgactccgcagtttgtcctggagtgacatacacatccaccatggaaagggaagcatctctgccgagattctaagtacttgaagcacctctcctgaggaacctacaggattctaaggtttcctaggtcactgaacaactaatcttggtccctgaatatttctaggtttgtaagtgcagcagttttatttcctctagaactcatcctgtttcaagggaagtacctaagaagatatagagtgtttctagggtaagggacctgcaggtgtaagcatagatgaaataactgtcctgtcacatgtgcagcaggccatggagtgtagcgggcatcgctgccgccattcctgcagcatcaccataagcagtgcagggtgtctccatcgagctgtttggttccatgtgtgtttaacatgtgcagaagtagcttctctgtttaagtttaataaagttgagtttcaaccagtc

SEQ ID NO: 28722 - DNA, 3256 bp, Homo Sapiens
cgcgcgttgaggcggctgcagcagttgcgcgctgggattgttgcggtgcgctggagccgaatacaaaatacagttaaaataaaatgtcgacctcctggagtgatcggttacagaatgcagcagatatgcctgctaacatggataagcatgccctgaaaaagtatcgtcgagaagcctatcatcgggtgtttgtgaaccgaagtttagcaatggaaaagataaagtgttttggttttgatatggattatacccttgctgtgtacaagtccccagagtatgagtcccttggttttgagcttactgtggagagattagtttctattggctatccccaggagttgctcagctttgcttatgattctacattccctaccaggggacttgtctttgacacactgtatggaaatcttttgaaagtcgatgcctatggaaacctcttggtctgtgcacatggatttaactttataaggggaccagaaactagagaacagtatccaaataaatttatccagcgagatgatactgaaagattttacattctgaacacactattcaacctaccagagacctacctgttggcctgcctagtagatttttttactaattgtcccagatataccagttgtgaaacaggatttaaagatggggacctcttcatgtcctaccggagtatgttccaggatgtaagagatgctgttgactgggttcattacaagggctcccttaaggaaaagacagttgaaaatcttgagaagtatgtagtcaaagatggaaaactgcctttgcttctgagccggatgaaggaagtagggaaagtatttcttgctaccaacagtgactataaatatacagataaaattatgacttacctgtttgacttcccacatggccccaagcctgggagctcccatcgaccatggcagtcctactttgacttgatcttggtggatgcacggaaaccactcttttttggagaaggcacagtactgcgtcaggtggatactaaaactggcaagctgaaaattggtacctacacagggcccctacagcatggtatcgtctactcaggaggttcttctgatacgatctgtgacctgttgggagccaagggaaaagacattttgtatattggagatcacatttttggggacattttaaaatcaaagaaacggcaagggtggcgaacttttttggtgattcctgaactcgcacaggagctacatgtctggactgacaagagttcacttttcgaagaacttcagagcttggatattttcttggctgaactctacaagcatcttgacagcagtagcaatgagcgtccagacatcagttccatccagagacgtattaagaaagtaactcatgacatggacatgtgctatgggatgatgggaagcctgtttcgcagtggctcccggcagaccctttttgccagtcaagtgatgcgttatgctgacctctatgcagcatctttcatcaacctgctgtattaccctttcagctacctcttcagggctgcccatgtcttgatgcctcatgaatcaacggtggagcacacacacgtagatatcaatgagatggagtctcctcttgccacccggaaccgcacatcagtggatttcaaagacactgactacaagcggcaccagctgacacggtcaattagtgagattaaacctcccaacctcttcccactggccccccaggaaattacacactgccatgacgaagatgatgatgaagaggaggaggaggaggaagaataaggaggaaaaccaaaaccccaagcacccattaaacaagtcctggcaggactcacaggaacaaacgaggtccctgttagggttctactcgggggagggagggggctccatgaaaggtacgtctgaaaagtttctgaagattttattatcatagatacttgttttggttttgtgtatctgtactctctgcagatggtccaaaattgtaatggagtctgtattagaagaaaataagggtaaaatcaggctgaactgcatgtatatggctccactgtggcttgtgacacttttaaaatcatccgtatgtcagtgtatctggatacacgaggaaaaggaaagagtctcagagtggaacaaagagtgggaagaggtgatctgtaatgttacaaattgtgctattactccaaggtccaacttttccagtgcattacatggtattgtatatcagtggagaaatgtattatttccatgatcaaatgtagtctctgttaaggtcaagttttcttttataagcctttaattcatcctcagtgactctggcaaggctgcttctctatcactggctttgcacagaagtatgctctacttgcgttgctttagggcaggattctattttgagggaaaagacagtatccttattaccttttgtttgtttaatagcacaaatgcttatttgttatccaaaaacaacctccttcttatctgtgataaatctatagaaagaatttagctgcaagtggacaaaggaacaagcccccagaaaagaaagggaagaactgccttcttatactacagaacatgcattagtgtgggctatatagctgtggctcatgctacccaattccagatttctttgtcctctaagagttgattgctgtatattaaaattgaacatcagaggatgggaagagggctctgtaagccagaaccttactaaagtagagggcacaatcagtgtgaataaatccacttcagaatctcaagtcaaggccaggcacggcggctcacgcctgtaatcccagcactttgggaggccgagacaggcggatcacctgaggtcgggagttcgagaccagccttaccaacatggagaaaccccatctctactaaaaatacaaaattacctgggcgtggtggtgcatgcctgtaatcccatcatctactcaggaggctgaggcaggagaattgcttgaacccaggaggcggaggttgcagtgagccaggattgtgccattgcactccagcctgggcaacaagaacaaaactccatctcaaaaaataaaaatcccaatcccaagtcgaaatcacctcttgttttaaacaagaatgaatcattactgtgtatgttagggtattaaaactgtttcaccagtacagtgaaagttgtttcaacattttaaacaaacagtggttatagactctttctttaaccattgtatattttcttccattcttgtcattggtcaataggggagggtagattagctgct

SEQ ID NO: 28723 - DNA, 4468 bp, Homo Sapiens
ggactctgagggctttttggagctcgctatgcttaacctggagatgattaaggccccgcttcctggcctcccagcctctaatgccaaaagataagggagaggctggcgtgtgaccccgttttgagtcaggtggacagagggctggccaccttcggaaccatgggtgcaatacggagtcagacctcaatacaagcccactctttcacatatttgaacttttttcacatatcaactttttttgttcactgtgcagggattgttcattgctgctggaggaagatcatggactgtcgcgggaaactgaagtggttgagtatccactagtcgtggatgagggcagtgacttcgcagttttttgcgaattacacatctctttgattatgttgtgactagttttgttagatagtcatttagtgtttgggatacctgttaagccctttgtccagggactgtggttggatttatgaattatttggacggttgtccacttgaaagaactgacagtagcttcataacaatgttacaaatctcgttctaagattaagctgttgaacctatatttgccattagcgcttaatttttgaagtattatttttatgaatcaagccctggaaaaggacaagatatttgaatgaaatagcacccataatggagaacttcacagttgctactcctgtgataggtttatcttagtttcattgtggtataaatggaatagcaggtgttgtcaggtacaaggtttgtagcttgccaatatgttcattaccaacactgcagattcccattgagttggtgggggttttgttacctttgttttttttctcagcaaaataattctataactttttgtttgtgacaagaaatggactttcagtttacttaagattaatacttcttgaatgataaaatcattttgccatgttagaagacatttccgaagaagacatttgggaatacaaatctaaaagaaaaccaaaacgagttgatccaaataatggctctaaaaatattctaaaatctgttgaaaaagcaacagatggaaaataccagtcaaaacggagtagaaacagaaaaagagccgcagaagctaaagaggtgaaggaccatgaagtgccccttggaaatgcaggttgtcagacttctgttgcttctagtcagaattcaagttgtggagatggtattcagcagacccaagacaaggaaactactccaggaaaactctgtagaactcaaaaaagccaacacgtgtccccaaagatacgtccagtttatgatggatactgtccaaattgccagatgcctttttcctcattgatagggcagacacctcgatggcatgtttttgaatgtttggattctccaccacgctctgaaacagagtgtcctgatggtcttctgtgtacctcaaccattccttttcattacaagagatacactcacttcctgctagctcaaagcagggctggtgatcatccttttagcagcccatcacctgcgtcaggtggcagtttcagtgagactaagtcaggcgtcctttgtagccttgaggaaagatggtcttcgtatcagaaccaaactgataactcggtttcaaatgatcccttattgatgacacagtattttaaaaagtctccgtctctgactgaagccagtgaaaagatttctactcatatccaaacatcccaacaagctctacaatttacagattttgttgagaatgacaaactagtgggagttgctttgcgtcttgcaaacaactcagaacacataaatttgccattgccagaaaatgacttcagtgactgtgaaatctcctattctccacttcaaagtgatgaagacactcatgatatcgatgaaaaaccggatgattcacaagaacaactgttttttaccgaaagctcaaaagatggcagcctcgaagaagatgatgacagctgtggtttttttaaaaaacgacatggtcccttactgaaggaccaggatgagagctgccccaaagtgaacagcttcttaactcgggataagtatgatgaaggattgtatagattcaatagtctaaatgatttgtctcaacctatttctcaaaataatgagagtactttgccttatgatctggcatgtactggtggtgattttgtgttgtttccacctgcattggcagggaagcttgctgcttctgttcatcaggcaactaaagcaaaacctgatgagccagaatttcactcagctcaatcaaataaacagaaacaggtaattgaagaatcatctgtttacaatcaagtttctcttccgttagttaagagtttaatgttgaaaccttttgaaagtcaggtagaagggtatctttcttcccaaccaacccaaaatacaattagaaaattatcaagtgagaacttgaatgctaagaataatactaactcagcatgtttctgcagaaaggcattagagggtgtgccagttggtaaagctacaattttaaatacagaaaacttgtctagtacacctgctccgaagtatttgaaaatattgccttctggtcttaagtataatgcaagacatccttctaccaaggtaatgaagcaaatggatataggtgtgtattttggactacctcccaaaagaaaggaagagaaattgctaggggaaagtgcattagaagggataaacttaaatccagttccaagtcctaatcaaaagaggtcctcgcagtgcaagaggaaagcagaaaaatctttaagtgatttagaatttgatgcaagtactttacatgagagtcagctttctgtggaactttctagtgagaggtcacagcgtcaaaaaaagagatgtagaaagtcaaattcactgcaggaaggagcgtgtcagaagagatcagatcaccttattaatacagaatctgaagcagtcaatttaagtaaagtcaaagtcttcacaaaatcagctcatggtgggctgcaaaggggcaacaagaaaatcccagagtcatctaatgtaggaggatcaagaaaaaagacatgtccattctataagaaaatacctggaaccggctttacagttgatgcctttcagtatggcgtggttgaaggttgcacagcctattttctcacacattttcattctgatcattatgctggattgtctaaacacttcacatttccagtttattgtagtgagataactggcaatttgttgaagaacaagcttcatgtgcaagaacaatatattcacccattgccactggacactgaatgtattgtgaatggtgtcaaagttgttttgcttgatgccaatcactgtccaggtgctgtcatgatcctcttttatcttcctaatggtactgtcatattacacacgggagacttcagagcagatcccagcatggaacgttctcttcttgcggaccagaaagtccatatgctgtacttagataccacatattgtagcccagaatacacctttccatctcagcaagaggttatccggtttgccatcaacactgcctttgaggctgtaactctaaacccacatgctcttgttgtctgtggcacttactctattggaaaagagaaagtcttcctagccattgctgatgttttaggttcaaaagtgggcatgtcccaggaaaaatataaaactctacagtgcctcaatataccagaaattaattcactcatcactaccgacatgtgcagttcattggttcaccttctcccaatgatgcaaattaattttaagggcttacagagtcatttgaagaagtgtggtgggaaatacaatcagattttggcatttcgacctacaggatggacacactctaacaagttcactagaatagcagatgttattccccagaccaaaggaaacatttcaatatatggaattccttacagtgaacacagcagctacctagaaatgaagcgctttgtccagtggctgaagccccagaaaatcatacctactgtaaatgtgggcacctggaaatctaggagcacaatggagaaatattttagagagtggaaattggaagctggatattgatgatacctccgaggattcagtagtagttaagttccttggatgtagcttgttagtagttaaatctatagaaatgtgaaatacactttgtgtggaaaaacctcatgaagattgttcagatactttattttctcatttatgtttgaacaacatgttcgtggtgctgaatgcctctcagcatcatcaaggataactgaaactgggtctccctgggacccttaatttcttgtcccctgccctccatgggcagttatattctgcatcaagccttagaagaggaagcaaaggcagattcagggaccaaaaggattaatgataattaataaagtagtttgaagcattatatatataagtaattatgtgtctttaaaattatgagatgaaacttttatatgacgtgtatacttaaataaaattaatataaaatttg

SEQ ID NO: 28724 - DNA, 2621 bp, Homo Sapiens
ccctcttcccggcccagggcgccggcccacccttccctccgccgccccccggccgcggggaggacatggccgcgcacaggccggtggaatgggtccaggccgtggtcagccgcttcgacgagcagcttccaataaaaacaggacagcagaacacacataccaaagtcagtactgagcacaacaaggaatgtctaatcaatatttccaaatacaagttttctttggttataagcggcctcactactattttaaagaatgttaacaatatgagaatatttggagaagctgctgaaaaaaatttatatctctctcagttgattatattggatacactggaaaaatgtcttgctgggcaaccaaaggacacaatgagattagatgaaacgatgctggtcaaacagttgctgccagaaatctgccattttcttcacacctgtcgtgaaggaaaccagcatgcagctgaacttcggaattctgcctctggggttttattttctctcagctgcaacaacttcaatgcagtctttagtcgcatttctaccaggttacaggaattaactgtttgttcagaagacaatgttgatgttcatgatatagaattgttacagtatatcaatgtggattgtgcaaaattaaaacgactcctgaaggaaacagcatttaaatttaaagccctaaagaaggttgcgcagttagcagttataaatagcctggaaaaggcattttggaactgggtagaaaattatccagatgaatttacaaaactataccagatcccacagactgatatggctgaatgtgcagaaaagctatttgacttggtggatggttttgctgaaagcaccaaacgtaaagcagcagtttggccactacaaatcattctccttatcttgtgtccagaaataatccaggatatatccaaagacgtggttgatgaaaacaacatgaataagaagttatttctggacagtctacgaaaagctcttgctggccatggaggaagtaggcagctgacagaaagtgctgcaattgcctgtgtcaaactgtgtaaagcaagtacttacatcaattgggaagataactctgtcattttcctacttgttcagtccatggtggttgatcttaagaacctgctttttaatccaagtaagccattctcaagaggcagtcagcctgcagatgtggatctaatgattgactgccttgtttcttgctttcgtataagccctcacaacaaccaacactttaagatctgcctggctcagaattcaccttctacatttcactatgtgctggtaaattcactccatcgaatcatcaccaattccgcattggattggtggcctaagattgatgctgtgtattgtcactcggttgaacttcgaaatatgtttggtgaaacacttcataaagcagtgcaaggttgtggagcacacccagcaatacgaatggcaccgagtcttacatttaaagaaaaagtaacaagccttaaatttaaagaaaaacctacagacctggagacaagaagctataagtatcttctcttgtccatggtgaaactaattcatgcagatccaaagctcttgctttgtaatccaagaaaacaggggcccgaaacccaaggcagtacagcagaattaattacagggctcgtccaactggtccctcagtcacacatgccagagattgctcaggaagcaatggaggctctgctggttcttcatcagttagatagcattgatttgtggaatcctgatgctcctgtagaaacattttgggagattaggtatatgtacttttattttttaaattcaacttttaaattttattttgtatttttgtcttgaaatattaactctgtagtacttagtacattgtaaaacttacacttccaaaggttttatggttttgtattttatttgacttcaaattattagaatttcttgttttaactgtaagaaaagtatcacagcaatttagaaaataaattttaagaatagtgctaaattttgtcaccctaacataagtactgttgtttggtatattacttttttcagatttcaatgtggttactactgtatttttaatagattttcatagttataagcctagaatgataaaattttgtaacaatactgttttttcagttttttgaactatgatctttcataaactttctgtaataccaatgctttcgatgaatgaattaataatggacacctgcttagaagaaaaaaatgtatgcagaattttgtggtctgcttcctagattatacaaatcattacattttaatgagcatgaagtcaccacacggaggaaaatgtaaatgtgtaaacctcaagtttgccattatcttataagaatgggtgtgctaagttacttggcagctgaattaaaccttactctagagtagtgctgtccactagtaatataatgagaaccccatatgttaaaaacttttttacttactacattaaagagtaaaaagaagcaggtaaaattaattgtaattatgttttgtttaacccggtgtatattatctataatttcaacatgtaatcaatataaaagttattaatgacatttcattctcttttttttaataaagtcttcaaacttt

SEQ ID NO: 28725 - DNA, 2440 bp, Homo Sapiens
cggctggattagggctgaatctgtgggaaccagaccacccctgagacaggaggcagccctgatgcctctccagggcctgggcctgcagcggaaccccttcctccaagggaagcggggcccggggctcacgtcttccccgcccctcctgcctccttccctgcaggtgaacttccacagcccccggagtggccagaggtgctgggctgcacggacccaggtggagaagcggctggtggtgttggtggtacttctggcggcaggactggtggcctgcttggcagcactgggcatccagtaccagacaagatccccctctgtgtgcctgagcgaagcttgtgtctcagtgaccagctccatcttgagctccatggaccccacagtggacccctgccatgacttcttcagctacgcctgtgggggctggatcaaggccaacccagtccctgatggccactcacgctgggggaccttcagcaacctctgggaacacaaccaagcaatcatcaagcacctcctcgaaaactccacggccagcgtgagcgaggcagagagaaaggcgcaagtatactaccgtgcgtgcatgaacgagaccaggatcgaggagctcagggccaaacctctaatggagttgattgagaggctcgggggctggaacatcacaggtccctgggccaaggacaacttccaggacaccctgcaggtggtcaccgcccactaccgcacctcacccttcttctctgtctatgtcagtgccgattccaagaactccaacagcaacgtgatccaggtggaccagtctggcctgggcttgccctcgagagactattacctgaacaaaactgaaaacgagaaggtgctgaccggatatctgaactacatggtccagctggggaagctgctgggcggcggggacgaggaggccatccggccccagatgcagcagatcttggactttgagacggcactggccaacatcaccatcccacaggagaagcgccgtgatgaggagctcatctaccacaaagtgacggcagccgagctgcagaccttggcacccgccatcaactggttgccttttctcaacaccatcttctaccccgtggagatcaatgaatccgagcctattgtggtctatgacaaggaataccttgagcagatctccactctcatcaacaccaccgacagatgcctgctcaacaactacatgatctggaacctggtgcggaaaacaagctccttccttgaccagcgctttcaggacgccgatgagaagttcatggaagtcatgtacgggaccaagaagacctgtcttcctcgctggaagttttgcgtgagtgacacagaaaacaacctgggctttgcgttgggccccatgtttgtcaaagcaaccttcgccgaggacagcaagagcatagccaccgagatcatcctggagattaagaaggcatttgaggaaagcctgagcaccctgaagtggatggatgaggaaacccgaaaatcagccaaggaaaaggccgatgccatctacaacatgataggataccccaacttcatcatggatcccaaggagctggacaaagtgtttaatgactacactgcagttccagacctctactttgaaaatgccatgcggtttttcaacttctcatggagggtcactgccgatcagctcaggaaagcccccaacagagatcagtggagcatgaccccgcccatggtgaacgcctactactcgcccaccaagaatgagattgtgtttccggccgggatcctgcaggcaccattctacacacgctcctcacccaaggccttaaactttggtggcataggtgtcgtcgtgggccatgagctgactcatgcttttgatgatcaaggacgggagtatgacaaggacgggaacctccggccatggtggaagaactcatccgtggaggccttcaagcgtcagaccgagtgcatggtagagcagtacagcaactacagcgtgaacggggagccggtgaacgggcggcacaccctgggggagaacatcgccgacaacgggggtctcaaggcggcctatcgggcttaccagaactgggtgaagaagaacggggctgagcactcgctccccaccctgggcctcaccaataaccagctcttcttcctgggctttgcacaggtctggtgctccgtccgcacacctgagagctcccacgaaggcctcatcaccgatccccacagcccctctcgcttccgggtcatcggctccctctccaattccaaggagttctcagaacacttccgctgcccacctggctcacccatgaacccgcctcacaagtgcgaagtctggtaaggacgaagcggagagagccaagacggaggaggggaaggggctgaggacgagacccccatccagcctccagggcattgctcagcccgcttggccacccggggc

SEQ ID NO: 28726 - DNA, 3668 bp, Homo Sapiens
gtggtcttcccgcgcctgaggcggcggcggcaggagctgaggggagttgtagggaactgaggggagctgctgtgtcccccgcctcctcctccccatttccgggctcccgggaccatgtccgcgctggcgggtgaagatgtctggaggtgtccaggctgtggggaccacattgctccaagccagatatggtacaggactgtcaacgaaacctggcacggctcttgcttccggtgttcagaatgccaggattccctcaccaactggtactatgagaaggatgggaagctctactgccccaaggactactgggggaagtttggggagttctgtcatgggtgctccctgctgatgacagggccttttatggtggctggggagttcaagtaccacccagagtgctttgcctgtatgagctgcaaggtgatcattgaggatggggatgcatatgcactggtgcagcatgccaccctctactgtgggaagtgccacaatgaggtggtgctggcacccatgtttgagagactctccacagagtctgttcaggagcagctgccctactctgtcacgctcatctccatgccggccaccactgaaggcaggcggggcttctccgtgtccgtggagagtgcctgctccaactacgccaccactgtgcaagtgaaagaggtcaaccggatgcacatcagtcccaacaatcgaaacgccatccaccctggggaccgcatcctggagatcaatgggacccccgtccgcacacttcgagtggaggaggtggaggatgcaattagccagacgagccagacacttcagctgttgattgaacatgaccccgtctcccaacgcctggaccagctgcggctggaggcccggctcgctcctcacatgcagaatgccggacacccccacgccctcagcaccctggacaccaaggagaatctggaggggacactgaggagacgttccctaaggcgcagtaacagtatctccaagtcccctggccccagctccccaaaggagcccctgctgttcagccgtgacatcagccgctcagaatcccttcgttgttccagcagctattcacagcagatcttccggccctgtgacctaatccatggggaggtcctggggaagggcttctttgggcaggctatcaaggtgacacacaaagccacgggcaaagtgatggtcatgaaagagttaattcgatgtgatgaggagacccagaaaacttttctgactgaggtgaaagtgatgcgcagcctggaccaccccaatgtgctcaagttcattggtgtgctgtacaaggataagaagctgaacctgctgacagagtacattgaggggggcacactgaaggactttctgcgcagtatggatccgttcccctggcagcagaaggtcaggtttgccaaaggaatcgcctccggaatggcctatttgcactctatgtgcatcatccaccgggatctgaactcgcacaactgcctcatcaagttggacaagactgtggtggtggcagactttgggctgtcacggctcatagtggaagagaggaaaagggcccccatggagaaggccaccaccaagaaacgcaccttgcgcaagaacgaccgcaagaagcgctacacggtggtgggaaacccctactggatggcccctgagatgctgaacggaaagagctatgatgagacggtggatatcttctcctttgggatcgttctctgtgagatcattgggcaggtgtatgcagatcctgactgccttccccgaacactggactttggcctcaacgtgaagcttttctgggagaagtttgttcccacagattgtcccccggccttcttcccgctggccgccatctgctgcagactggagcctgagagcagaccagcattctcgaaattggaggactcctttgaggccctctccctgtacctgggggagctgggcatcccgctgcctgcagagctggaggagttggaccacactgtgagcatgcagtacggcctgacccgggactcacctccctagccctggcccagccccctgcaggggggtgttctacagccagcattgcccctctgtgccccattcctgctgtgagcagggccgtccgggcttcctgtggattggcggaatgtttagaagcagaacaagccattcctattacctccccaggaggcaagtgggcgcagcaccagggaaatgtatctccacaggttctggggcctagttactgtctgtaaatccaatacttgcctgaaagctgtgaagaagaaaaaaacccctggcctttgggccaggaggaatctgttactcgaatccacccaggaactccctggcagtggattgtgggaggctcttgcttacactaatcagcgtgacctggacctgctgggcaggatcccagggtgaacctgcctgtgaactctgaagtcactagtccagctgggtgcaggaggacttcaagtgtgtggacgaaagaaagactgatggctcaaagggtgtgaaaaagtcagtgatgctccccctttctactccagatcctgtccttcctggagcaaggttgagggagtaggttttgaagagtcccttaatatgtggtggaacaggccaggagttagagaaagggctggcttctgtttacctgctcactggctctagccagcccagggaccacatcaatgtgagaggaagcctccacctcatgttttcaaacttaatactggagactggctgagaacttacggacaacatcctttctgtctgaaacaaacagtcacaagcacaggaagaggctgggggactagaaagaggccctgccctctagaaagctcagatcttggcttctgttactcatactcgggtgggctccttagtcagatgcctaaaacattttgcctaaagctcgatgggttctggaggacagtgtggcttgtcacaggcctagagtctgagggaggggagtgggagtctcagcaatctcttggtcttggcttcatggcaaccactgctcacccttcaacatgcctggtttaggcagcagcttgggctgggaagaggtggtggcagagtctcaaagctgagatgctgagagagatagctccctgagctgggccatctgacttctacctcccatgtttgctctcccaactcattagctcctgggcagcatcctcctgagccacatgtgcaggtactggaaaacctccatcttggctcccagagctctaggaactcttcatcacaactagatttgcctcttctaagtgtctatgagcttgcaccatatttaataaattgggaatgggtttggggtattaatgcaatgtgtggtggttgtattggagcagggggaattgataaaggagagtggttgctgttaatattatcttatctattgggtggtatgtgaaatattgtacatagacctgatgagttgtgggaccagatgtcatctctggtcagagtttacttgctatatagactgtacttatgtgtgaagtttgcaagcttgctttagggctgagccctggactcccagcagcagcacagttcagcattgtgtggctggttgtttcctggctgtccccagcaagtgtaggagtggtgggcctgaactgggccattgatcagactaaataaattaagcagttaacataactggc

SEQ ID NO: 28727 - DNA, 2093 bp, Homo Sapiens
ccactacgtggccactcccgtctgctgtgacgcgcggacagagagctaccggtggacccacggtgcctccctccctgggatctacacagaccatggccttgccaacggctcgacccctgttggggtcctgtgggacccccgccctcggcagcctcctgttcctgctcttcagcctcggatgggtgcagccctcgaggaccctggctggagagacagggcaggaggctgcacccctggacggagtcctggccaacccacctaacatttccagcctctcccctcgccaactccttggcttcccgtgtgcggaggtgtccggcctgagcacggagcgtgtccgggagctggctgtggccttggcacagaagaatgtcaagctctcaacagagcagctgcgctgtctggctcaccggctctctgagccccccgaggacctggacgccctcccattggacctgctgctattcctcaacccagatgcgttctcggggccccaggcctgcacccgtttcttctcccgcatcacgaaggccaatgtggacctgctcccgaggggggctcccgagcgacagcggctgctgcctgcggctctggcctgctggggtgtgcgggggtctctgctgagcgaggctgatgtgcgggctctgggaggcctggcttgcgacctgcctgggcgctttgtggccgagtcggccgaagtgctgctaccccggctggtgagctgcccgggacccctggaccaggaccagcaggaggcagccagggcggctctgcagggcgggggacccccctacggccccccgtcgacatggtctgtctccacgatggacgctctgcggggcctgctgcccgtgctgggccagcccatcatccgcagcatcccgcagggcatcgtggccgcgtggcggcaacgctcctctcgggacccatcctggcggcagcctgaacggaccatcctccggccgcggttccggcgggaagtggagaagacagcctgtccttcaggcaagaaggcccgcgagatagacgagagcctcatcttctacaagaagtgggagctggaagcctgcgtggatgcggccctgctggccacccagatggaccgcgtgaacgccatccccttcacctacgagcagctggacgtcctaaagcataaactggatgagctctacccacaaggttaccccgagtctgtgatccagcacctgggctacctcttcctcaagatgagccctgaggacattcgcaagtggaatgtgacgtccctggagaccctgaaggctttgcttgaagtcaacaaagggcacgaaatgagtcctcaggtggccaccctgatcgaccgctttgtgaagggaaggggccagctagacaaagacaccctagacaccctgaccgccttctaccctgggtacctgtgctccctcagccccgaggagctgagctccgtgccccccagcagcatctgggcggtcaggccccaggacctggacacgtgtgacccaaggcagctggacgtcctctatcccaaggcccgccttgctttccagaacatgaacgggtccgaatacttcgtgaagatccagtccttcctgggtggggcccccacggaggatttgaaggcgctcagtcagcagaatgtgagcatggacttggccacgttcatgaagctgcggacggatgcggtgctgccgttgactgtggctgaggtgcagaaacttctgggaccccacgtggagggcctgaaggcggaggagcggcaccgcccggtgcgggactggatcctacggcagcggcaggacgacctggacacgctggggctggggctacagggcggcatccccaacggctacctggtcctagacctcagcgtgcaagaggccctctcggggacgccctgcctcctaggacctggacctgttctcaccgtcctggcactgctcctagcctccaccctggcctgagggccccactcccttgctggccccagccctgctggggatccccgcctggccaggagcaggcacgggtgatccccgttccaccccaagagaactcgcgctcagtaaacgggaacatgccccctgcagacacgt

SEQ ID NO: 28728 - DNA, 1775 bp, Homo Sapiens
gcgatggtgctggatctggatttgtttcgggtggataaaggaggggacccagccctcatccgagagacgcaggagaagcgcttcaaggacccgggactagtggaccagctggtgaaggcagacagcgagtggcgacgatgtagatttcgggcagacaacttgaacaagctgaagaacctatgcagcaagacaatcggagagaaaatgaagaaaaaagagccagtgggagatgatgagtctgtcccagagaatgtgctgagtttcgatgaccttactgcagacgctttagctaacctgaaagtctcacaaatcaaaaaagtccgactcctcattgatgaagccatcctgaagtgtgacgcggagcggataaagttggaagcagagcggtttgagaacctccgagagattgggaaccttctgcacccttctgtacccatcagtaacgatgaggatgtggacaacaaagtagagaggatttggggtgattgtacagtcaggaagaagtactctcatgtggacctggtggtgatggtagatggctttgaaggcgaaaagggggccgtggtggctgggagtcgagggtacttcttgaagggggtcctggtgttcctggaacaggctctcatccagtatgcccttcgcaccttgggaagtcggggctacattcccatttataccccctttttcatgaggaaggaggtcatgcaggaggtggcacagctcagccagtttgatgaagaactttataaggtgattggcaaaggcagtgaaaagtctgatgacaactcctatgatgagaagtacctgattgccacctcagagcagcccattgctgccctgcaccgggatgagtggctccggccggaggacctgcccatcaagtatgctggcctgtctacctgcttccgtcaggaggtgggctcccatggccgtgacacccgtggcatcttccgagtccatcagtttgagaagattgaacagtttgtgtactcatcaccccatgacaacaagtcatgggagatgtttgaagagatgattaccaccgcagaggagttctaccagtccctggggattccttaccacattgtgaatattgtctcaggttctttgaatcatgctgccagtaagaagcttgacctggaggcctggtttccgggctcaggagccttccgtgagttggtctcctgttctaattgcacggattaccaggctcgccggcttcgaatccgatatgggcaaaccaagaagatgatggacaaggtggagtttgtccatatgctcaatgctaccatgtgcgccactacccgtaccatctgcgccatcctggagaactaccagacagagaagggcatcactgtgcctgagaaattgaaggagttcatgccgccaggactgcaagaactgatcccctttgtgaagcctgcgcccattgagcaggagccatcaaagaagcagaagaagcaacatgagggcagcaaaaagaaagcagcagcaagagacgtcaccctagaaaacaggctgcagaacatggaggtcaccgatgcttgaacattcctgcctccctatttgccaggctttcatttctgtctgctgagatctcagagcctgcccaacagcagggaagccaagcacccattcatccccctgcccccatctgactgcgtagctgagaggggaacagtgccatgtaccacacagatgttcctgtctcctcgcatgggcatagggacccatcattgatgactgatgaaaccatgtaataaagcatctctggg

SEQ ID NO: 28729 - DNA, 4431 bp, Homo Sapiens
gtcgacccacgcgtccgcccacgcgtccggcggcggcggtagcggcggcagcggctgcggccaagctgggtccgagcatcccgcggctctggagccgcccggcccggacatggcgaccgtccgggcctctctgcgaggtgcgctgctccttctgctggccgtggcgggggtcgcggaggtggcagggggcctggctccgggcagtgcgggtgcattgtgttgtaatcattcaaaggataaccaaatgtgccgtgatgtatgtgaacagattttctcctcaaaaagtgaatcccgactaaaacatctgttgcagcgagccccagattattgcccagagacaatggttgaaatttggaattgtatgaattcatctttgccaggtgtgtttaagaagtctgatggctgggttggcttaggctgctgtgaactggctattgccttggagtgtcgacaggcatgcaagcaggcatcttcaaagaatgatatttccaaagtttgcagaaaagaatatgagaatgctcttttcagttgcattagcagaaatgaaatgggctcggtttgttgcagttatgcaggtcatcacacaaactgccgagaatactgtcaagccatttttcgaacagactcttctcctggtccatctcagataaaagcagtggaaaattattgcgcctctattagtccacaattaatacattgtgtgaacaattatactcaatcttatccaatgaggaacccaacggatagtttatattgctgtgacagagctgaagaccatgcttgccaaaatgcctgcaagagaatcctgatgtccaagaaaacggaaatggagattgttgatggtctcatcgagggttgtaagacccagcccttgcctcaagatcctctttggcaatgttttcttgaaagctcacaatctgttcaccctggagtcactgtacaccctcctccctctacaggcctcgatggggctaaattgcattgttgttctaaagcaaacacttcaacatgtagggaactctgcactaaactttacagcatgagctggggcaatacacagagttggcaagagtttgatcgcttttgtgaatataatccagtggaagtgtccatgttgacctgtttagcggatgtccgggaaccttgccagttgggctgtagaaaccttacttactgtactaattttaacaacaggccaacagaacttttcaggagttgtaatgcacagtcagatcaaggagccatgaatgacatgaagttgtgggagaaaggaagcataaagatgccatttatcaatatacctgttcttgatattaaaaagtgccagccagagatgtggaaagcaatagcttgttcactgcagattaaaccttgtcatagtaaatctcggggaagtattatttgcaaatcagattgtgtggagattcttaaaaaatgtggagaccagaacaaattccctgaagaccacacagctgaaagtatttgtgagcttctgtcacctacagatgatctgaagaattgtatacctttggatacatacctcaggccaagtactttaggtaacattgtagaagaagtgactcatccctgtaacccaaatccttgccctgccaatgagctctgtgaagtaaaccgaaaaggatgtccatctggagatccctgtcttccatacttttgtgttcaaggttgcaaactgggagaagcttctgatttcattgtccgtcaagggacactaatccaggtgccatcatctgcaggggaagttggttgttataaaatctgttcatgtggacaaagtggactcttagaaaactgtatggaaatgcactgtatagacctccagaagtcttgtattgttggaggaaaaagaaaaagtcatggaacatcctttagtattgactgcaatgtctgttcttgttttgctggcaatttggtgtgctctacccgcctttgcctcagtgagcacagttcagaagatgaccgtcgtaccttcacaggtctgccctgtaactgtgcagatcagtttgtccctgtatgtgggcagaatgggcgcacttaccccagtgcctgcattgctcgctgtgtgggcctccaagaccatcagtttgagtttggatcatgcatgtcaaaggatccatgtaatcctaatccctgccaaaaaaaccaaaggtgcatacccaaaccacaggtctgcctgacgacttttgataaatttggatgtagccagtatgagtgtgtaccaagacagctcgcgtgtgaccaggtccaagatcctgtttgtgacacagaccacatggagcacaacaatctctgcactttataccaaagaggaaaaagcctctcttacaaaggtccctgccagcccttttgcagagcaaccgagcccgtatgtgggcacaatggtgagacctacagcagtgtgtgtgctgcctactcggatcgcgtggcagtcgattactatggggactgccaggccgtcggagtcctctcagagcacagctccgtcgccgagtgtgcttctgtcaagtgtccttcgctcttggcagctggatgcaaacccatcatcccaccgggtgcttgttgcccattatgtgctgggatgttaagagttttatttgacaaagaaaaactggatactattgctaaggtaacaaataaaaagccaataacagttctggaaatacttcagaaaatccgcatgcacgtgtctgtcccacagtgtgatgtgtttggatacttcagcattgaatcagaaattgtgatcctgatcattcccgtcgatcactatccaaaagctctgcagattgaagcctgcaataaagaagcagagaagattgagtcccttatcaactctgacagcccgactttggcgtcccatgtccctctctctgccctcatcatttcccaggtacaggtctccagcagtgtgccatcggccggtgtcagggccaggccttcttgccactccctcctccttcccctcagcttgggccttgccttgcacttgctctggacatataactgactgcccacggaaagtgcagaatgctcctccacctcactctcctgccttgaaaaagacattcaggactgctggtttgtagttgaatattggccaaggaaaggcacatgtcacctctattcgccacacagtatttttttttttaatccgccaatattagtaggatttttgttttgtttttacaaatgttaaaatgtgttgttccaaatactaatgaaaacagaatgtctcttcctggtagaccactgccatatgatttacatttcctcaccataagggtcccccactctaaagcaaatttatcgctgggaaatgagatgaccactttttagaaagataattcactgtactatcaggttcacaaacttcatttcagagttctttttgaagtatttaaggttcccgttgcatttgttttgtttacagataattacctactctggctagaagctaggggtcccagtgaagagccactgccattaaagaatatgaaacatagataaaacatctttgaaattatgtaaattatgtaaattatcaggcaaatttgcattaaattacagaaatttaattcagaaccccaactactgtgttatgcaaaagcaagctgattaaatgacactcatataattatatgttgtaagcaacaggctcactggtcacggatttgtgtctgtgacttttgtgaaagggagaagtgacattgcatcaaagcatcttgcattatgcaatttttatattaaccagatatatattcatcggtattcatccaagttaaatgtagagtttttaaacatcaatctttaaaccaattgctgctacttatataattgccaaaaagtgaaataatgtgtagttcatgtaaataatacattatatttctattttattatgaagaaggtgaatagccatatttgtaaaatgacaatcatgtgtgttaacccagtgctttccattcgtgaaaacacatttgctttttgtgatatgcacaatgtagataagtgttctgtctgactttcttttttgatatagaagtataaagaattgtggtttatatatttaaaagtgtcaagctgagtattaaaatgtatgcatgttgtctaagaaattgaatacttgaatgtgtctcacagtttgaaataagctatttgatgtaatacttcttgtgtgtatgcacatgaaacttagattttacatgaagtattttttcagtattatatgtaccctctgaaatacatagggatatgcgtattataccaaaatgttgctgaaaaatgggcacttaaagctttcagaatatgtcagtgctgatgtagcatgcttgttgcaattgccttttttctgtataaatgtctttaatgcaatatactggaaagcttttctattttaataaaaataatttttatatg

SEQ ID NO: 28730 - DNA, 3734 bp, Homo Sapiens
gctaagcctatgtcgcttactggacgctgaagtgattgggaatattagcagtgggggttctgtagggtcaggaaggggcggctggctttgggggagtgatgaggggcttgttgggggtgggggtgcgtgataaagggatttctcggctgaagacgaggctgtgaggcttctgcagaacccccaggtcaggccacatcattgaggctgcaggatctctcttcatagcccagtacgactctccgccgtgtccctggttggaaaatccaaacacctatccagcttctggctcctgggaaaagtggagttgtcagcaagagagaccgagagtagaagcccagagtggagatgcctgctgatgtgaatttatcccagaagcctcaggtcctgggtccagagaagcaggatggatcttgcgaggcatcagtgtcatttgaggacgtgaccgtggacttcagcagggaggagtggcagcaactggaccctgcccagagatgcctgtaccgggatgtgatgctggagctctatagccatctcttcgcagtggggtatcacattcccaacccagaggtcatcttcagaatgctaaaagaaaaggagccgcgtgtggaggaggctgaagtctcacatcagaggtgtcaagaaagggagtttgggcttgaaatcccacaaaaggagatttctaagaaagcttcatttcaaaaggatatggtaggtgagttcacaagagatggttcatggtgttccattttagaagaactgaggctggatgctgaccgcacaaagaaagatgagcaaaatcaaattcaacccatgagtcacagtgctttcttcaacaagaaaacattgaacacagaaagcaattgtgaatataaggaccctgggaaaatgattcgcacgaggccccaccttgcttcttcacagaaacaacctcagaaatgttgcttatttacagaaagtttgaagctgaacctagaagtgaacggtcagaatgaaagcaatgacacagaacagcttgatgacgttgttgggtctggtcagctattcagccatagctcttctgatgcctgcagcaagaatattcatacaggagagacattttgcaaaggtaaccagtgtagaaaagtctgtggccataaacagtcactcaagcaacatcaaattcatactcagaagaaaccagatggatgttctgaatgtggggggagcttcacccagaagtcacacctctttgcccaacagagaattcatagtgtaggaaacctccatgaatgtggcaaatgtggaaaagccttcatgccacaactaaaactcagtgtatatctgacagatcatacaggtgatataccctgtatatgcaaggaatgtgggaaggtctttattcagagatcagaattgcttacgcaccagaaaacacacactagaaagaagccctataaatgccatgactgtggaaaagcctttttccagatgttatctctcttcagacatcagagaactcacagtagagaaaaactctatgaatgcagtgaatgtggcaaaggcttctcccaaaactcaaccctcattatacatcagaaaattcatactggtgagagacagtatgcatgcagtgaatgtgggaaagcctttacccagaagtcaacactcagcttgcaccagagaatccactcagggcagaagtcctatgtgtgtatcgaatgcgggcaggccttcatccagaaggcacacctgattgtccatcaaagaagccacacaggagaaaaaccttatcagtgccacaactgtgggaaatccttcatttccaagtcacagcttgatatacatcatcgaattcatacaggggagaaaccttatgaatgcagtgactgtggaaaaaccttcacccaaaagtcacacctgaatatacaccagaaaattcatactggagaaagacaccatgtatgcagtgaatgcgggaaagccttcaaccagaagtcaatactcagcatgcatcagagaattcacaccggagagaagccttacaaatgcagtgaatgtgggaaagccttcacttctaagtctcaattcaaagagcatcagcgaattcacacgggtgagaaaccctatgtgtgcactgaatgtgggaaggccttcaacggcaggtcaaatttccataaacatcaaataactcacactagagagaggccttttgtctgttacaaatgtgggaaggcttttgtccagaaatcagagttgattacccatcaaagaactcacatgggagagaaaccctatgaatgccttgactgtgggaaatcgttcagtaagaaaccacaactcaaggtgcatcagcgaattcacacgggagaaagaccttatgtgtgttctgaatgtggaaaggccttcaacaacaggtcaaacttcaataaacaccaaacaactcataccagagacaaatcttacaaatgcagttattctgtgaaaggctttaccaagcaatgaattcctagtgcatcagcatattcataaatgaaatatactccgagtttcttgaagaagagaacatcttctcagaatcaggtctaattatatgttattgaattcatgcttcagaaaaactctagggatgcactgcatgtgtgaacacatgataaaaaagtcatgctttattttagtgagggcaattacagagaaaagagtaagcagaaatgtccttctgagtactggcctcattaaggattataaattttctccccgggaagaaaccctgactaacgcattgagaaaagcctttctgtaaagaatggtacaagacaggttgttactcgattatttatagtaaaatatgtgggaaattatatcaatgataaccctgtttattgtgggatatcaatatttttaaagtgccaacacagtcatgataggacaatattttatgtgtgtgtgtgcgccttatgtatataagcatatatataatatataagcatattattatatacaggttgagtatcccttctccaaaatgcctgggatcagaagcattttggatttcagatacttacagattttggaatatttgcattatatttattggttgagcatccctaatctgaaaatccaagattaaatgctccaattagcatttcctttgagcgtcatgttagagttcaaaaagtttcagattttgggttttcagattaggaatacccaacctgtatgtacgtatatttctgtatctatgtatgtatatatatgcatatgcagacatatgtatatggtctggtcagcatatgtgtatgtatgcgtatgtatgtatgtatgtatgccctcagtgcagtggggtttgctgcagaattcactgcatagcaggagatgtaagcagatgagttattttttaagagaatctaatctaattgtttttataaaaattattccctattgaatatttatataatgaggttgtatcaacaatgattaactcctttattatacatacacatgaatgtgcatttttggtaaatgcataaatgagattctataatgtttactgatctttatattacagattttctcttcttttaggattagctcagcttgccccccctttccatctccaccatctatagtgagcctctccataattagtgccaaccattagtctcgttcatatttttacaccaggagtcaacaaactgtgccattggccaaatatggcctcccaactgtttttttaaaataaagttttattggaacac

SEQ ID NO: 28731 - DNA, 3806 bp, Homo Sapiens
atactatactatactattcaattctttcaattctagtaatccaagatgatgaagtttcggttccggcggcagggcgccgacccgcagcgcgagaagctcaagcaggagcttttcgccttcaacaagactgtggagcatggcttccccaatcagcccagcgccctggccttcgacccggaacttcgcatcatggccatcggcaccaggtctggggctgtcaagatctatggtgcacctggcgtggagttcacaggcctgcaccgggatgcagccactgtcacacagatgcacttcttgaccggccagggccgcctcctgtccctgcttgatgacagcagtctgcatctctgggagattgtccaccataatggctgtgcccacctggaagaagcactcagtttccagctgcccagccggcccggctttgatggtgccagtgctccgctcagccttacccgagtcacagtggtcctgctggtggctgccggggacatagcaggcctgggcactgagggcagcagtgtcttcttcctggatgttaccaccctgaccctgctcgaggggcagacgcttgccccaggggaggttctgcgcagcgtgccagacgactaccgctgtgggaaggcactgggccccgtggagtcactccagggacactgcgggaccccacaaagattctcattggctacagaccggggcctgctggtcatctggaaccagtcccggcagtgtgtggaccacatcttcctggggaaccagcagctggagagcctatgctgggggcgtgatagcagcactgtggtcagctcacacagcgatggcagctatgctgtctggtctgtggatgccggcagcttcccaacgctgcagcccacggtagccaccacaccttacggcccctttccctgcaaggccattaacaagattctgtggcggaactgtgaatctgggggccactttatcatcttcagcggtggcatgccccgtgccagctatggtgaccgccactgtgtaagtgtgcttcgagccgagacattggtgacgctggacttcacttcccgcatcatcgacttcttcacagtgcacagcacacggcccgaggatgaatttgatgacccccaggccctggctgtgctgctggaagaggagctggtggtgctggacctgcagactcctggctggccagctgtgcctgccccatacctggccccgctgcactcctctgcaatcacttgctcggcctacgtggccagtgtccccgccaagctgtgggcccgcattgtgagcgctggcgagcagcagagcccccagcctgtctccagtgccttgagctggcccatcactgggggccgaaacctggcccaggagccgtcacagcgagggctgctgctgacgggccatgaggacggcaccgtgaggttctgggatgcctcgggtgtggcgctgcggccgctctataagctgagcacagctggcctcttccagacagactgtgagcacgctgacagcctggcccaggctgccgaggacgactggccacccttccgcaaggtgggctgcttcgatccctacagtgacgatccccggcttggcgtgcagaaggttgctctctgcaagtatacagcccagatggtggtggctggcactgcaggccaggtgctggtactggagcttagtgatgtgccggtggagcaggcggtcagcgtggccatcatagacctcctccaggaccgcgagggcttcacatggaagggccacgagcggctgagcccacgcacggggccgctgccctggcctgctggcttcctgccccgtgtcctggtgcagtgcctgccgccagctgctgtaaccgctgtcacactccacaccgagtggagcctcgtggcttttggcaccagtcatggctttggcctcttcgactaccagcgcaagagccctgtgctggccaggtgcactcttcaccccaatgactccctggccatggagggtccgctctcccgggtgaagtctctcaagaagtcactgcgccagtctttccggcgcattcgcaagagtcgtgtctctggcaagaagcgggctgctaatgccagcagcaagttgctggaagccaatgcacagctggctgagcaggcctgcccccacgacgtggagatgacgcccgtgcagcgccgcattgagccccgctctgccgatgactccttgtcgggtgtcgtgcgttgcctatactttgccgacacattccttcgagatgggcccaccacgggtcccaccatgtgggctggcaccaactcaggctctgtgttcgcctatgcactggaggtgccggcagcagcagtgggtggtgagaagcggcctgagcaagcggtggaggccgtgctgggcaagaaggagcagctgatgcaccgggcgcctgtggtggccatttgccgtgttggacggcgtggccgcccactgcccgagccctacgaggcctcacgggacctggcgcaggcacctgacatgcagggtggtcacgctgtgctcatcgcatctgaggagcagttcaaggtgttcacactgcccaaggtgagcgcgaagaccaagttcaagctgacggcccatgagggctgtcgtgtgcgcaaggtggcactggccacgttttgccagtgtggcctgcagactatgctgagacctgcctggcctgtgctcaccaacctgggtgacgtccacgtcttctcggtgcctctgcggccccaggtgcactattcctgcatccgtaaggaggacatcagcggcatcgcttcgtgcgtctttacgcgccatggccagggcttttacctgatatccccatcagaatttgaacgcttctccctaagtgcccggaacatcacagagcgctctgctctctggacattaactggccccgcgatgccacccaggccagttacaggatccgagagtcaccccaagctgagccaggctaacgggaccccaagcatcctgctggccccacagagccttgatggaagccctgatccagcccacagcatgggacctgacaccccggagccacccgaggctgcactctcacccatgtccatcgactcagccaccagtgctgacaccacgctgacacgacaggggacgtcacagtggaagatgtgaaggatttcctgggctcctctgaggagtcagagaagaacctgaggaacctggcagaagacgaggcccacgcctgtgccatcctgatcaaataaggaaggccagaactatcccgacctccacctgccctgctcggagctggagtgctggatccctggcacctgcctggccccttaacatagaaccacgcctgctaacctgtaggctccactgggacctgctgtcctgtcccgcctgaccctgggccctggagcagcaccagccccagggtgtgggcctgggacctgggccagaactgagccctcctgcaggcatttggctgccctgggggcccactgcctagggaagaggacaggtgggggcccagcacctgtgccacctccccccctccacacaccatccttccccctcactttgcagagtatttttccttttttttttttttcttttttcttaaagacggagtcttgctctgtcgcccaggctggagtgcagtggccccatctctgctcactgcaaagccccgccttctgggttcccgccattcttctgcctcagcctcccaagtagctgggactacaggcgcccaccaccacgcccagctaattttttctgtatttttagtagagatggggtttttcaccatgttagccaggatggtctcg

SEQ ID NO: 28732 - DNA, 1637 bp, Homo Sapiens
gaggcgaaccggagcgcggggccgcggtcgccccgaccagagccgggagaccgcagcacccgcagccgcccgcgagcgcgccgaagacagcgcgcaggcgagagcgcgcgggcgggggcgcgcaggccctgcccgccccttccgtccccacccccctccgccctttcctctccccaccttcctctcgcctcccgcgcccccgcaccgggcgcccaccctgtcctcctcctgcgggagcgttgtccgtgttggcggccgcagcgggccgggccggtccggcgggccgggggatggcgctgctggacctggccttggagggaatggccgtcttcgggttcgtcctcttcttggtgctgtggctgatgcatttcatggctatcatctacacccgattacacctcaacaagaaggcaactgacaaacagccttatagcaagctcccaggtgtctctcttctgaaaccactgaaaggggtagatcctaacttaatcaacaacctggaaacattctttgaattggattatcccaaatatgaagtgctcctttgtgtacaagatcatgatgatccagccattgatgtatgtaagaagcttcttggaaaatatccaaatgttgatgctagattgtttataggtggtaaaaaagttggcattaatcctaaaattaataatttaatgccaggatatgaagttgcaaagtatgatcttatatggatttgtgatagtggaataagagtaattccagatacgcttactgacatggtgaatcaaatgacagaaaaagtaggcttggttcacgggctgccttacgtagcagacagacagggctttgctgccaccttagagcaggtatattttggaacttcacatccaagatactatatctctgccaatgtaactggtttcaaatgtgtgacaggaatgtcttgtttaatgagaaaagatgtgttggatcaagcaggaggacttatagcttttgctcagtacattgccgaagattactttatggccaaagcgatagctgaccgaggttggaggtttgcaatgtccactcaagttgcaatgcaaaactctggctcatattcaatttctcagtttcaatccagaatgatcaggtggaccaaactacgaattaacatgcttcctgctacaataatttgtgagccaatttcagaatgctttgttgccagtttaattattggatgggcagcccaccatgtgttcagatgggatattatggtatttttcatgtgtcattgcctggcatggtttatatttgactacattcaactcaggggtgtccagggtggcacactgtgtttttcaaaacttgattatgcagtcgcctggttcatccgcgaatccatgacaatatacatttttttgtctgcattatgggacccaactataagctggagaactggtcgctacagattacgctgtgggggtacagcagaggaaatcctagatgtataactacagctttgtgactgtatataaaggaaaaaagagaagtattataaattatgtttatataaatgcttttaaaaatctaccttctgtagttttatcacatgtatgttttggtatctgttctttaatttatttttgcatggcacttgcatctgtgaaaaaaaa

SEQ ID NO: 28733 - DNA, 2443 bp, Homo Sapiens
caccgccaccgcctggtccaggcccaagcccaggccctgcgcggagcggagcggcgcggcgtccacccgggcccagccagccggcgcggcgggggcgggtccaggatcttcggcggatcttcggcggatcttcggcggatcttccattctcagggcgggagccggagtccgggcgcccgggatcgggctgggcccgcgcccatggcaagcgcggcctgcccgggccctggggaccctgccatgtgaggcaggcccgggctgggggcccggccatggccggggaacggcccccactgcggggccctgggcccgggcctggagaggtgccgggggaggggcccccggggccggggggcacgggcggaggcccgggccggggccgcccctcctcctaccgggttctccgcagcgccgtgtctagcctggcgcgtgtggacgattttcactgcgcggagaagatcggggccggcttcttctctgaggtctacaaggttcggcaccgacagtcagggcaagtcatggtgctgaagatgaacaagctccccagtaaccggggcaacacactacgggaagtgcagctgatgaaccggctcaggcaccccaacatcctaaggttcatgggagtctgtgtgcaccagggacagctgcacgctcttacagagtatatgaatggggggacattggaacagctgctcagctcccctgaacccctatcctggccggtcaggctccacctggccctggacattgcccgaggcctgcggtacctgcactccaaaggtgtatttcaccgcgacctcacatccaagaactgtctagtccgacgggaagatcgaggcttcaccgctgtcgtgggtgacttcgggctggccgaaaagattcctgtgtatagggagggggcaaggaaggagccattggccgtggtgggctccccatactggatggctccagaggtgttacggggtgagctgtatgatgagaaggctgatgtctttgccttcgggattgtcctctgtgagctcatcgcccgagtacctgcagaccctgactacctaccacgcactgaggactttggcctggatgtgcctgctttccgaactctggtgggggatgactgcccactgcctttcttgctcctggccatccactgctgcaacctggaacccagcacccgtgcccccttcaccgaaattacccagcacctggaatggatcctggagcagctgcctgagccagccccactcaccaggaccgccctgacacacaatcagggctctgttgcaagagggggtccctctgccacgcttcccaggccagatccccggctttcccgaagccggtcagacctcttcctgcccccatcaccagaatcaccccccaactggggggacaatctgactcgagtcaaccccttctcactacgggaagacctcaggggtggcaagatcaagctcttagacacacccagcaagccagtcctgcctcttgtgccaccatcaccattcccatccactcagctgcccttggtgaccactccggagaccctggtccagcctgggacacctgcccgccgctgccgctcactaccctcatcccccgagctcccccgccgtatggagacagcactgccaggtcctggccctcccgctgtgggcccctcggctgaagagaagatggagtgcgagggcagcagccctgagccggaacctccagggccagcgccccagctgcctctggctgtggccacagacaacttcatcagcacctgttcctcggcctcccaaccctggtcccctagatcaggacccgtcctcaataacaatcccccagctgtggtggtgaactccccacaaggctgggctggggagccctggaaccgggcccagcatagcctgccccgggcggcagccctggagcggacagaaccctcgccacccccttcagctccccgggagcccgatgaggggctgccctgtcctggctgctgcctcggccccttcagctttggcttcctgtccatgtgcccccgccccacaccagctgttgcccgctaccgcaacctgaactgtgaggcgggcagtctcctctgccaccgagggcaccacgccaagccacccacacccagcctgcagctgcctggggcacgctcttagcagtggagcccgtggtctcaggcctccaactttggccttcaggacaccctgtaagaacagagcacacttgctggacagtgccagttccagatgggctgaccggctcttctccccgtgtaggggagccccagcatggactcaagggacagagcacttccagtcgaccccccggctcgcgttcccgtggggatcactgaaccagacacagcattgctgacacatgagactaacacgtgcaattatttaaaaagatttcaataaaactgcctggctggctccgggccgcccct

SEQ ID NO: 28734 - DNA, 5544 bp, Homo Sapiens
ctcctgcacggcgagtgctggagcacgagctaccgctcgctcggtcagggcgccccctccgcccgcctcctgcttcctcctccgctgcctgccgccgccgcctccaccattgtataatgctcggggcgcgcaggcagagaacggcggagtcttagcttcagcctcgcctgctgcccgctccccggcgccaccctcgggcccctggagcggggcactccgcatggagcgggagtagctgaggagtgggcggaaacccctcctgatgcgttagttcccaggtggagctgcatgtgatatatgttgggtaaaggaggaaaacggaagtttgatgagcatgaagatgggctggaaggcaaaatcgtgtctccctgtgacggtccatccaaggtgtcttacaccttacagcgccagactatcttcaacatttcccttatgaaactctataaccacaggcccctgacagagcccagcttgcaaaagaccgttttaattaacaacatgttgaggcggatccaggaggaactcaaacaggaaggcagcctgaggcccatgttcaccccctcctcccagcccaccaccgagcccagcgacagctaccgagaggccccgccggccttcagccacctggcgtccccgtcctcccacccctgcgacctcggaagcactacgcccctggaggcctgcctcaccccggcctcactgctcgaggacgacgatgacacgttttgcacctcccaggccatgcagcccacggctcccaccaaactgtcacctccagccctcttgccagaaaaggacagtttctcctctgccttggacgagatcgaggagctctgtcccacatctacctccacagaggcggccacggctgcgactgacagtgtgaaagggacctccagcgaggctggcacccagaaactcgacggtcctcaagagagccgcgcagatgactcaaaactgatggactctctgcctgggaattttgaaataacgacgtccacgggtttcctgacagacttgaccctggatgacatcctgtttgctgacattgatacgtccatgtatgattttgacccctgcacttcctcatcagggacagcctcaaaaatggcccctgtgtctgccgacgacctcctcaaaactctggctccttacagcagtcagcctgtcaccccaagtcagcctttcaaaatggacctcacagagctggaccacatcatggaggtgcttgttgggtcctaagacccagggacccagcgactatgcccacccagaccccagagcgttcccataaccctgacagttctccacactgtgcatgcacccttgcttgcctttttcagagaaaaagaaaattttacaacaggatcacactagtttttgctttgagcagagttggagtgccttcatccaagtatgaccacttttaatacacttttttgagtggttcctcagagacctactaccctggtataggaaagaatccatttgaagacaatgttgcaatgttgaatgacaaaaataaacagttcaagtgaagcacaaggattaagttggaaaagctgtaaattgcatgtgcatatttgtctattttttctataagttttattgcaagaggtaaagaagaaaactatatatatatatcttatttagataatctcagtaccttttctggcatttttgccctgtataggttgacttggcaattcggcctttttagaggcattaactactcctcgtaagtgttgcatttacatggctgtttagaaaactgctgcccaaatttattttatatttttgtacagattctgcagtttatgatattgtttttctaaaaacaaatgctgtttatacatatgagatagctattttgataggatttgctcacatagttcctgcaaacttcagatgtacaagttgcacttgtacttttatagagttgtaatgttttatatgtgtatggtgcaagagaaaattggatcaaatcaatctgcagttgatgtccccaaatgcaaacacaggcacacacatgcacacacccataaacacacacacagtgctttaagaaagggccaggtgatatcacacccaaatttcacaagcactgaccccctggcaccaacacccgccagtactgtgacttccaaagccagagccacatgtgctcatcaaacttgcattaagcagttggcgggagatggctgtggagctgggggtttaagtgatggttctcttttgctccctcttttgagggtaaagctactgtctttcttaagagtgtatttatgccaagtttgcgcttttaattgtttttattttgttttttaatgaaaacccagatctttcctttttggcataatttttatgatgacctgaaattttacatccgaacaaaattttacatccgaaaagcaaccaacttcttcatggaactcagccctgttgcaatgcttagggcccttaaagaagaaaatctccccagaaggcatccatcatgttgcttaattgtcttctgcagcttcctttccctagagctttccctgtgttgctaagagctgaaaatggcatcttcgtgatcaccacagtgagcttggctcgcctcggccggcccgggatgcactcttacaacatgtgtgactcttgaacctggagttcatcacattacgtcacagcttcccatctggttgctttcctgagtcagctacttcacacttgtcaaggctgttttaccccaaaactcagacaggactttctatgcatgttttccctcctccccccaattccccccccatcaccttatctcccaggacacacttgagaagtagctttttattcctagtggtgtacatttaattttaaaaaggttgcaatgtatcatgcttgttgccgaaactgtttatggccttcttgtttcagttttttcttttcttccaatggtactttagctgttgagtgcaggttacaacctatattgttatgcagatggcttctttaggaataacttttatatttatttaaaaatttttaaattatgggatgttttgttgttgttgttgtctttgttgttggtcatttgtcaatattcagtcaccaattctgctcacttcttgccatggataaaattgggtctttctggctaattaaaaaagacaactttataaaatggcactttaagcaagccatagttagttttatttttgtaatgcacatggcaaagcaaagacgtttgtgatgaaggaactgctcatctaagcaaaagatttgagtatgatatgataaaggctttctacattctaatttactttttccccccacttgaatgtgttttaaaggctaattatcagctcagtagagcagtgagaaactgatcaaattgcacttgttctcctacaagcaacctccacgcagacacctcgtactgctacaggtgtgtcatttcctttaataggaccagggaccatgtaactgaggtgagggttgtagtagatgcttccagtgtcagtatgcctgttaattttaagagcttccctttcttgcagagaacaagtctgcccagattccatgctttctataactggaggacctggcaaacctgccgcatgctgcacacatctacctacgtacacatatacaatagtattgatgattctgaacaataacagggtaaaacagttggtttgccattgttaaaaactgatttacagtaacttacaacaactgtacttttgttggattagcaaatcatgtgtttaaacaaatcccatatgttgggcaacagttcaaataagcacggagaagtgttgcccaaacttggttctctgactcttatgtatttgtaaggctgggcttcaaaatcaaaacaaaaaccccaaaaacagcaggcaaatgctttttaactctgacaccgttgccataaatccctgatactcaaagtctaacaagaaagacatggaaaattagcagcccattttcagaaagatcaaaatgatctagggttctaattgcttttgcatcctattcttacaaagtgatgtcccaacagggaacagtaggagctggagtgggatctccaagtcccagtttgagtgtgggatgtgcttccagcagtgccttccctttatgaaagacatcacatggcatccagggccaggcaggcagcttgaggtgcctttacgagaaaaccgagctggggctgggagaggacagttattgacactgatgtgcaatgaagtgacaagatgagagcagaatcgtaagagctttgaatttgaagtgagtttttttccccccataagttatttattccttttttctgtgtaaatatatttattttactgtggagcgctaacatctggatcgtaacatgtgcagaatgtatggtaggaatgtattctcttgtaggaatgtaaatctgtattaaaagggggtccaagccaggcccccaggtcttctcattgtatgcacagtccgcattcatttttactcttctctaatatgggtctatttgaaatatgcaaaaggtatgaggaatgttttaatacctccaaatttttaagaaaagcatcaaagggttgatattttttaaagtttttttagtagcactttctctggatgacagaaggggcaaccacatgggcacccttgttcataccaaagggtgagcagtggccagagcctcctctgcacctctcgagtgtctttaccaattgagctttttatcgccatagccccttggagtgccccagctgccctgaggtcaatcaaggaaaatttcttaatgaaataagctccaaagagccaaagtatcaacttacagatcgtttttaaagcttaaatttatgaaccacctttgtggtaaacaatgaattatgaataccgcagggcagccttcttaaatgacaaatgtaaaaaaaaaaaaaaaagactctacttcgtgcagcaattgctactctatacgaattgtcttaatttgaaaaccttgctgttacaaattggacctttatacattttctgaaaacaatgaaaagagtatatttaaccttttctggctgtaaatggttaccttcctgtaactgccccgcacctggaggcatggagttgtgtgcatcctgcttatgtacaattgttttcagtgtttctaagaatgagtctgaatggttcttgaaaattagccaggatcaaatgctattgcagacaaagccaataaaaagttggacttcttttggggataacaagttttggaagagaaatgcaggccatatgtgcgcatgaccgagattttgaaaaaagatgtacatagtgacatgtttggtgcatggtttttgaggagggcttttgtcaaaaaggaggtataacctttcccccacagacctgagagctgtgccttttctatgcaatattacagacgttacatcggaacccagatggctgtattcacatgtaggtttgggctgtaatctaaacaattggacagattaaatgtacatggaaatgagcagtcttacttttgtagttttatattatacaataaacagttaaaagatg

SEQ ID NO: 28735 - DNA, 2154 bp, Homo Sapiens
ggcttgggctccgggggaggcggcggccgcggcggcggctggggcagcccgggcagcccgagccccgcagcctgggcctgtgctcggcgccatgagcggcggcgggccttcgggaggcggccctgggggctcgggcagggcgcggactagctcgttcgcggagcccggcggcggaggcggaggaggcggcggcggccccggaggctcggcctccggcccaggcggcaccggcggcggaaaggcatctgtcggggccatgggtgggggcgtcggggcctcgagctccgggggtggacccggcggcagcggcggaggaggcagcggaggccccggcgcaggcactagcttcccgccgcccggggtgaagctgggccgtgacagcgggaaggtgaccacagtcgtagccactctaggccaaggcccagagcgctcccaagaagtggcttacacggacatcaaagtgattggcaatggctcatttggggtcgtgtaccaggcacggctggcagagaccagggaactagtcgccatcaagaaggttctccaggacaagaggttcaagaaccgagagctgcagatcatgcgtaagctggaccactgcaatattgtgaggctgagatactttttctactccagtggcgagaagaaagacgagctttacctaaatctggtgctggaatatgtgcccgagacagtgtaccgggtggcccgccacttcaccaaggccaagttgaccatccctatcctctatgtcaaggtgtacatgtaccagctcttccgcagcttggcctacatccactcccagggcgtgtgtcaccgcgacatcaagccccagaacctgctggtggaccctgacactgctgtcctcaagctctgcgattttggcagtgcaaagcagttggtccgaggggagcccaatgtctcctacatctgttctcgctactaccgggccccagagctcatctttggagccactgattacacctcatccatcgatgtttggtcagctggctgtgtactggcagagctcctcttgggccagcccatcttccctggggacagtggggtggaccagctggtggagatcatcaaggtgctgggaacaccaacccgggaacaaatccgagagatgaaccccaactacacggagttcaagttccctcagattaaagctcacccctggacaaaggtgttcaaatctcgaacgccgccagaggccatcgcgctctgctctagcctgctggagtacaccccatcctcaaggctctccccactagaggcctgtgcgcacagcttctttgatgaactgcgatgtctgggaacccagctgcctaacaaccgcccacttccccctctcttcaacttcagtgctggtgaactctccatccaaccgtctctcaacgccattctcatccctcctcacttgaggtccccagcgggcactaccaccctcaccccgtcctcacaagctttaactgagactccgaccagctcagactggcagtcgaccgatgccacacctaccctcactaactcctcctgagggccccaccaagcacccttccacttccatctgggagccccaagaggggctgggaaggggggccatagcccatcaagctcctgccctggctgggcccctagactagagggcagaggtaaatgagtccctgtccccacctccagtccctccctcaccagcctcacccctgtggtgggctttttaagaggattttaactggttgtggggagggaagagaaggacagggtgttggggggatgaggacctcctacccccttggccccctcccctcccccagacctccacctcctccagaccccctcccctcctgtgtcccttgtaaatagaaccagcccagcccgtctcctcttcccttccctggcccccgggtgtaaatagattgttataatttttttcttaaagaaaacgtcgattcgcaccgtccaacctggccccgcccctcctacagctgtaactcccctcctgtcctctgcccccaaggtctactccctcctcaccccaccctggagggccaggggagtggagagagctcctgatgtcttagtttccacagtaaggtttgcctgtgtacagacctccgttcaataaattattggcatgaaaacctgaaa

SEQ ID NO: 28736 - DNA, 17133 bp, Homo Sapiens
attatgaaaaaatttaaatgtgcaaaataaagaagagtagtataataaactcccatgcaccaatcatctgcctggcccttatgtttcatccacaacccaacccacttacctgactccaggttattttaaaacaacttcaggcactatagcatctaattttcagtaatttaaaaaagagtgtataagaatgctttagagattacaaggcaaatgcttacacattatctttttccattctcataccctgttctttggcactttaccgaaaaggaaatgagaagggttcagagaaattaaatgacttttctttggtaacatgcctagtatacatgtagtcagaacttgaagcttttgctttttttttttcttttttaacatcaactttcgtgcttagtccagtgtataacatcacaggcaaattcaaattgagaataggaatcagttgttctttaaccgtaacccttctaacttttacttatcctaagaccgggtagcaagtagggcaggagccttcatctagagggatggtgacagctctgataggggaaaattagcactggtctttccttccaaaaagccactctggctgctgctgttgacacaaggctcctggcttttgagacattatttgagtgctggattccaatactttttactttctcataagaaaaaaaaatgtgaagcatctaaggatatctcctgccttattgataaagtaagcctcaggctgaatccaaattgctgagctccaatagaactacagggcaaagcatctacacagggaattgccactcttctccaaaattaggctttattaagaggcaaggctatgttctcctcatatatatgtgtgtgtgtgtgtgtgtgtgtgtgtgtgtgtgtgtgtgtgtaaaaagtaaatgttttacacagatccccataagggaaaagtgggctatagtaatacagtatttttttgtttttcttttttttgggggggggggacagtttcgctctgtcacccagtctggagtacagtggcgcgatctcggttcactgcaaccgccgcctcccgggttcaagcgattctcctgcctcagcctcccgagtagctgggactacaggcaagcaccaccacgcccgggtgattttttttttttttatttttagtagagacgggtttcatcatgttggtcaggctggtctcgaactcctgacctcaaatgatccgcccgcctcggcctcccaatgtgctgggactacaggcgtgagccaccgcgccccgccaaatacagttttatcaggaatcaaaactgtgctctcttctggactctcagctttagctgtttggagcgtttagtctaagccttaccacttacattgtaatgtgaagatcaaattgtaacgacatggcaataataaggctcctattggttgggtaccaccagtttatgccaggcattgtactgattcatgtctttaatcctcaaaacgaccttccgaggtcagcgtttttattctttttccagaggagcaaactgagtttctgagaagtcacacccaacttggtggcagagctgacgctggcatggggttgactccaaagctctctacgccacgagggtgggaaagacaacgaaacacaagcgagaagaataatgagaactgggatcgcaacttcattaaatgagaagccaggaacaggtggcggagggcacgcggttcgctgcacggagtcgctcaggctctttgaaacaccgcgcgggggagcggggcggtgccggaagtcaggccatggcttccggttcttgcgtcggaagtggccggtcagcgtcgctgccggtctccggcggagacggactctggagtttgggcggcccgggcggccactaggtactctgatattccgtactaaacacgtctgcaagtcaagatgtcgcacccgtccccccaagccaagccctccaaccccagtaaccctcgagtcttctttgacgtggacatcggaggggagcgaggtgagcggagtctgacgctcgcggaaaagccccgaggaggcgggggttcccgggatttgggggattccaagggcggaatgcggctccggccggtgactgctcagtttcgcggaggggatggctgcctaggctggtccgccggagcaggcccggagatctagggctagatcgatccagcgcccttgtatcaatgccatcggtggtgcggaagtttctggaaatttctagttcgggaattgtggcgtcctttaggtttgcctcctgatttggtggcacttccacgccacctttgcactaccaagttagcatgaaatattttatgtttgcaatgggacagttcggaaagcatatcctgggatatgcgtctgctgggccccaggaaactatatttgccacatgagataatatatcagcacgtgctgtgttatttatacgttaaagggacttgtttgctcattgcttttgccttattactgattcttaatttagaggtccgttcagatgagcaaacattttctcttaatttgccattgggaaaatgcgctcaacgtagtgatggtgttgcctaggttacatagccgctcagaagttcctaaggcctggtgaattagggagcgtgttgctttgtaactggattggccttgttctggaacacgttggaattgctggccaggcaatgtgtttgaatgcatgtacaggacacacacacgtttacacgtacattcagtttgttgcaactagctagggctaggtttaatctcacctgtcttagctgctatctagaggaggaatttttacagcttttgcttcagaggttgcatgaggcagtttgctcagagcacaaaggctgcaggtatacgtaacacgtggcaagtccgcccacccaaagactgtttaattttctcccgttggttgcttggtgattggaaattctcagtacctcttgaagaaattactcaggatttaaaactatttgtatttaatgatatctcttacatggtgctaatcttttggctactataattggttatgatccttagtgtaatgtttcaaatctgtttatatacatacatgacagtaggtagactaaatttgaatattagaataaaataagattcactaattctagtgagtatattcaaaggaaatgaagtttgtatgtcaaagaggtatctgcactcccatgttcattgcagcattattcatgatagccaagataatggaatcaaactaggtttccatctacagatggattttttttaaaatttgatatatgtgcacagtggagtactattcacccataaaaaataatgaaatcttgtcacttctgacaacatgaattaatatggaggacattatgttacatgaaataagctgggcacaggaagacaaggcatgatctcacttacatgtggtttctaaaaagttgaccttgaagtagagaatggaatggtggatttcaggggttgggtagatgttgatcacgagagacctaatttcagttagaaagggggaataaatttaagagatctattgtataacataatgactatagttagtagcaatgtgttgtgttcttgaaattgcaaaaaagaaaaattacagtaaaggggaacttggtaattcatgattgatctgctaccataattataccaaccttctttttatcatttgtctatttggttgttttgcatactgacaagattttcttttcttttagttggtcgaattgtcttagaattgtttgcagatatcgtacccaaaactgcggaaaattttcgtgcactgtgtacaggagaaaaaggcattggacacacgactgggaaacctctccatttcaaaggatgcccttttcatcgaagtatgtgtaaattttcttaatcttgttattcttcatacagacaagtcctgttctttaggatttggggaagaaaacactaagtaggaagtgaagcttaaaaagtactattagcgtccatgtctgaggcagtaacgcagtttcgtaaaggttaggctgtgcgaggtggaattacttatggtactaaggtttatctatagagaaatggactcccctagctttacccatcctctcattctccttcactctaagatgatttgattgagaaaggaaggccgtagtcaaccaaccttaggtagcttcattgcctggtgacaaaaaagttatgcatagaccgggcgcagtggctcacgcctgtaatcccagcactttgggaggctgaggcgggtgaatcacgaggtcaggagatcgagaccatcttggctaacgcggtgaaaccccgtctctactaaaaatacaaaaaataagccgggtgtggtggtgggcgcctgtagtcccagctactcgggaggctgaggcagtagaatggcatgaactcagaaggtggagcttgcagtgagccgagatcacgccactgcactccatcctgggcgacagagtgagactctgcctcaaacaaacaaacaaacaaacaaacaaaaaaatgcataatttttgggcctgagtgcttgggaaggcagcagatttgaagattcagtgttttgggcacatgggtgatagtgtggtcaaaatatgccatttcatactgcttattacactttgtaatgaatcatacttttgtttagtgataatggttctcccaatagactgcaggctctatgagttcaagaactgtatgttttcaccattttgtttttggcatctaatacagttattgagtaagaactcagtaagtatttgtttaataaataggcaaataagcaataatcacaagagcaacattttttaaacgatttattaagaaaaaattaactttttaaaaatatttaaaatgtttactttcatgtttaataaaaacttgaaatatgctaataaactatatgcagaaaatatttaacatagcaagtgtgagactgctatctttagaaaggtctgcctgcaagagtagcacttgtttggagtctgggaacttgacacttgtaccatttcctaaatagtaatggtgatttactatgcctagcctatttgtacaaacatgaatgtgtgctctcttttggggagtctggaattttggtacatgctaggtagagtgtgcccaataaataccttgggtgctgagtctctaattggctctcctgggcagaaatactgtgtacatgttgctgcatttttgttgctgggggaagtgtgtgttctgtagcacttcatgggacggagaaagcataaggaagcctgcacatggatttttccagactctgcctgtgtctttcccgtcatctcgctgtgtatccttaccactgtgatccaaccacatactgatttgtgtgagctctagggttctctgaacatgaaagcaatcttggtaacctttgacacaaagtgatatatttgctgaaaattttccattagggtagaacaaatctactgggaatcattggtctgtattcagcagacattattgagtaactaatatgtactatgtgtacatgcacatagttataaggatgtaaaacaatacagttggtgtacttaaggagatcattgctggaaggggcagatcataatgccatatgttatgtaggcagagtcaagatactatgggagaaaaattaggacatacagcttagggatttcagtgacagttttataggggaggtatcatttgaaccgattttctgaatgttagcagggatcaggcagtgaaaataggttggattcagatggtgaaaagcctgaagcgtttggagttgcggagacgggtggggagggacaaacaggagagagacatgactagagtcatgcactacaaagttgtcttacgtacgtatccattagtaagcattgctaaaggcatccatgtctcagtcactaatagccattttccttttttgtagttattaagaaatttatgattcagggtggagacttctcaaatcagaatgggacaggtggagaaagtatttatggtgaaaaatttgaagatgaaaatttccattacaaggtaaagtagagaaaatgcatgttattgctgataaaaagattgttatatatctggaatacttgttggattaagacaccaaaaaatgtttcaagtgtgcttagattctccatttcttgtaataggaatcacttttgtaaataatggttctttaatatggaaaagttttcattcagtaatgattaattcagcattatttcattgtgatccagtttttatatgcttcagttaagccagtgagtttttaaatgcgaccagcatctggcaaaattgtttccaggaaaaatgtttccattgttggaaggatggtaacttgtgcatccttatccttgaatgtgaagagcaacaaaaccatcactaatatccaggatgtcaggggatttgcacactagcagatatagttaaatgtccaagctcctaaaggacttcagtggtgcctgtgccttcttgtcttcgttgtcccaagatgtaattggggtatattgcatcattcaagttataagaatggacatgtaagtacaaaagtaaagtgatatttttggaaataaggaatatgagcaagggtattaggataatttgaaaaaatgtcgtcagtcttccagtcagtgtttattgagccactatcactggcaccaaagggtttataaaaatgaaaggccttgatgacaaggaatttataatcctacctcagagacaagattaagatacatgggactactggagaataatagtatataaataaatgctaaattgattgaatatccttgcttgtataacattgctaatactgtctatatactgcaggagaaagatgtgatttatgcagtctgaattattatggaagtcattgaggaggaatggctacttgggctgtgcagactgggtcttgcaaggcggcaacatgtctgagatttggttaggcaggaactgtagtattgatgcagaatttaaaaagggacgtcggtgaggaaagacaaaggcaagagacgttgaggaaataaagttctagttactgttgtaccaaaggaagctaccagaaggatgaaaactaaaggtgatgtgatgatcacattgacatagagaaaaggggcctatagacaagacacatgattcttgctttctataaacgtggtggccttaaaatctgaatttgatttagactgaggggagtaaaaggcattttggtggggtggggggtgtcatgaaacattatataacatgagagttacggtgcatgcaccaacaaggaatacatttagaaagcctaggagataaagtgaaaaggttaagaaattgggtttcatagatcctttgacaggattatgccaaggtagaattttgatttcaagatgtatgcagcagtttcttttgagcactctccgaagaggtgattcatctgggatgaaaacctaatccaaatcctgtatgatttggattcttttgagattaggaaagtaccaaactgaatgtcttgggtaaattcagtatcccattattgttccagtttattgatgttttgtaaaggaagacttatactgtaggcatatttatgaatttggaagaccgttcaggtcttcccagaaaaaaagagcattcatcataaagagggcaaaatatattacaagagtttcataatgctgcatcttcattttaaaggtgaagtgtaagtattttctcatggccaatttagaaataaccctccccccgactattgtttctgttacctatttactttgataaggttttttaaagtttaaagtgattaagtgccccatgttttgtgaattaaaggttgcagtttataaaaaaataaaaagtaattaaaaaattttataagtgaaaagtaaaaaaaagtagtttgatctaaatggtagtatagtgcaccccagttttatgttcagtaaaagaacagttcagactaacacacaattcagaaaagaacacatctaaccttggttttcttttaatttttatttctacagcatgatcgggagggtttactgagcatggcaaatgcaggccgcaacacaaacggttctcagttttttatcacaacagttccaactcctcatttggatgggaaacatgtggtgtttggccaagtaattaaaggaataggagtggcaaggatattggaaaatgtggaagtgaaaggtgaaaaacctgctaaagtaagtaaaaagttacagtgaaatacacttattatcttagttgctatctttttgagacggagtctcgatctgttccaggctggagtgcagtggtgcggtctcggctcactgcagcctctgtctcccaggttcaagctattctcctgcctcagccttctgagtagcagggattacaggcgcgcgctacaacacccggctaattttttctgtatttttaatagagacggggtttcaccatgttggccaggctggtctcaaactcctgaccttgtgatccgcccacctcggcctcccaaagtgctgggattacaggcatgagccaccgcacccagcctgttagttgctatcttaaagaaatataagtaaaaggatcaggtgattattagctggaaaaatgttataataattttgggtataggagccaggatctgccactttttttttttttttttaacttttctacaatgggaaagacaattagggtagttttaaaggagatttttattatttcaactttcatttggtgatctttgctagtttacgttaagtcttcctatacctgcaaaactgttcagttggtatgtatagtagtacatagtggaatgaggataataagcccaaaatcttgtctggattgtagcattaactagaggcttggccttgactttgttacttaacttttccacacgtgttttctcctgtctaaattacttatgggtttagactagattatctctgaagacccttgtgtacttaatgtctgtgaatcaaaatgaccttaatattggctgggcatggtagctcatgcttgtaatcccagcactttgggaggctgaggtgggaggatcacttgagaccaggagttggaaaccagctttggcaacatagtgagatgctgtctctattaaaaaaaaaagaaaaaagaaaaacccctaaacgaccataatactacccagcctaagtgacagggttgtgagtgggagttggaagctcagttacttgtaggaggtaggctgtcactcagtgtatgacaagaatagtagtaaaccggaagctcatgccccacctaatgccacttacatagacaatgataaaattgccaacttattctgtgtttattgagctcctgaatagcaataaaatgcttatgtaaatactaacattgtcgtattagttggaatgtataaaaacagcattatagtacataaatgagccttctcacataaatctgtgaattggacagtgctgcacatgacttcagctgtatagcttttatctctcattattacgatagtgcacttctacaatttagggttatttttacagttgtgcgttattgcagaatgtggagaattgaaggaaggagatgacgggggaatattcccaaaagatggctctggcgacagtcatccagatttccctgaggatgcggatatagatttaaaagatgtgagtactttcagattagtcaaactttaattaatttagtaagtgaaaatatttagtactaaaagtttgagcttttgtttcagtctctcatatgatagaatctagcattaaaccacattacttactaaaatccaacatatttgtatttttttatacaggtagataaaattttattaataacagaagacttaaaaaacattggaaatacttttttcaaatcccagaactgggagatggctattaaaaaatatgcagaagttttaaggtaatattatttctaacaaattatttttaagaaattataaattgaattataaactaaaattaagaattgctcattatatttttgcaaattacttgtggaataaccaggtgtgttgaaatagttgcatttccttttttttccctcagcttgttttgagaaatttcaaaagacagaagttgaacgagtagtacataattactcataagttttacttacattcaccaatttttaacttttgctgtttacgtttttacagaactattttgataggaagttgttgatactgtgatactttaccctaagtatttcagcacgtatttcctaagaaacaaagacattctgcataagttcaataccgttaaaacaccccaaagtaatattgatagataatatcaatccatatttaggctgggcatagtggctcatgcctataatcccagcactttgggaggccaagctgggcggatcacctgaggtcgggagttcgagaccagcctggccaatatggtgaaaccccatctctactaaaaatacaaaaattagctgggctggtggcgcacgcctgtaatcccagctacttgggaggctgaggcacaagaattacttgaacccaggaggtggaggttgcagcaagccgagattatgccactgcactccagcctgggcgacagagtgagattctgtctcaaaaaaaaaaaaaaaagtaatccatattccaacttccccagttgtttcaatttcttagaaaaatcaagggtccaaactaagattatgtgttatatttagtggtagtatctcttacgtttcctacctcccctggttttttattcatttgcatttttgtggagtccaagtcagttgtttttatagacttccatctgtatgtgtttgtttccttaagattagtttgaggtgaaatattttggcaagaagacttaggtgttgttttgtattacctatgatatcacatcctgaagacacatttcgctttggcctgtttgagttcacacacatggttaaagtagtgtcagccacaagcatttgttagtctgaggtggtatcgtgaaattgtatgaatttctagtccccaacaacttttcacacagtggatcttagcatcattgaaaatccatgcctgaatctgttatactgaacttctaagtttatcatcgtacagttattaactagcattcttctgtttgcgagagcctcccgcatattttttaagtatcactatagacctgtggatatttttcttttctttttttttccttttatagaaacaaggcctcctttatattgcccaggctggtctggaacttttgggcccaagcaatcctccctcctcaccttcccaagtagcagggactagaggatatcttatgggtagttttcaattccgtttgttagtacgctattattgtcattctttttcatgcccaaagggttccaaatttgttcagtggaaggcccctttcctttggcatgttcctattagtctgcgagcacttgcttgctctaagctcatcttgccttactttcagatctgatatggcagtttctccaaggacctctgatttcttttagagaaagaaaactttagaaaccaaattctgggggccaggtgtgctcagttttggggcccttttcagggacaatgcaaaatcaacacaatagagttctccttcatctttcctctactgaattcccttctcctattatgagaatcctggttccaaacataattatgttggaaagtacatagtggggacctgagttttaaaaatagaaaagtgttactagtgcataattagatttgggaattgctcttaaattggcctctttgaacactttggggaacaaaaacaattttttttaagccttcttaaaaattttaaaaagtgtgatcattaagattattaatagcatttttagagctttttatatcagaaatgacataacacttctggacatagagaagagtaattcctgtttatgtggtctttcatactgcttttattaatgcattctgcagatacgtggacagttcaaaggctgttattgagacagcagatagagccaagctgcaacctatagctttaagctgtgtactgaatattggtgcttgtaaactgaagatgtcaaattggcagggagcaattgacagttgtttagaggtaagtctgtttgattttgaactttttgaataagttggattaagacttagtttgaatagtagcaacttttatatacattaatatatcttattgcataggacctaatgaggcttaagaaaacattttgtttctaaatattttggaccctcagttctttctctacattcattttgcttataactctgtgtcacttaacagctatgaagatccttgcctttttttctcaaagcacatatatcagctcatgtattcacttaagagcacctattgtgtgttaggcattagaagacaaagtcagaaatgattaagatgtgggttatggagtcagtcaggcatggcttttttcttcttcttttttttttgagacggagtcttactctgttgcccaggctggagtgcagtggcgcaatctcggcttactgcaacctctgcctcccgggttcaagtgattctcctgcctcatcctcccaagtagctgggattacaggcatgtgccaccatgcccagataatttttgtatttttagtagagacagggtttcaccatgttggccaggctggtctcaaactcctgatctcaggtgatccacccgccttggcctcccaaagtgctaggattacaggtgtgagccaccgtgaagtagttatagagagttatataacacaatgtaaggcatttagtgtagtgcctggcacattttaagcacctaacagagacgagttattttaattaaaagatccataccctcaagaagcttaataagtgattcaggataggagggggtcagtttcaatttaggttcatcaggacttgtgtatggagaatgggttctattggaacaggtcatttatctttaggaggtcatccaggtatgctaactgataaagctagaaaggtggcagttttaccttcctcaaatagagcaattatgactctcttccctgttgtatagtttgaaaagttttccaaatgaaactttaagaattttacatattaagccaggcacctagactagctatgctcagagcaagtagaactaaaatgagatcctaattttgtagggtagatggaataagggataggaatatatttagaagggatcatacaacagaggaaaaaacttatcaaaagaaaagatgggtcttcactctgggtttttttttgttctctgtcacccatgctggagtgcagtgatgcaatcaaagctcactgcagcctcaacctcctgggctcgggtgatcctcctacctcagcctcctaagtagctgggactacagacccttgccaccatacccagctgatttttaaattttttgtagagatgggtttttgacgtgttgcccaggctggtctcttaactcctgggctcaagctgtccacccgccttggcctcacaaagtgctggtattatagttaagagcctctctgcccagcctcgatctctttttgacctgtgaggcaggtaaaatctgagtattggccattaaaagatgttacataaacaaaagataattttaaaatgtttgttctaggggagagacctgatgcataaagtctcttaggttaaaagacctgttgtaggtaagaacctaggttgggtatggtggttcatgcctgtaattccagcacttagggaggccacggcggcgggcagatcgcttaattccaggagtttgaaaccagcctgggcaacatggtgaaaccctgtctctaaaaaaaaaaaaaaattagtctggtgtggtggcacatacctgtagtcccagctacttggaggctgaggtgggaggagcacttgagcctggggggttgaggcagcagtgagctgtgatcaggccactgcactccagcctgggccacagagtgagaccttgtcttaaaaaaacaaaaaacaaaaacttaagagtttataacttaagagttattaagttattaatgttcctaaaaaacttataattcaagtaaaaagtgtatacaaatgtttcttcaaaatgattttatcttaaaagtgttagttcaggcccattcgggagattgaaaccacagtggggagcatattggaaactagagaaatgtctttctcctccatgtccattcagtgccctctgctgacaaaacttagtgcccactggcagaggagagctatttgcatgtttcagctccattttcacagagcagtgaaggatgggtttggagttgataggcaatgaattgaaatctggcatataagcttaatactttgatataaatactagctttatacttttttgtaggctcttgaactagacccatcaaataccaaagcattgtaccgcagagctcaaggatggcaaggattaaaagaatatgatcaagcattggtaaattttgttccaaatgtttaattttttaaaatagacaactacctttataaatcatacacctaacttaaatgtttttttccaattaaaggctgatcttaagaaagctcaggggatagcaccagaagataaaggtaagttggcagcttttgtagtgaaagttaattttgttatttaaatacttatcctcaggaaccattgttcactttgccagattttagatgtttgttcaacagacactacagaatgcctgctgttgggccaggcattatcatatagaatgaacaagacagtcaaagtccctgccctcaaagagcttacattctactcccattcaagaatatagtagtttttcacgttatttattcttcaagttatcatctctgtagttttttatatgtctaaatactgtttgtcttatggtatcctttgagactgtgttcctattctggttagtctagtcgagagctcagcattgtaagacacagtattcatggtaaatttaacatttgggaccattcaagttgaatgtggctataaccttagtattgatgtactggttatatgttttaggaaactatgacaaaaataagcttgtttttcaaataaaccaactatgaatagtgacactagatctgggtattacaaaatgtctttggtctcttattactaaaatgaaacaagggaagcaattactgttctctaatgtagaggcagaaggcaaatcttgatgtacttgagttctctcagttgacatcctctaaaattacgtttcatttctgtgtttgtgtgattgctcagattttctgttactagggcttagttactttgtagagaagttttttcaaggggtagttaacattaaaatagtttgttagtcaccataatttttggatattttgagaaataactcacattgcatatttattttacagctatccaggcagaattgctgaaagtcaaacaaaagataaaggcacagaaagataaagagaaggcagtatatgcaaaaatgtttgcttagaaaggattcagttttgcttattgtgtgttgattgtataaatgcaataagaaaatgtaaaggtttttgtctatgaatatgatccctaatgtgtttcttttgacaccttagttccttactgtttacagtttaggagtactgataggggttcatgcttaataaacatgtcacaatacagtaagtaaagtggttttgtttgtttctttgagatggagtcttgctctgtcacccaggctggagtgcggtggcgcaatctcggctcactgcatcctctgcctcccgggttcaagcaattctcctgcctcagcttcccaagtagctgggattacaggcacgtgccaccacgcccagctaatttttgtatttttagtagagatggggtttcaccatattggtcacgtcacgttggtcttgaactcctgaccttgtgatccaccccgccttggcctcccaaagtgctgggattacaggtgtgagccaccgtgcccggccaagtaaaatgttttttaaaatggttatgtgcattattcataaaaaataatggtgtccagtctttttaaacttgtaaagacacatcttattgaataaagagatgagagcttaagtttgtatattgtttccttcgattctttgatgtatccatggtggatgatgctaggttttcatacttatagataatacacacacacacacacacacaatcttgttcagggatgggcatacttcttctgcaagggccagatcataaagtttttaggctttgtagaccatgtaatgtcacacccactcacctgcacagttgtaattcaaaattagccatagacaatgtgtaaccaatgggtattgctgtgtttcaataaaactttagtctagaatatatattcatttttatatttgattacttaactttggcaagtcaaatgtaaagtccagtagtgaattttgctcttggtactgaatctctgaagaactgaagaggtaggaagatgctgcattcttataaaggttatttaaaagcaatacccgtaatttctttatgggacaatcttacatatagtataaaatttttatttgataatcattttgtgactattctgttcagtaatatgcagaaagacattctgaaatctgttaatctctaaacattttaacgttagcttgccatacttgaaagaaactggctagctgcagtttacattccattgtaagcaggtcctcctccaccttcaggtaccacccagttaatattctgacttggatctttaatatcacatgttttacaatgtacacagttctgagcatttatctgtaaccgaaatccatcaccttgttccacaggtacaaattcataaactcctgaaaagtaaaaataaataatattgaagtgcctaactttaaaaaatttttaaattcaaaagtaaaaattaaggaaagagtagccacagaaaccttaaaggttgctttctgaatgcttacccatagagattatgaagaccttggtgcattgctattgatgtgagtgtaaattacatgtacataataaaaggaggtacagcggtattcaactgagttgtctcactatcaagggtactcgacactgagtgtttgagttccacacaacctcgaagtcctcccttattcacagtcatcctctcattcacaggggacaagttccaaga

SEQ ID NO: 28737 - DNA, 5547 bp, Homo Sapiens
aagttttggagcgccggacaagctgaggtccgcgactcgtcgctaagattccccaaaactgagatttcaagaaaattcaccctttccgctttctttggcgcccttcaaccgtgaaggaaatgaaggttgagaacctggaacccgcttccaaagaccaagccctttctctgtgcctcacaacagtcttgcgctgtagctgtttttattacccctattttactactggggaggagatttgaggtcctgaaagtgaagtgacttgctggacgtcacttagcagaggagatggcgaaacctggattagaggcgatgccttctaactcccagcgtggacttgcctcctttcctgggggtgactgaatgcccagccagggacgcgacgtctctggccagcagaaatacggcctcctccccgccgactgggcaaagggggaccttgcggccaaggagggattcgcaggcgggccgggggtgggagcgggggccggagccggagccttggcccgcccccgggcggcgctgtgattggccggccgctccggcgggcgtcgcgattggccgtcctgcagccgttgagatttgaactcggtatttgtggctttgcccgcgcgttgccagactcagaggcggccctttgcctctgcctgccggggattggccggattctccgccgacttgaaaactgccttgctaattggtgcgtgttgtgcacgcgtgttttttccttttcatttcagcctgactgccggaatcagagccgcgggtgagatccccagccctgtgagcctgtaggagtagaatggctccccaaatgtatgagttccatctgccattatccccagaggagttgttgaaaagtggaggggtgaatcagtatgttgtgcaagaggtactgtccatcaaacatcttccaccacagcttagagcttttcaggctgcctttcgagctcaggggcccctggctatgctgcagcactttgatactatctacagcattttgcatcactttcgaagtatagatcctggcctcaaagaagatactctggaattcctgataaaagtggtatcccgccactcccaggagcttccagctatcctggatgatacaactttgagtggatcagatagaaacgcccatctaaatgccctcaaaatgaactgttatgctctgatacgtctcctggaatcctttgagaccatggccagccagacaaaccttgtggacctggaccttggtgggaagggtaagaaagctcggaccaaggcagcccatggctttgactgggaagaagagaggcaaccaattcttcagcttttaacacagctacttcagttggacatccgtcacctgtggaaccactcaataattgaagaagaatttgtcagtttggttactggctgttgctaccgccttctggagaatcccaccattaatcaccagaagaaccgccccactcgggaagccataacacacctgcttggtgtagccttgacccgttataaccatatgctcagtgctacagtgaagatcatccagatgctgcagcactttgaacacctggcacctgtactggttgcagccgtgagtctatgggcaactgactatggaatgaagagcatagtgggagagattgtaagagagattggacaaaagtgtccccaagagctgagtcgagacccttcagggacaaagggctttgcagcattcctgacagaactagcagaacgtgtcccagctatcctgatgtccagcatgtgcattttgctagatcacctggatggagaaaattacatgatgcgtaatgctgtgctggcagccatggcggagatggtgctgcaggttctcagtggcgatcaactggaagcagcagcccgagacaccagagaccagttcttggatactttacaagcccatggccatgatgtcaactcctttgtgcggagccgtgttttgcagctcttcacccgaattgtccagcagaaggctctccccctgacacgtttccaggcagtggtggctttagctgtgggacgtctggcagacaagtcagtgctagtatgtaaaaatgccatccagctgctggccagttttctagccaataatcctttctcctgcaagcttagtgatgctgaccttgccggaccactgcagaaggagacccagaaattacaagagatgagggcccagaggcgaactgcagcagcttctgcagtgctggacccagaggaggagtgggaagccatgctgccagagttgaagtctaccctgcagcagcttctacagcttccccagggagaggaggagattcctgagcaaattgccaatacagagacaactgaagatgtgaaaggacgcatctatcaactgcttgccaaagctagttacaaaaaggccatcattctcactcgagaagccacaggccacttccaggagtccgaacccttcagtcatatagacccagaggagtcagaggagaccaggctcttgaatatattaggacttatcttcaaaggcccagcagcttccacacaagaaaagaatccccgggagtctacaggaaacatggtcacaggacagactgtctgtaaaaataaacccaatatgtcggatcctgaggaatccaggggaaatgatgaactagtgaagcaggagatgctggtacagtatctgcaggatgcctacagcttctcccggaagattacagaggccattggcatcatcagcaagatgatgtatgaaaacacaactacagtggtgcaggaggtgattgaattctttgtgatggtcttccaatttggggtaccccaggccctgtttggggtgcgccgtatgctgcctctcatctggtctaaggagcctggtgtccgggaagccgtgcttaatgcctaccgccaactctacctcaaccccaaaggggactctgccagagccaaggcccaggctttgattcagaatctctctctgctgctagtggatgcctcggttgggaccattcagtgtcttgaggaaattctctgtgagtttgtgcagaaggatgagttgaaaccagcagtgacccagctgctgtgggagcgggccaccgagaaggtcgcctgctgtcctctggagcgctgttcctctgtcatgcttcttggcatgatggcacgaggaaagccagaaattgtgggaagcaatttagacacactggtgagcatagggctggatgagaagtttccacaggactacaggctggcccagcaggtgtgccatgccattgccaacatctcggacaggagaaagccttctctgggcaaacgtcacccccccttccggctgcctcaggaacacaggttgtttgagcgactgcgggagacagtcacaaaaggctttgtccacccagacccactctggatcccattcaaagaggtggcagtgaccctcatttaccaactggcagagggccccgaagtgatctgtgcccagatattgcagggctgtgcaaaacaggccctggagaagctagaagagaagagaaccagtcaggaggacccgaaggagtcccccgcaatgctccccactttcctgttgatgaacctgctgtccctggctggggatgtggctctgcagcagctggtccacttggagcaggcagtgagtggagagctctgccggcgccgagttctccgggaagaacaggagcacaagaccaaagatcccaaggagaagaatacgagctctgagaccaccatggaggaggagctggggctggttggggcaacagcagatgacacagaggcagaactaatccgtggcatctgcgagatggaactgttggatggcaaacagacactggctgcctttgttccactcttgcttaaagtctgtaacaacccaggcctctatagcaacccagacctctctgcagctgcttcacttgcccttggcaagttctgcatgatcagtgccactttctgcgactcccagcttcgtcttctgttcaccatcctggaaaagtctccacttcccattgtccggtctaacctcatggttgccactggggatctggccatccgctttcccaatctggtggacccctggactcctcatctgtatgctcgcctccgggaccctgctcagcaagtgcggaaaacagcggggctggtgatgacccacctgatcctcaaggacatggtgaaggtgaaggggcaggtcagcgagatggcggtgctgctcatcgaccccgagcctcagattgctgccctggccaagaacttcttcaatgagctctcccacaagggcaacgcaatctataatctccttccagatatcatcagccgcctgtcagaccccgagctgggggtggaggaagagcctttccacaccatcatgaaacagctcctctcctacatcaccaaggacaagcagacagagagcctggtggaaaagctgtgtcagcggttccgcacatccctaactgagcggcagcagcgagacctggcctactgtgtgtcacagctgcccctcacagagcgaggcctccgtaagatgcttgacaattttgactgttttggagacaaactgtcagatgagtccatcttcagtgcttttttgtcagttgtaggcaagctgcgacgtggggccaagcctgagggcaaggctataatagatgaatttgagcagaagcttcgggcctgtcataccagaggtttggatggaatcaaggagcttgagattggccaagcaggtagccagagagcgccatcagccaagaaaccatccactggttctaggtaccagcctctggcttctacagcctcagacaatgactttgtcacaccagagccccgccgtactacccgtcggcatccaaacacccagcagcgagcttccaaaaagaaacccaaagttgtcttctcaagtgatgagtccagtgaggaagatctttcagcagagatgacagaagacgagacacccaagaaaacaactcccattctcagagcatcggctcgcaggcacagatcctaggaagtctgttcctgtcctccctgtgcagggtatcctgtagggtgacctggaattcgaattctgtttcccttgtaaaatatttgtctgtctcttttttttaaaaaaaaaaaaggccgggcactgtggctcacgcctgtaatcccagcactttgcgataccaaggcgggtggataacctgaggtagggagttcgagaccagcctgaccaacatggagaaaccccatctctactaaaaataaaaaattagccgggcgtattggcgtgcgcctgtaatcccagctactcaagaggctgaggcaggagaatcgcctgaacccagaggcggaggttgtagtgagccgaaatcacaccattgcactccagcttgggcaacaatagcgaacctccatctcaaattaaaaaaaaaatgcctacacgctctttaaaatgcaaggctttctcttaaattagcctaactgaactgcgttgagctgcttcaactttggaatatatgtttgccaatctccttgttttctaatgaataaatgtttttatatactttt

SEQ ID NO: 28738 - DNA, 4441 bp, Homo Sapiens
ctctgaggagacactttttttttcctccctccttccctcctctcctcctcccttcccttcccctctcctcccctctctcctccttcccccctcggtccgccggagcctgctggggcgagcggttggtattgcaggcgcttgctctccggggccgcccggcgggtagctggcggggggaggaggcaggaaccgcgatggcgcctcagaagcacggcggtgggggagggggcggctcggggcccagcgcggggtccgggggaggcggcttcgggggttcggcggcggtggcggcggcgacggcttcgggcggcaaatccggcggcgggagctgtggagggggtggcagttactcggcctcctcctcctcctccgcggcggcagcggcgggggctgcggtgttaccggtgaagaagccgaaaatggagcacgtccaggctgaccacgagcttttcctccaggcctttgagaagccaacacagatctatagatttcttcgaactcggaatctcatagcaccaatatttttgcacagaactcttacttacatgtctcatcgaaactccagaacaaacatcaaaaggaaaacatttaaagttgatgatatgttatcaaaagtagagaaaatgaaaggagagcaagaatctcatagcttgtcagctcatttgcagcttacgtttactggtttcttccacaaaaatgataagccatcaccaaactcagaaaatgaacaaaattctgttaccctggaagtcctgcttgtgaaagtttgccacaaaaaaagaaaggatgtaagttgtccaataaggcaagttcccacaggtaaaaagcaggtgcctttgattcctgacctcaatcaaacaaaacccggaaatttcccgtcccttgcagtttccagtaatgaatttgaacctagtaacagccatatggtgaagtcttactcgttgctatttagagtgactcgtccaggaagaagagagtttaatggaatgattaatggagaaaccaatgaaaatattgatgtcaatgaagagcttccagccagaagaaaacgaaatcgtgaggatggggaaaagacatttgttgcacaaatgacagtatttgataaaaacaggcgcttacagcttttagatggggaatatgaagtagccatgcaggaaatggaagaatgtccaataagcaagaaaagagcaacatgggagactattcttgatgggaagaggctgcctccattcgaaacattttctcagggacctacgttgcagttcactcttcgttggacaggagagaccaatgataaatctacggctcctattgccaaacctcttgccactagaaattcagagagtctccatcaggaaaacaagcctggttcagttaaacctactcaaactattgctgttaaagaatcattgactacagatctacaaacaagaaaagaaaaggatactccaaatgaaaaccgacaaaaattaagaatattttatcagtttctctataacaacaatacaaggcaacaaactgaagcaagagatgacctgcattgcccttggtgtactctgaactgccgcaaactttatagtttactcaagcatcttaaactctgccatagcagatttatcttcaactatgtttatcatccaaaaggtgctaggatagatgtttctatcaatgagtgttatgatggctcctatgcaggaaatcctcaggatattcatcgccaacctggatttgcttttagtcgcaacggaccagttaagagaacacctatcacacatattcttgtgtgcaggccaaaacgaacaaaagcaagcatgtctgaatttcttgaatctgaagatggggaagtagaacagcaaagaacatatagtagtggccacaatcgtctgtatttccatagtgatacctgcttacctctccgtccacaagaaatggaagtagatagtgaagatgaaaaggatcctgaatggctaagagaaaaaaccattacacaaattgaagagttttctgatgttaatgaaggagagaaagaagtgatgaaactctggaatctccatgtcatgaagcatgggtttattgctgacaatcaaatgaatcatgcctgtatgctgtttgtagaaaattatggacagaaaataattaagaagaatttatgtcgaaacttcatgcttcatctagtcagcatgcatgactttaatcttattagcataatgtcaatagataaagctgttaccaagctccgtgaaatgcagcaaaaattagaaaagggggaatctgcttcccctgcaaacgaagaaataactgaagaacaaaatgggacagcaaatggatttagtgaaattaactcaaaagagaaagctttggaaacagatagtgtctcaggggtttcaaaacagagcaaaaaacaaaaactctgaaaagctctaaccccatgttatggacaaacactgaaattacattttagggaattcatcctctaagaattatgtttttgtttttaatcatatgttccaaacaggcactgttagatgaagtaaatgatttcaacaaggatatttgtatcagggttctacttcacttcattatgcagcattacatgtatatcacttttattgatgtcattaaaacattctgtactttaagcatgaaaagcaatatttcaaagtatttttaaactcaacaaatgtcatcaaatatgttgaattgatctagaaattatttcatatataaatcagaatttttttgcatttatgaacggctgtttttctactttgtaattgtgagacattttcttggggagggaaaattggaatggttcccttttttagaaattgaagtggtcttcatatgtcaactacagaaaaggaaaaaaatagaaattgaaggatttttatgaaattatattgcattactatttgcagtcaaactttgatccttgtttttgaaatcatttgtcaattcggaatgaaaaattataatgtaattttacattacataagttccttttacaattaaaaaatagcacttcttcatcttatgcctgtttgagaagatattaaattttcacattgttgacagtgaaatgctatgttggtttataagattacagaccatttgttttcatgtggataattttagtgcattgctcacccggtatgttttttttttttaacttgaacattttgcttgttttgtttttcttttttaattagataatcacacggaaaattaagctgttcatatctttaaattaggattgcaaaccaaggaaagaacgcatttgagattttaagatgtcacttataaggggagaagtgttcttaaaaagtcaaccagaaaactgttatgccttttatttgtttgcaaggatgtctttgtaatgtgtttcatgaatagaatatccaatagagataagctgacttgaatcattttgagcaattttgccctgtgttatatgtgtttcacgcacatatttgcagttggattttctccaacagaaagtggattcactactggcacattaacaagcaccaataggtttttattccaactccgagcactgtggttgagtaacatcacctcaattttttattatccttaaagatattgcattttcatattctttatttataaaggatcaatgctgctgtaaatacaggtatttttaattttaaaatttcattccaccaccatcagatgcagttccctattttgtttaatgaagggatatataagctttctaatggtgtcttcagaaatttataaaatgtaaatactgatttgactggtctttaagatgtgtttaactgtgaggctatttaacgaatagtgtggatgtgatttgtcatccagtattaagttcttagtcattgatttttgtgtttaaaaaaaaataggaaagagggaaactgcagctttcattacagattccttgattggtaagctctccaaatgatgagttctagtaaactctgatttttgcctctggatagtagatctcgagcgtttatctcgggctttaatttgctaaagctgtgcacatatgtaaaaaaaaaaaaaaaaagattattttaggggagatgtaggtgtagaattattgcttatgtcatttcttaagcagttatgctcttaatgcttaaaagaaggctagcattgtttgcacaaaaagttggtgattcccaccccaaatagtaataaaattacttctgttgagtaaactttttatgtcatcgtaaaagctggaaaaatccctttgtttctatttataaaaaaagtgcttttctatatgtacccttgataacagattttgaagaaatcctgtaagatgataaagcatttgaatggtacagtagatgtaaaaaaaattcagtttaaaagaacatttgtttttacattaaatgtttatttgaaatcaaatgattttgtacataaagttcaataatat

SEQ ID NO: 28739 - DNA, 4101 bp, Homo Sapiens
ggctcctcgcgatcttgttcctttcccctccgcttctctgacctagctgcgcggccccggcccgggagctgccgaacccgcgcctcccctgggtgaggaggacacgcctgccctcgtcgagaaaacttttcctgccgactcagttggggcggcggtggcaggaagtgcgggcagcgacctctcctccgcctgccccgcgcgccctgccggaggtcggcgctgagcttgcgatcaagtttgtgggggccccccttcccagttgccggcgagtctcgcctcgagaggggcgcccgaccccggggagggcggcaggccagggcgaaggccaagggcgttttgtggcgccggagactaggtgcggagcaaggcggggactcgcacccgcatccgagagcgcggaggtcgcgcagcccgggagaagggagcctccggcggctgcttcctagagtccacagtgcgctgtctcctttggctgaggagagtgtcctggccccgagtctatcgaggaaaatgaagttaagccgccagttcaccgtgttcggcagtgcgatcttctgtgtggtgattttctcgctctacctgatgctggaccggggtcacttagactaccccaggaacccgcgccgcgagggctccttccctcagggccagctctcaatgttgcaagaaaaaatagaccatttggagcgtttgctagctgagaataatgagatcatctcaaatattagagactcagtcatcaatttgagtgagtctgtggaggatggtccgaaaagttcacaaagcaatttcagccaaggtgctggctcacatcttctgccctcacaattatccctctcagttgacactgcagactgtctgtttgcttcacaaagtggaagtcacaattcagatgtgcagatgttggatgtttacagtctaatttcttttgacaatccagatggtggagtttggaagcaaggatttgacattacttatgaatctaatgaatgggacactgaaccccttcaagtctttgtggtgcctcattcccataacgacccaggttggttgaagactttcaatgactactttagagacaagactcagtatatttttaataacatggtcctaaagctgaaagaagactcacggaggaagtttatttggtctgagatctcttacctttcaaagtggtgggatattatagatattcagaagaaggatgctgttaaaagtttaatagaaaatggtcagcttgaaattgtgacaggtggctgggttatgcctgatgaagctactccacattattttgccttaattgatcaactaattgaaggacatcagtggctggaaaataatataggagtgaaacctcggtccggctgggctattgatccctttggacactcaccaacaatggcttatcttctaaaccgtgctggactttctcacatgcttatccagagagttcattatgcagttaaaaaacactttgcactgcataaaacattggagtttttttggagacagaattgggatctgggatctgtcacagatattttatgccacatgatgcccttctacagctatgacatccctcacacttgtggacctgatcctaaaatatgctgccagtttgattttaaacgtcttcctggaggcagatttggttgtccctggggagtccccccagaaacaatacatcctggaaatgtccaaagcagggctcggatgctactagatcagtaccgaaagaagtcaaagctttttcgtaccaaagttctcctggctccactaggagatgatttccgctactgtgaatacacggaatgggatttacagtttaagaattatcagcagctttttgattatatgaattctcagtccaagtttaaagttaagatacagtttggaactttatcagatttttttgatgcgctggataaagcagatgaaactcagagagacaagggccagtcgatgttccctgttttaagtggagattttttcacttatgccgatcgagatgatcattactggagtggctattttacatccagacccttttacaaacgaatggacagaatcatggaatctcatttaagggctgctgaaattctttactatttcgccctgagacaagctcacaaatacaagataaataaatttctctcatcatcactttacacggcactgacagaagccagaaggaatttgggactgtttcaacatcatgatgctatcacaggaactgcaaaagactgggtggttgtggattatggtaccagactttttcattcgttaatggttttggagaagataattggaaattctgcatttcttcttattttgaaggacaaactcacatacgactcttactctcctgataccttcctggagatggatttgaaacaaaaatcacaagattctctgccacaaaaaaatataataaggctgagtgcggagccaaggtaccttgtggtctataatcctttagaacaagaccgaatctcgttggtctcagtctatgtgagttccccgacagtgcaagtgttctctgcttcaggaaaacctgtggaagttcaagtcagcgcagtttgggatacagcaaatactatttcagaaacagcctatgagatctcttttcgagcacatataccgccattgggactgaaagtgtataagattttggaatcagcaagttcaaattcacatttagctgattatgtcttgtataagaataaagtagaagatagcggaattttcaccataaagaatatgataaatactgaagaaggtataacactagagaactcctttgttttacttcggtttgatcaaactggacttatgaagcaaatgatgactaaagaagatggtaaacaccatgaagtaaatgtgcaattttcatggtatggaaccacaattaaaagagacaaaagtggtgcctacctcttcttacctgatggtaatgccaagccttatgtttacacaacaccgccctttgtcagagtgacacatggaaggatttattcggaagtgacttgcttttttgaccatgttactcatagagtccgactataccacatacagggaatagaaggacagtctgtggaagtttccaatattgtggacatccgaaaagtatataaccgtgagattgcaatgaaaatttcttctgatataaaaagccaaaatagattttatactgacctaaatgggtaccagattcaacctagaatgacactgagcaaattgcctcttcaagcaaatgtctatcccatgaccacaatggcctatatccaggatgccaaacatcgtttgacactgctctctgctcagtctttaggggtttcgagtttgaatagtggtcagattgaagttatcatggatcgaagactcatgcaagatgataatcgtggccttgagcaaggtatccaggataacaagattacagctaatctatttcgaatactactagaaaaaagaagtgctgttaatacggaagaagaaaagaagtcggtcagttatccttctctccttagccacataacttcttctctcatgaatcatccagtcattccaatggcaaataagttctcacctacccttgagctgcaaggtgaattctctccattacagtcatctttgccttgtgacattcatctggttaatttgagaacaatacagtcaaaggtgggcaatgggcactccaatgaggcagccttgatcctccacagaaaagggtttgattgtcggttctctagcaaaggcacagggctgttttgttctactactcagggaaagatattggtacagaaacttttaaacaagtttattgtcgaaagtctcacaccttcatcactatccttgatgcattcacctcccggcactcagaatataagtgagatcaacttgagtccaatggaaatcagcacattccgaatccagttgaggtgaacctgactttcacatttggattgagaatcattggcttttatacctttcttggtttgacgtgcaataaagaagcacattattttagcttctggctactgtgagaacatgaattctgtgattctgtgggttttttcttttttcttttaccagtacagtaag

SEQ ID NO: 28740 - DNA, 1210 bp, Homo Sapiens
gggcccgttgaggcggagctcagttcccggccaggacacggtctgggccgccgaatctccggccgaagagcggcggcggcagggcgggaaaaaaatgaagaatgaaattgctgccgttgtcttctttttcacaaggctagttcgaaaacatgataagttgaaaaaagaggcagttgagaggtttgctgagaaattgaccctaatacttcaaggaaaatataaaaacccttggtatccagaaaaaccatcgaaaggacaggcctacagatgtattcgtgtcaataaatttcagagagttgatcctgatgtcctgaaagcctgtgaaaacagctgcatcttgtatagtgacctgggcttgccaaaggagctcactctctgggtggacccatgtgaggtgtgctgtcggtatggagagaaaaacaatgcattcattgttgccagctttgaaaataaagatgagaacaaggatgagatctccaggaaagttaccagggcccttgataaggttacctctgattatcattcaggatcctcttcttcagatgaagaaacaagtaaggaaatggaagtgaaacccagttcggtgactgcagccgcaagtcctgtgtaccagatttcagaacttatatttccacctcttccaatgtggcaccctttgcccagaaaaaagccaggaatgtatcgagggaatggccatcagaatcactatcctcctcctgttccatttggttatccaaatcagggaagaaaaaataaaccatatcgcccaattccagtgacatgggtacctcctcctggaatgcattgtgaccggaatcactggattaatcctcacatgttagcacctcactaacttcgtttttgattgtgttggtgtcatgttgagaaaaaggtagaataaaccttactacacattaaaagttaaaagttcttactaatagtagtgaagttagatgggccaaaccatcaaacttatttttatagaagttattgagaataatctttcttaaaaaatatatgcactttagatattgatatagtttgagaaattttattaaagttagtcaagtgccgaagtttttaatattggacttgagtatttatatattgtgcatcaactctgttggatacgagaacactgtagaagtggacgatttgttctagcacctttgagaatttactttatggagcgtatgtaagttatttatat

SEQ ID NO: 28741 - DNA, 5047 bp, Homo Sapiens
ccgttgctgtcgccgttgctgtcgggggcgctgtgcgctgaggaaggcgcgggcgagccggagcagaagaaggagggagggagccagccgctgcagccaccaccgccaccatgtcctaccaaggcaagaagaacatcccgcggatcacgagtgaccgtctccttatcaagggaggcagaatcgtcaatgatgatcagtccttttatgctgatatttacatggaagatggcttaataaaacaaattggagacaatctgattgttcctggaggagtgaagaccattgaagccaatgggaagatggtgatccctggaggcatcgatgtccatactcacttccagatgccatataagggaatgaccacagtagatgacttcttccaagggacaaaggcggccttagcaggtggcaccaccatgatcattgaccatgtggtgcctgagcctgagtccagcctgactgaggcctatgagaaatggagagagtgggctgatgggaagagttgctgtgactatgccctgcatgtggacatcacccactggaatgacagcgtcaagcaggaagtgcagaacctcatcaaggacaaaggggttaactccttcatggtttatatggcttataaggatttgtatcaagtatctaacacagagctctatgagatcttcacctgcctgggagagctgggggccattgctcaagttcatgctgagaatggggatatcattgcccaggagcaaacccgcatgttggaaatggggataactggcccagaaggccatgtactgagcaggccagaagagctggaagctgaggctgtgttccgtgccatcaccattgccagccaaaccaattgccctctctacgtcacaaaggtcatgagcaagagtgcagctgacctcatctcacaagccaggaaaaaaggaaatgtagtctttggtgagcccatcactgccagcctcggcatagatggaacccattattggagcaagaactgggccaaggcggctgcatttgtgacatccccacccctgagccctgacccaactactccggactacatcaactccttgctggccagcggggatctgcagctatctgggagtgcccactgcaccttcagcactgcccagaaagcaattgggaaggacaacttcacagccattcctgagggcaccaatggtgtggaggagcggatgtctgtcatctgggacaaggctgtggccacagggaaaatggacgaaaaccagttcgtggctgtgacaagcacaaacgctgccaagatcttcaacctgtatccccgcaagggaagaatatctgtgggttctgacagcgacctcgtcatctgggatccagatgctgtgaagatcgtctctgccaagaaccaccagtctgcggcagagtacaacatctttgaagggatggagctgcgcggggctcctctggttgtcatctgccagggcaagatcatgctggaagatggcaacctgcacgtgacccagggggctggccgcttcataccctgcagcccgttctccgactatgtctacaagcgcattaaagcacggaggaagatggcagacctgcatgccgtcccaaggggcatgtacgatgggcctgtgtttgacctgaccaccacccccaaaggtggcacccccgcaggctctgctcggggctctcctactcggccgaacccacctgtgaggaatcttcatcagtcgggatttagcctgtcaggcacccaagtggatgagggggttcgctcagccagcaagcgcatcgtggcccccccaggcggccgttctaatatcacatctctgagttaagcaagccttcctcaaagagaggggcagaagcaagaagagattgttttgaagccaaaatggtacaccgatatttaagaaggaaagcgaatccaaacggttgtgatctaaagaatcaataagcctcaagccttatgtttctccaatgttacgctcgcttgcctagctttacgaatattgctttgttttctgtttatgcatagccttgatttgtttgactcccctccccccatttacatgcatgcaatcagacaggccactaaggtaaaagagtctgctctatcatagtgttgagagcgtgtgtagtgctgcatcttatgacaaggggacagacaagctgggacgtcagggaaatgaacaaaagggacgcaggttatttggggtgagtgggtggtgggagcctggagcaaggtggagggtgcagaggggctggggtagggcatgtaggagggaggtgggtgggtcaggtgagtggaaggggtgttgtatattgtgttgatgacgtacgttatttccatggaagatagccgctgtggcagctgtcacatcaccacagctccctagggtctgccgagaaggcaggcagtctttgggttctgttctttgtcacgtcccctacaagtaaattttgtttctttgaacgtttattaaaatgccaagacccaaccatttcttccacctgcttgattgtgccagtgtttgctcaggcctctttcttagtgttgctttcaaatccttctctttcctgggttgggaaggccaggcagggacagagcaaatgacacttctcttcctcttgccctccctgcctctttggtgctcttaaaagccagcagctgagaacatagcacaggcccacgtggtgagggcacccacagcttaaagacgcttccttctaaacacggcgaggtcacctctcactcttctgtctttgcaaaccgagaagagtggcatgcttctggcatcccaagtcaggattttagctcagatgaggcagaatgaagggcctctcttacaggcagtttgtgtttgattctctcgatcctggcacatccatgataaataggagtttttgaaagttggttttattaggtgttccctaatttttaccgtaataggtcatctcagcttatatgaaagtcaagtggggaactgggaaagccaaagtcagtcttgagcagagggagcacattttgtggacctggttccacctttccattccaaaccacctgtttccccttccattagcagaaactctgggggaactttgtgtctcagtcctagaatctccccaagtgagtggaagtgacatgatgcagtcttcctcatggggcacctgaaagaaattagtgtgggtgcttcgatctaccttgtctgtcagagttgaatatctctttccctatcatgctgcttctgaaaattcagttttggagcaagtcctgtgagcaagataagaatctatagaaccaagatgctcattttcagaagaaatatgttcaacctgggatcagacttccatgctctggggaatccaagtggtagcacctgtaaccctgtgtactaagtgctttgaagagaagagcaggcctcagacaccttttaattgcttaggagaaaccattgtctctgactgcaggtttgaataagttgaagaccagagaaaagtacacactgggctacaaaggaatttggagatagccaaggaacaggatttcccctagcaagctaccttctgttcaaatcatgaaaaaagactatttccccttagaatagggaagcttgctattttaaagctcttgtagtgcttttcttttaagggagatgtagtaaaagggaaaatgtagctcttagtttacacttcaaagatgtgggggtctttcagagaactaagaataacagttttatgtgcagagagagtttgccagatctgaagcatatacctcattgactaggctgttactttgggataggttgcagtaccagccacagccagcagatagaggaaaagacacacataaactcgcttctgagcgtccacttctgcactctctgctctgctgttactcagcccctgagtctgactcatctctgcacaacctctctgtgccatgaagataagtcttccatggccaaatcggtcatccgcactgcccttgggacttccgaagtgaaccattccaccagaacctttgattctgcacaagatttccttgctctgggaacaacccccaaatgcccttgggaggaacaacatgagctcaggaagcctctctttcttcacttaccattactaactctccaagcatagaaatccctgggaattgcgagaataactcccactattttaaaatttatattcagatttgtttcgtttcataagacacatcaaacaggcctatacaaaaggtttaggaaaagaaaacaatggtgagtcccggccctcttcgaattcactggcacctcatgcaagtgtaggaaggcacgctggatcgtctatctgattccaaagctgtcctttgccatctcatcccttggcctgccccccaaccctgaggatgcccctgccatccccccaacctcctcatattgcctctgaacccagatggcaatccatcccggttctctctgagggccacgggcttgggtagtggaaagggtgtttgggaaattgttaaatcagttacccgtagtagagctatttcttgtacttctaagttttctagaagtggaaggattgtagtcatcctgaaaatgggtttacttcaaaatccctcagccttgttcttcacgactgtctatactgagagtgtcatgtttccacaaagggctgacacctgagcctggattttcactcatccctgagaagccctttccagtagggtgggcaattcccaacttccttgccacaagcttcccaggctttctcccctggaaaactccagcttgagtcccagatacactcatgggctgccctgggcagccagcattcattgtaagttccctctttgaaaactggtgtgtgggtgttcagttctgtgtctggtgggtatggacagacagtaatctcctgtgatctgtgctagctgtgaggcagctctggaacgtgaagagctgtttggtttgaaccgtgaacaaaactgtgttttgagtttagctgacattaaagaaaaaagttcatcacgtgactgttaatgtaaacctggttattaaaataactatgaaattac

SEQ ID NO: 28742 - DNA, 2553 bp, Homo Sapiens
atggcggcggcggcgcctgctgctgcggcggcttcttccgaggcgccagcggcgagtgcgactgcagagcccgaggccggggaccaggacagtcgcgaggttcgagtgttgcagagcctgcggggcaagatctgtgaagcaaaaaatttattgccatatcttggaccccacaaaatgagagattgtttctgtaccataaatttggaccaggaagaagtttatcgtacccaagttgtggaaaaatctttaagcccatttttcagtgaagaattttactttgagattccaagaactttccagtatttgtctttctatgtttatgataagaatgttttacaaagagatctccgtataggaaaagtagccatcaaaaaagaagacttgtgtaatcacagtggcaaagaaacttggttttcattacagcctgttgactccaattcagaggttcagggtaaagttcaccttgaattaaaactgaatgaactgataacggagaatggaactgtatgccagcagcttgttgtacacatcaaggcatgccatgggttgcctctcataaatggccaaagctgtgacccttatgcaacagtttctctagtgggcccttctaggaatgaccaaaagaagacaaaagtaaagaagaaagcaagcaatccgcagtttaatgaaatcttttattttgaggtaaccagatccagtagctacaccagaaagtcccagttccaggtagaagaggaggacattgaaaagctagaaatcaggatcgacttgtggaacaatggaaacctagtccaagatgttttcctaggtgagattaaggttcctgtgaacgtattaagaactgattcctctcatcaagcctggtacttgctacagccaagagacaatggaaacaagtcatccaaaactgatgacctggggtctcttcgattaaatatatgttatacagaagactacgtgcttccttcagagtactatggtcctttgaaaactttgctgctaaaatcaccagatgttcaaccaatatctgcctcagctgcttacattttgagtgaaatatgtcgagataaaaatgatgctgttttgccccttgtacgactgctgctgcaccatgataaacttgttccttttgccactgctgtggctgaattagacttgaaggatacacaagatgcaaacacaatttttagaggaaattccctggctacccgatgtctggatgagatgatgaaaatagtgggagggcactacctgaaagtaacattaaaacctattcttgatgagatatgtgactcctcaaaatcctgtgaaatcgatcctattaaattgaaagagggagataatgtagaaaataataaggagaatctgcgctactatgtagacaagttattcaatacaattgtaaaatcaagtatgagctgccccactgtaatgtgtgatatcttttattctctaaggcagatggctactcagagatttcctaatgaccctcatgttcagtattctgcagtgagcagctttgtatttcttcgtttctttgctgtagcggtagtatcacctcatacttttcatttgcgacctcatcatccagatgcacagacaattagaacattaactctcatctcaaaaactatacaaactttgggaagctgggggagtctgtccaaaagcaagtcaagtttcaaagagacattcatgtgtgaatttttcaaaatgtttcaagaagaaggatatattatagcagttaaaaagttcttggatgaaatttcatctactgaaactaaagagtccagtggtacgagtgagcctgtgcacctgaaagaaggtgagatgtataaaagagctcaaggaagaactcggattggaaaaaagaattttaagaaacgatggttctgcttaacaagcagagagctcacctaccacaaacagccaggtagcaaagatgcaatctacacaatcccagtaaaaaacattcttgctgtggaaaaactggaagagagctctttcaacaagaaaaacatgttccaagtaatacatacggagaaaccactctatgtccaggcaaataactgtgtagaagctaatgaatggatagacgtactctgcagggtgagccgatgcaatcaaaacaggctcagtttttatcatccctctgtgtatctaaacggaaattggctctgctgtcaggagactggtgaaaacactctcggctgcaagccatgtactgcaggtgtccctgcagacatccaaatagatattgatgaagacagagaaacagaaagaatttattccctttttaccctcagtttacttaagctgcagaagatggaagaggcttgtggaactattgcagtctatcaaggaccacagaaagagcctgatgattattctaactttgtaatcgaggattctgtaacaacctttaagacaattcagcaaataaaaagcataattgagaagctggatgaacctcatgaaaaatataggaagaaaagatccagtagtgcaaaatatgggagcaaggaaaatccaattgttgggaaagcatcttag

SEQ ID NO: 28743 - DNA, 6940 bp, Homo Sapiens
cttaaagtagatcatggaggacacccaggctattgactgggatgttgaagaagaggaggagacagagcaatccagtgaatccttgaggtgtaacgtggagccagtagggcggctacatatctttagtggtgcccatggaccagaaaaagatttcccactacacctcgggaagaatgtggtaggccgaatgcctgactgctctgtggccctgccctttccatctatctccaaacaacatgcagagattgaaatcttagcctgggacaaggcacctatcctccgagactgtgggagccttaatggtactcaaatcctgagacctcctaaggttttgagccctggggtgagtcaccgtctgagggaccaggaattgattctctttgctgacttgctctgccagtaccatcgcctggatgtctctctgccctttgtctcccggggccctctgacagtagaagagacacccagagtacagggagaaactcaaccccagaggcttctgttggctgaggactcggaggaggaagtagattttctttctgaaaggcgtatggtaaaaaaatcaaggaccacatcttcctctgtgatagttccagagagtgatgaagaggggcattccccggtcctgggcggccttgggccgccttttgccttcaatttgaacagtgacacagatgtggaagaaggtcagcaaccagccacagaggaggcctcctcagctgccagaagaggtgccactgtagaggcaaagcagtctgaagctgaagttgtaactgaaatccagcttgaaaaggatcagcctttagtgaaggagagggacaatgatacaaaagtcaagaggggtgcagggaatggggtggttccagctggggtgattctggagaggagccaacctcctggagaggacagtgacacagatgtggatgatgacagcaggcctcctggaaggccagctgaggtccatttggaaagggctcagccttttggcttcatcgacagcgacactgatgcggaagaagagaggatcccagcaaccccagttgtcattcctatgaagaagaggaagatcttccatggagtaggtacaaggggtcctggagcaccaggcctggcccatctgcaggagagccaggctggtagtgatacagatgtggaagaaggcaaggccccacaggctgtccctctggagaaaagccaagcttccatggttatcaacagcgatacagatgacgaggaagaagtctcagcagcgctgactttggcacatctgaaagagagccagcctgctatatggaacagagatgcagaagaggacatgccccaacgtgtggtccttctgcagcgaagccaaaccaccactgagagagacagtgacacagacgtggaggaggaagagctcccagtggaaaatagagaagctgtcctcaaggatcacacaaagattagagcccttgttagagcacattcagaaaaggaccaacctccttttggggacagtgatgacagtgtggaagcagataagagctcacctgggatccacctggagagaagccaagcctccaccacagtggacatcaacacacaagtggagaaggaagtcccgccagggtcagccattatgcatataaagaagcatcaggtgtctgtggaggggacaaatcaaacagatgtgaaagcagttgggggaccagcaaagctgcttgtggtatctctagaggaagcctggcctctgcatggggactgtgaaacagatgcagaggagggcacctccctaacagcctcagtagttgcagatgtaagaaagagccagcttccagcagaaggggatgctggggcagagtgggctgcagctgttcttaagcaggagagagctcatgaggtgggggcccagggtgggccacctgtggcacaagtggagcaggacctccctatctcaagagagaacctcacagatctggtggtggacacagacactctaggggaatccacccagccacagagagagggagcccaggtccccacaggaagggagagagaacaacatgtgggtgggaccaaggactctgaagacaactatggtgattctgaagatctggacctacaagctacccagtgctttctggagaatcagggcctggaagcagtccagagcatggaggatgaacctacccaggccttcatgttgactccaccccaagagcttggcccttcccattgcagcttccagacaacaggtaccctagatgaaccatgggaggtcctggctacacagccattctgtctgagagagtctgaggactctgagacccagccttttgacacgcaccttgaggcctatggaccttgcctgtctccacctagggcaataccaggagaccaacatccagagagcccagttcacacagagccaatggggattcaaggcagagggaggcagactgtggataaagtcatgggtataccaaaagaaacagcagagagggtgggccctgagagagggccattggagagagaaactgagaaactgctaccagaaagacagacagatgtgacaggagaggaagaattaaccaaggggaaacaggacagagaacaaaaacagttgttagctagagacacccagagacaagaatctgacaaaaatggggaaagtgcaagtcctgaaagagatagggagagtttgaaggtagaaattgagacatctgaggaaatacaagagaaacaagtacagaagcagacccttccaagcaaagcatttgagagagaagtagagagaccagtagcaaacagagagtgcgatccagccgagttagaagagaaggtgcccaaagtgatcctggagagagatacacagagaggggagccagagggagggagccaggaccagaaagggcaggcctccagcccaacaccagagcctggggtgggggcgggggaccttccgggacctacctcagcccccgtaccttctgggagccagtcaggtggaaggggatccccagtgagccccaggaggcatcagaaaggcctcctgaattgcaagatgccacctgctgagaaggcttccaggatcagagctgctgagaaggtttccaggggcgatcaggaatctccagatgcttgtctgcctcctgcagtacctgaagccccagccccaccccaaaagccccttaactctcagagccagaaacatcttgcacctccgccccttctttctccccttttaccttctatcaagccaaccgttcgtaagaccaggcaagatgggagtcaggaagctccagaggctcccttgtcctcagagctggagcctttccacccaaagcctaaaattagaactcggaagtcctccagaatgacaccctttccagctacctctgctgcccctgagccccacccttccacctccacagcccagccagtcactcccaagcccacatctcaggccactaggagcaggacaaataggtcctctgtcaagacccctgaaccagttgtccccacagcccctgagctccagccttccacctccacagaccagcctgtcacctctgagcccacatctcaggttactaggggaagaaaaagtagatcctctgtcaagacccctgaaacagttgtgcccacagcccttgagctccagccttccacctccaccgaccgacctgtcacctctgaacccacctctcaggctactaggggaagaaaaaatagatcctctgtcaagacccctgaaccagttgtccccacagcccctgagctccagccttccacctccacagaccagcctgtcacttctgagcccacatatcaggctactaggggaagaaaaaatagatcctctgtcaagacccctgaaccagttgtgcccacagcccctgagctccggccttccacctccacagaccgacctgtcacccccaagcccacatctcggaccactaggagcaggacaaatatgtcctctgtcaagacccctgaaacagttgtccccacagcccctgagctccagatttccacctccacagaccaacctgtcacccctaagcccacatctcggaccactaggagcaggacaaatatgtcctctgtgaagaaccctgaatcaactgtccctatagcccctgagctcccaccttccacctccacagagcagcctgtcacccctgagcccacatctcgggctactaggggaagaaaaaatagatcctctggcaagacccctgaaacacttgtccccacagcccctaagctcgagccttccacttccacagaccaacctgtcactcctgagcccacatctcaggccaccaggggcaggacaaataggtcctctgtgaagacccctgaaacagttgtccccacagcccctgagctccagccttccacctccacagaccagcctgttacccctgagcctacgtctcaggctactaggggaagaacagatagatcctctgtcaagactcctgaaacagttgtccccacagcccctgagctacaggcttccgcctccacagaccagcctgtcacctctgagcccacatctcggaccactaggggaagaaaaaatcggtcctctgtcaagacccctgaaacagttgtgcccgcagcccctgagctccagcctcccacctccacagaccgacctgtcacccctgagcccacatctcgggccactaggggcaggacaaataggtcctctgtcaagacccctgaatcaattgtccctatagcccctgagcttcagccttccacctccagaaaccagcttgtcacccctgagcccacatctcgggccactaggtgcaggacaaataggtcctctgtcaagacccctgagccagttgtccccacagcccctgagccccatcctaccacctccacagaccagcctgtcacccccaagctcacatctagggccactaggagaaagacaaataggtcctctgtcaagactcccaaaccagttgaaccagcagcctctgatcttgagccttttacccccacagaccagtccgtcacccctgaggccatagctcagggtggtcagagcaaaacactgaggtcttccacagtaagagctatgccggttcctaccacccctgaattccaatctcctgtcaccacagaccagcctatttcccctgagcctattactcaacccagttgcatcaagaggcagagagccgctgggaaccctggctccctcgcagctcccattgaccataagccttgctctgcacccttggaacctaaatcccaggcctcaaggaaccaaagatggggagcagtgagagcagctgaatcccttacagccattcctgagcctgcctctccccagcttcttgagacaccaattcatgcctcccagatccaaaaggtggaaccagcaggtagatctaggttcaccccggagctccagcctaaggcctctcaaagccgcaagaggtctttagctaccatggattcaccaccacatcaaaaacagccccaaagaggggaagtctcccagaagacagtgattatcaaggaagaggaagaagatactgcagagaagccagggaaggaagaggatgtcgtgactccaaaaccaggcaagagaaagagagaccaggcagaggaggagcccaacagaataccaagccgcagcctccgacggaccaaacttaaccaagaatcaacagcccccaaagtgctcttcacaggagtggtggatgctcggggagagcgggctgtgctggcactggggggaagtctggctggttcagcggcagaggcttcccacctggtcactgatcgcatccgccggacagtcaagttcctgtgtgccctggggcggggaatccccattctgtccctggactggctgcatcagtcccgcaaggctggtttcttcttacccccggatgaatatgtggtgaccgaccctgagcaagagaagaactttggctttagccttcaagacgcactgagcagggctcgggagcgaaggctgctagagggctatgagatctatgtgacccctggagtccagccaccaccacctcagatgggagagattattagctgctgtggaggcacatacctacccagcatgcctcggtcctataagcctcagagagttgtgatcacatgccctcaggacttccctcattgctccattccactacgggttgggctgcccctcctctcgcctgagttcctgctgactggagtgctgaagcaggaagccaagccagaggcctttgtcctctcccctttggagatgtcatccacctgagaactccactacccttttccctcccagaccacgaattagaagatatgtggaagaaagaactcagggcgttagaaaggattggggtatattgatacaacttgtcctggaacatgggtgggaccagaaatctttatgaataaatgaaaagataagggatttggaagccacaggttgttttttgtttgtttgtttgtttttttaatggccattttattttatttgtatttatagttttttatttgtatagatttaggggatacaagatttcttacatgcatgtattaaatggccattttaaaattagctagtttcatgctcagatgtcataagtggcagctatctttagccagactgttgcagttattgctcgatgccactcatggtgtcctacctcctatttggaaaccatctctatttttttcttactgagattcttactttggggtcaggaacttgaagggatgcttggagtgagtagatttgagggtccagttatggagtgctactaaaacattttcttctctcctggcctctggaagcatctttagctttgactttgggcaagtctctgtacttttctggccagcttttccaggatttataaaattagagcttcggcttgacctctgtgataaataaatattcactctgtgcctt

SEQ ID NO: 28744 - DNA, 3635 bp, Homo Sapiens
tccaagatggcggaactgcagctggacccggcgatggcggggctgggagggggcggcgggagtggggtgggcgacgggggtggcccagtccgcgggccccccagcccacgcccggctggccccacgccccgcgggcacggccgcccggctgccgccgtcgcgcagcgattggagccgggtcccggaccacccgagcgggcagggggcggcggcgcggcccgctgggtcaggctgaacgtgggaggcacctacttcgtgaccaccagacagaccttaggccgggagcccaagtcatttctctgccgcctctgctgccaggaggacccggagctggactcagacaaggatgagacaggagcctatctgattgacagggaccccacctactttggtcctatcctcaactacctccgccacgggaaactcatcatcactaaggagttggcagaagaaggtgtgctggaggaagcggagttttacaacatcgcgtcccttgtgcggctggttaaggaaaggatacgggacaatgagaacagaacttcacaaggccccgtgaagcacgtgtacagagtcctgcagtgtcaggaagaagagctcacgcagatggtgtccacgatgtccgacggctggaaattcgaacagctcatcagcatcggatcttcctataactacggcaatgaggatcaggcagaattcctctgtgttgtctccagagaactaaataattctaccaatggcatcgtcatagagccgagcgaaaaggcgaagattcttcaggagagaggatcgcggatgtaaactaagaccccgaaaactccagaccttcaggagagcagtcagcagagcccctctgtgaagtgaaaccttactcctgtccagtgaccgagccactgcaaagcacagctgatcctggccccctgtgaagaagtgttctggtcaaaactaaaggaactccctccccacctgcaggactccgaagacagtgcgacttctggctgcagaataccttttcagaaacctgctttcatttgcttagccagtattagaacagatctttacaacagcagctgggctgggttcccagtcggagcctttcggggatctgggggatgagggcggaaggcctagctccttggaaatggcctgtactttaaggacgctggagccaagaggattgttcccgtgccgtgccatggtttcaccctatgtgtgccacaatggacgttagcagctgcttcggaacaccgtccctcctatgcaccctccaagacctgcagcagatgcaaagggttctagctgcagtttgtcgaattgaggttttaggtaaagcatagagttgccagagtaccccgcattcccatgaatagagcctccaaggaaagggaggatggggtgtcctttgttgtggttggaggttggtgatcattgctctggatttggggctcccggctgccaccacatgcagctttgcctcagctttctccagcagccgggaccctctggagagcttgttttccctccaagaagaggtttgagacaggcggcatcctgcactgagtcagacaagtgggagctgtaggaactgcacctgcagcctcttcttactccccattgaccctgtcttccttccctggctttttcaactggaccaaagatgaaggcacttatggaccctttgatggcttggagtggggaaggctgtttctttgaaagttgccaaatgtgttacgttgtgtctcagagagagttatttctgtgactctcttggaaatgccttgactgaatgtgcaatatttgtgtctcttggtttctaaccttggcggacctgctcccctctgtactgtccccagtggtatgtatgtatgtgctaggcagtctggggaccccctgtgtctctgaccacccccctgacccccgccattactttcttttctggagtgccatgctggcgaggatccggatgcggcagcaccctctttcgggctgcatccacagagtttgtgtccacactttctctccgagcatgtgggtctcgctgagcagtcatggaatgcggtagagccaggggaccctgtctgccccgaataactttcagtagtatggcagatggcacagagaaagggaaggggctctggggacttctccttctatgaaagccgcctcgagccaggtgctcctgggcaccttcagaagtgatgtcctgtgtgctccacagctcacctgcttgccaaggtacgtctgggtagtagtttctggaaatgactgcagactgtgccaaatgtcttttgagcttctgacctgaccatgcccagatggcataacttttccctaggaccctcagtctccttgtttctctgtatctgtagcatagcatagaacccggtatacaggggtttctgctgacacatcaacgtctaaacacctatgcgccacattttacagctgtaaagtgttagatgaactgccgtcctcagtaaaagcagccaccccttcaagagtcacaggcatccatccagtcgtatctttcagagaaaaaaaaagttagatgtagccaaggaaagtagtgatcacgggaaggactgctctgagccgggtaggatggaggactttggaagaggcgctccttggccaggtccaatgagtaacatcagactgacagaggaaaagcagcttggtttgcggccttgtgcccagtctcgttgaggcgcttgtccctgtctgctttcctggggcatgcctgatcagcgtgggctggagctcctagaccaaccccagctttctcaccaggttcagcaaggaggcctgggggtcagacaccaatgttgagcacctcctgagggcgccgtttccttcattcctcttagattccatagttgccgccatgaaaagactgctcttgagccccaaggcacaggcacgtgctctgggaaatagacaggagtggtatttccgccctctcggagggctggtgttcaccaagtttccctcctcgctgcaacccaatgacacctgtattgttccagcgctccaggactctgggttcttaagatttctgggagcgttgttcacccaccccctttaggaaccaggctggtgttcttgcttgaaagcgttgtgccctctgagtgtctggctgatcacatcagagaggtctgcgtggcagtttggggctgtcacgtgaccagtgacccacactctctgctgcccagtactgccaagtggggagggtcctgcctttttctctgccccaggtctgggacgcaggtgatgccagccaggcccaggagtgcccagcatcccccaactgatgacacagtagcactgattctgtcttttcctcagaatctggcctttttccatggcaatgaggtggggcccagcctcctctaaagtgactttgtttctgcacagttgtaactgctcttggggatgtcagtgaggctgggagcagggagccacgggatgctgagagaggaggcccgagaggacaccccaccctccagcgtggcctttgatccagacttagggacgaggctgtcactggtgggcaccctctgttcctgtttgtgtgtttgaatagtctgaaatgctgtgactttttttgtgtgaataaagatatgaaacttctgaatctc

SEQ ID NO: 28745 - DNA, 4994 bp, Homo Sapiens
ccgcagcgctcggctggctgcagcggcaccgcgggttgcgcggccggggatgctccagcgggcgcgatggcccccgccatgcagccggccgagatccaatttgcccagcggctggcgtccagcgagaagggcatccgggaccgagcggtgaagaagctgcgccagtacatcagcgtgaagacgcagagggagacaggaggtttcagtcaggaagaacttctacaggaagagctcgccaacaccattgcacagctagtccatgctgttaacaactcagcggctcaacacctgttcattcagaccttttggcaaaccatgaatcgagaatggaaaggaatagacaggctacgcctggacaaatactatatgctgattcgtctggtcctgaggcagtcctttgaagtcttgaagcgaaatggctgggaagaaagccgaatcaaggttttcttggatgtcctgatgaaggaggtcctgtgtcctgagagtcagtctcctaatggagtgagattccacttcattgatatttacctggatgaactctccaaagtcggggggaaggagcttttagcagatcagaatctcaagtttatcgatccattctgcaaaattgctgcaaagacgaaggaccacaccctggtacagaccatagctcggggtgtcttcgaagctatcgtagatcagtctccttttgtgcctgaagagacgatggaggaacagaagacaaaagtgggtgatggtgacctctctgctgaggagatacctgaaaatgaggtatccttgagaagagctgtcagtaaaaagaagacagcactgggcaaaaaccattccagaaaagatggactcagtgatgaaagaggaagagatgactgtggaacctttgaggacacagggccccttctccagtttgactataaggctgttgctgatcgactcctggaaatgaccagcaggaagaacacgccccacttcaacaggaagcgcctctccaaactcatcaagaaattccaagacctttctgaaggaagcagtatatctcaactcagttttgcggaggacatttctgctgatgaagatgaccaaatcctcagtcaaggaaagcataagaagaaaggaaataaacttttagagaaaactaacttggaaaaggagaaaggaagcagagtcttttgtgtagaggaagaggacagtgaaagcagtcttcaaaagagaagaaggaagaagaagaagaagcaccacctgcagcctgaaaatccaggcccagggggtgcagccccgtccctggaacagaaccggggcagggagcccgaggcctctgggccgaaagccctgaaggcacgtgtggccgagccaggtgcagaggccacgtccagcactggggaggagagtggctccgagcatcctccagccgtccccatgcacaataaaaggaaacggccacggaagaagagcccgagggcccacagggaaatgttggaatcagcagtgttgcccccagaggacatgtctcagagtggcccgagtggcagtcatcctcagggacctagagggtccccgacaggtggagcccaactcctaaaaaggaagcggaaacttggagttgtgcccgtcaatggcagtggcctgtccacgccggcctggcctccattgcagcaggaaggccctcccacaggccccgcagagggggcgaacagccacaccacgctgccccagcgcaggaggctgcagaaaaagaaggcagggcccggcagcctggagctctgtggcctgcccagccagaaaacagcaagtttgaaaaagaggaagaaaatgagagtgatgtcaaacttggtggagcacaacggggtgctggagtccgaagctgggcaaccccaggctctgggaagcagtgggacttgcagttccctgaagaagcagaagctgagggcagagagcgactttgtgaagtttgacacccccttcttaccaaagcccctgttcttcagaagagccaagagcagcactgccacccaccctccaggccctgccgtccagctaaacaagacaccatccagctccaagaaagtcacctttgggctgaacagaaacatgactgccgaattcaagaagacagacaagagtatcttggtcagtcccacgggcccttctcgagtggccttcgaccctgaacagaagcccctccacggggtgctgaagacccccaccagctcacctgccagctcacccctggtggccaagaagcccctgaccaccacaccaaggagaaggcccagggctatggatttcttctgaggagcagcagagtcccttgtaaaagactgcttttgtacagaatgcgctataaattatacctttaagaatgtggggccttttttatgattttgtaagttcccataagttgtgtgcacgaggttctgagagtgcccgcaggctgctgcgtcctggcccctctgtagtggctgcgggcgtcttggttgaatcttttgctacaaaccatgtttgcgtttgagctctccaggattttacatttttgggtaacctcagtgattcccattggtgtaggaaatgagaccctctctgaagctgaggagagcacgttgatctgaactttaaatcaatcagtgctgctggcacaatgaaaggtggaactgcacttgtgttgagctctcagttctgcggaatttggtactcattaccgtattcgccgtactaagttggtttctgttagtcttaacagtctgttttcttttaaaagcatgtagggcttcattgccatgttctgtgggtgtttggcaggttaccgatggggaagattcttgtcacagaatcagcaataccatagtttttctacatgtgctcagctgggggtgtggacaggtaggggtggggaaagaagaggctctgcgttctgggggctttttcttctcctccccctacccggtttccctccctgttttcctacctctacggcaagcccaaagtgtcttcccgggagcccagcgcagcccccggctcttacccaggaccccgccccgtgctgagccttctgctgaggtccttgcgtggagcacactcattcctccaagcccttgcgctcccgtttctctctctctccgtccacgttccagccgagtcactgcctgcctgaccggctccatggcagctccccatcttccctagaggctgcctgcgcatctggagcctgcgctccggctcagcgacctttcctctcaaatgcggaagcgtgcacttacagttcagaccgttctcctgtaagttcattacaaacacgggcggaaggcactcaggctttcgttggagaaacagaaataaggccttcttttgagcagcgattgctggatcattgatctgtttgaggaagtgtctgacctgggcctgagagctggagaaggtgcagattcaaagtgagcggctcctgaggagagccgccaaggctgctcgccttctccgtggcttccgcagctaccgtctgcacggtgagagggcacgggcacacggttcgggctggcgtgcagctctcccagccagccacgctctgctcaggcctggaagtgaaagccgcctccttcccgttatgccccccatacaggagcctcggtttttcagcaaaacgcggccagtccccttctccactgctgcctcccagcagagggccccaggatctccaaggtcccagctatggctttggacaacgtggcttcggcccctggggttgcagagcttgcattgggtttacctcggtctcattcattcatggagccaagggtggggtttcacctgcgaacatcagactgacttgctggcgtcaagagcagttgactcactgatgaaggccctggtgaggagaaagcactctgttcttcgcctactctgtaatcgttttgtcataatgagccatgaaaaaagtaatgaacttgtgctgttaatcgtcactgtaatgagaagtcttacgtacaacatagctgtggtggctgcgtggtttaatggctgcattagataggatcctcacatcccattcagaaccaaaactgatacagtgaaacaattaaggtgagcaaatagttttaacttttcttttttttttaagtttcattcttcctagaatatttttctaacaatttttatttcagctttaaagatgggtcatatagccaaacgggccatataatccaacattgttgagatgtcttaggacatctaaggcaaaactggcacatttgttctgcagactattgcaggaatgttttttcctagcatttctatattatctgtccattctgaggaaccagtgaatgtcctataaatgcacctcctgtcaaaaccatgcctgagaggtcccggctgggagtgacagggtgcttcttagattctattggtccttctctcattctccgaacttactcctttttatgggtaagtcaactaggtttacagtcccttatttttaatgcctaagttttgacagcaggaagaaaacaattttttaaaaattctcattacatagacgcacaagaatatgtcacataaagaaaatgtgtttagaatactggttttctatttacgcatgatattttcctaagtaaaattgccaagtggacttggaagtccagaaaggaaaataatttaaattaatgctggtgatcttaacaatattttgtaaaatgatgcttcccccttctccatggtctagtcaattttgtacaattaggtatctgactttacaagtttgttatcctttctaatttttactgaactgaaagcacaaagaagactacacagaaaatctggaaacagttgcaggtgttgggaggaagatgaaatcgagctgtcttttaacttttgtatgtgttttatcagaatttgctggactatgctggcaaggactttgtttacgatcaaattgtactagtgtctgcagggtttgtcagtactcgtcaaagccaagtccaattaaaaaaaaaaagtctttgccctcc

SEQ ID NO: 28746 - DNA, 6571 bp, Homo Sapiens
ggcatgcgtgcagctctttggaggcggtagctttttcggcgtcgagactggaggctgagtgctaaactgtgtggggcgcggatgggatccagctgttagtcgggtaggcatagctttgtgttattcttggaaaatttcgcaccacttgtgaattccttgaacctgggcattgcaaacccacttctgttgggcccatctcctttgcactttgctcagattaagactcagttggcgcttcagcagctgaatgccgttgcctcacatggttcaacaccaccttatactttattaaatcaggctttcttgaaaatagccatgtcgagacccaggtttaatcctcgaggagactttccacttcaaaggccacgagcacctaacccttctgggatgaggcctccaggaccatttatgaggcctggatctatgggtctcccaagattttacccagcagggagagcacgtggaattccacacagatttgctggcctggaatcttatcagaacatggggccacagagaatgaatgttcaggtaactcaacacagaactgatccaagattgaccaaagaaaaactggattttcatgaagcacaacagaagaaggggaagcctcatggtagccggtgggatgatgagcctcatatatctgcatcagtggcagtgaaacagagttctgtaacacaggttacagagcagagtcccaaagtacagagccgctatacaaaagagagtgcctcaagtatcttagcaagttttggattatctaatgaagacctagaagaacttagtcgctatcctgatgaacaactaactcctgaaaatatgccattaattttgagggatataagaatgcgaaaaatggggcgccgattacctaatttaccttctcagagcagaaataaagaaacacttggtagtgaagcagtttcaagtaatgtgatcgattatgggcatgcaagcaaatatggctacacagaagatccacttgaagtacgtatttatgatcctgaaattccaactgatgaggtcgagaatgaatttcagtcacagcagaacatttctgcatctgttcccaatccaaatgtgatatgtaattctatgtttcctgttgaagacgtatttcgccaaatggacttccccggtgagtcctccaataatcggtcctttttctcagttgagagtggaaccaagatgtcaggcttacacatttcaggaggacagtcagtccttgaacccataaaatccgtcaaccaatccattaaccaaacagttagccagacaatgagtcaatctctgattcctccatctatgaaccagcaacctttttcgtcggaattaatttcatctgtaagccagcaagagcggatcccacatgaacctgtgattaattcatctaacgtacatgttggatcaagaggaagtaaaaagaattaccagtcacaggctgacattcccattcggtctccctttggtattgtgaaagcatcctggctaccaaagttttcacatgctgatgcccagaagatgaagagacttccaactccttctatgatgaatgattattatgcagcatctccaagaatatttccacatttgtgttctctgtgtaacgtagaatgtagtcatttgaaggattggattcagcatcaaaatacatctactcatattgagagctgtcgacagttacgtcaacagtatcctgattggaatcctgagatcctcccatcgagaagaaatgagggcaatagaaaagaaaatgaaactccacgaagacgttctcattcccccagtcctaggcgttctagaagatcaagctcaagtcacagattccgtcggtctcgaagcccaatgcattacatgtataggccgagaagtcgaagtccaagaatttgccatcgtttcatttctagatacagatccagatccagatcccgttcaccatatcgaattagaaatccatttagaggtagtccaaaatgctttcgatcagttagccctgagaggatgtcaaggagatcagtgagatcatcagatagaaaaaaagcattagaagatgtagtacaacgatctgggcatgggacagaatttaataaacagaagcatcttgaagctgctgataagggacattcaccagcacaaaagcctaaaactagcagtggaacaaaaccatcagttaaacctacaagcgctacaaagagtgattcaaatctaggaggacattctattcgttgtaaatcaaagaatcttgaagatgacactttgtcagaatgtaaacaggtgtctgataaagctgtttctctccagcgaaagcttcggaaagaacagtcattgcattatggttcggttcttcttataactgaattaccagaggatggttgtactgaagaagatgtgagaaaattatttcaaccatttgggaaagtgaatgatgtcctaattgttccatatagaaaagaggcttacctagaaatggaatttaaagaggcaattactgcaattatgaagtacattgaaacaacacctcttacgataaaaggaaaaagtgtgaaaatatgtgttccaggaaagaaaaaagcacagaacaaagaggtgaagaaaaagactttagagtcaaagaaagtatctgcatctaccttaaaaagagatgcagatgcttcaaaagctgttgaaattgttacttcaacttctgctgccaaaactggacaagccaaggcatgtgtagccaaagtaaacaaatctacagggaaatcagcaagttctgtaaaatctgtggtaacggtagctgttaaaggtaataaagcttcaatcaaaacagcaaaatctggtggaaagaagtctctagaagccaaaaagactgggaatgtcaaaaacaaagactctaacaaacctgtgactataccagaaaactctgaaataaagaccagtattgaagtcaaagccactgaaaactgtgctaaagaagctatttctgatgctgctttggaggccacagagaatgaaccacttaacaaggaaacagaagaaatgtgtgtgatgcttgtctctaatttgcctaataaaggatattctgtagaagaagtttatgacttagcaaaaccatttggtggtttaaaggatatcttgattttatcatctcataaaaaggcatatatagaaataaatagaaaagctgctgagtctatggtaaaattttatacctgcttcccagtattgatggatggaaatcaactctcaataagtatggctcctgaaaacatgaatataaaagatgaggaagctatatttataaccttggtaaaagaaaatgacccagaggcaaacatagatacaatttatgatcgatttgtacatcttgataatttaccggaagatggacttcagtgtgtactttgtgttggacttcagtttggaaaagtggatcaccatgtattcataagtaatagaaacaaggcaattcttcagttagatagtcctgaatctgctcagtcaatgtatagctttctgaaacaaaatccacaaaatattggtgaccatatgttgacctgctcattatctccaaagatagacttaccagaggtgcaaattgagcatgacccagaattagaaaaagaaagccctggcttgaaaaacagtccaattgatgaaagtgaggtgcaaacagcaactgatagtccctctgttaaacctaatgagcttgaagaagaaagtactcccagcattcaaacagaaactttggtacagcaggaagagccttgtgaggaagaagctgaaaaagcaacatgtgattctgactttgctgttgaaactttggagcttgaaactcaaggagaggaggtcaaagaagaaattcctcttgtagcatccgcttcagtcagtattgaacaattcactgaaaatgccgaggagtgtgctttaaatcagcagatgtttaacagtgacttggagaagaaaggggcagaaattattaaccctaaaacagcattgttaccatctgacagtgtgtttgcagaagaaaggaacctcaaaggaattctagaagaatctccatctgaagcagaagatttcatttctggaattacacagactatggtagaagctgtagctgaagtagaaaaaaatgaaactgtttcggaaatattgccatcaacttgtattgtgacgttagtaccaggaattcccactggggatgagaagacagtggacaaaaagaatatttctgaaaaaaaaggtaacatggatgaaaaggaggagaaggaatttaatactaaggaaaccagaatggatcttcaaataggaacagagaaggctgaaaagaatgaaggtaggatggatgcagaaaaggtggaaaagatggcagcaatgaaagaaaagcctgcagaaaacactttattcaaggcatacccaaataaaggagtgggtcaggctaataagcctgatgaaactagtaaaactagtattctggctgtatcagatgtatctagcagtaaaccaagcatcaaggctgttatagtctcttctcctaaggcaaaagctacagtttcaaaaactgaaaatcagaaaagttttccaaaatctgtgcccagagatcaaataaatgctgaaaagaaactttcagccaaggaatttggtctgcttaaacccacaagtgccaggtcaggcttggcagaaagcagcagtaaattcaaacctactcagagcagtcttaccagaggaggcagtggaaggatctcagccctgcaaggcaagctttctaaactggattacagagatataacaaaacaatctcaggaaacagaggctagaccttccatcatgaaacgggatgacagcaacaataagactttggctgagcaaaacactaagaatcctaaaagcactactggtagaagttccaaatctaaagaggagccattatttccatttaatttggatgaatttgttactgtggatgaggttatagaagaagtgaatccttctcaggccaagcagaatccactaaagggaaaaaggaaagaaactctcaaaaatgttcctttctctgaacttaacttaaagaagaaaaaggggaaaacttccactcctcgtggtgttgagggagaactatcttttgtgacattggatgagattggggaagaggaagatgcagctgcacatctagcacaagctctagtcactgtggatgaagtaattgatgaagaagaactaaatatggaagaaatggtaaaaaattcaaattcactttttacattagatgaattaattgaccaagatgattgcatttcccacagtgaacctaaagatgttactgttctgtcagtggctgaagaacaagatctcctcaaacaggaacgcttggtaactgtggatgaaattggagaagtggaagagctacctttgaatgagtcagcagacataacttttgccactttaaatactaaaggaaatgaaggagatatcgtaagggattccattggcttcatttcttctcaggtgcccgaagacccttctactttagttactgtagatgaaatacaagatgacagcagtgatttgcatttagtgactttggatgaagtaactgaagaggatgaagactctctggcggattttaacaaccttaaagaagagcttaattttgttactgttgatgaagttggagaggaggaagatggagataatgatttaaaagttgagttagcacaaagcaaaaatgaccatcccacagataaaaaagggaatagaaagaagagagctgtggacacaaaaaagacaaaacttgaatccttgtcccaagtgggtccagtaaatgagaatgttatggaagaagatctaaaaaccatgattgaaagacacttaacagctaaaactccaaccaagagagttagaattgggaaaactctgccatcagaaaaagctgttgtgacagaaccagcaaaaggtgaagaggccttccagatgagtgaagttgatgaggaatctggattaaaggattcagaaccagagcgaaaacgcaagaagactgaagactcttcttcaggcaaatcagtggcgtctgatgtccctgaggaattagactttcttgtacctaaggctggattcttctgtccaatttgttccctcttctactcaggtgaaaaagcaatgacaaatcactgcaagagtacacgtcataagcaaaatactgagaaatttatggccaagcaaagaaaggaaaaggagcagaatgaggctgaagaaagaagctctaggtgattgggggaaaggaaagaattcactagaaatttgtttagggtccagttgatttgtgtatttttgttatcatttaatttgtaattttcgtttcagaagcaaatattcgtgttgtacaaatttctgattgccctaaatgtagagagactgatggggaaagtatgatgggtttgatttttatatcaaatcatcaggcatggagaaatatcttttagaagtgttaaaataaatgttcctactgtatatttaaaaaaaaaaaaaaaaaaaaaaaaaaaaaaaaaaaaaaaaaaaaaaaaaaaaaaaaaaaaaaaaaaaaaacaaa

SEQ ID NO: 28747 - DNA, 2833 bp, Homo Sapiens
acttgcgctgtcactcagcctggacgcgcttcttcgggtcgcgggtgcactccggcccggctcccgcctcggccccgatggacgccgcgttcctcctcgtcctcgggctgttggcccagagcctctgcctgtctttgggggttcctggatggaggaggcccaccaccctgtacccctggcgccgggcgcctgccctgagccgcgtgcggagggcctgggtcatccccccgatcagcgtatccgagaaccacaagcgtctcccctaccccctggttcagatcaagtcggacaagcagcagctgggcagcgtcatctacagcatccagggacccggcgtggatgaggagccccggggcgtcttctctatcgacaagttcacagggaaggtcttcctcaatgccatgctggaccgcgagaagactgatcgcttcaggctaagagcgtttgccctggacctgggaggatccaccctggaggaccccacggacctggagattgtagttgtggatcagaatgacaaccggccagccttcctgcaggaggcgttcactggccgcgtgctggagggtgcagtcccaggcacctatgtgaccagggcagaggccacagatgccgacgaccccgagacggacaacgcagcgctgcggttctccatcctgcagcagggcagccccgagctcttcagcatcgacgagctcacaggagagatccgcacagtgcaagtggggctggaccgcgaggtggtcgcggtgtacaatctgaccctgcaggtggcggacatgtctggagacggcctcacagccactgcctcagccatcatcacccttgatgacatcaatgacaatgcccccgagttcaccagggatgagttcttcatggaggccatagaggccgtcagcggagtggatgtgggacgcctggaagtggaggacagggacctgccaggctccccaaactgggtggccaggttcaccatcctggaaggcgaccccgatgggcagttcaccatccgcacggaccccaagaccaacgagggtgttctgtccattgtgaaggccctggactatgagagctgtgaacactacgaactcaaagtgtcggtgcagaatgaggccccgctgcaggcggctgcccttagggctgagcggggccaggccaaggtccgcgtgcatgtgcaggacaccaacgagccccccgtgttccaggagaacccacttcggaccagcctagcagagggggcacccccaggcactctggtggccaccttctctgcccgggaccctgacacagagcagctgcagaggctcagctactccaaggactacgacccggaagactggctgcaagtggacgcagccactggccggatccagacccagcacgtgctcagcccggcgtcccccttcctcaagggcggctggtacagagccatcgtcctggcccaggatgacgcctcccagccccgcaccgccaccggcaccctgtccatcgagatcctggaggtgaacgaccatgcacctgtgctggccccgccgccgccgggcagcctgtgcagcgagccacaccaaggcccaggcctcctcctgggcgccacggatgaggacctgcccccccacggggcccccttccacttccagctgagccccaggctcccagagctcggccggaactggagcctcagccaggtcaacgtgagccacgcgcgcctgcggccgcgacaccaggtccccgaaggcctgcaccgcctcagcctgctgctccgggactcggggcagccgccccagcagcgcgagcagcctctgaacgtgaccgtgtgccgctgcggcaaggacggcgtctgcctgccgggggccgcagcgctgctggcggggggcacaggcctcagcctgggcgcactggtcatcgtgctggccagcgccctcctgctgctggtgctggtcctgctcgtggcactccgggcgcggttctggaagcagtctcggggcaaggggctgctgcacggcccccaggacgaccttcgagacaatgtcctcaactacgatgagcaaggaggcggggaggaggaccaggacgcctacgacatcagccagctgcgtcacccgacagcgctgagcctgcctctgggaccgccgccacttcgcagagatgccccgcagggccgcctgcacccccagccaccccgagtgctgcccaccagccccctggacatcgccgacttcatcaatgatggcttggaggctgcagatagtgaccccagtgtgccgccttacgacacagccctcatctatgactacgagggtgacggctcggtggcggggacgctgagctccatcctgtccagccagggcgatgaggaccaggactacgactacctcagagactgggggccccgcttcgcccggctggcagacatgtatgggcacccgtgcgggttggagtacggggccagatgggaccaccaggccagggagggtctttctcctggggcactgctacccagacacagaggccggacagcctgaccctggggcgcaactggacatgccactccccggcctcgtggcagtgatggcccctgcagaggcagcctgaggtcaccgggcccgacccccctgggcctggggcagcctccttcctgtaggcgagggcccaagtctgggggcagaacctgagtgtggatggggcggccaggaagaggccccttcctgccggggtgggaagagtttctctccatcggccccatgcgggtcacctccctagtcccacctttgcctcctaccagtgaacctcatctttgtatgaaagacagcaacctcctgggtaaatctgaatg

SEQ ID NO: 28748 - DNA, 3194 bp, Homo Sapiens
acactagtcgtctggctctctggctccggaagctgtgctccttcaccctcctcgttggtgtcctgtcaccatggcgctggctgtcttgcgggtcctggagccctttccgaccgagacacccccgttggcagtgctgctgccacccgggggcccgtggccggcggcggagctgggcctggtgctggccctgaggcctgcaggggagagcccggcagggccggcgctgctggtggcagccctggaggggccggacgcgggcaccgaagagcagggtcccgggccgccgcagctactggttagccgcgcgctgctgcggctcctggcactgggctccggggcctgggtgcgggcgcgggcggtgcggcggcccccggcgctaggttgggcactgcttggcacctcgctggggcctgggctcggaccgcgagtcgggccgctgctggtgaggcgcggagagaccctcccagtgcccggaccgcgggtgctggagacacggccggcgttgcaagggctgctgggcccagggactcggctggctgtgactgagctccgcgggcgggccagactgtgtccagagtctggggacagcagtcggcccccacccccgcccgtggtgtcctcctttgcggtttctggcacagtgcggcgactccagggagttctgggagggactggagattcactaggggtgagccggagctgtctccgtggccttggcctcttccagggcgaatgggtgtgggtggcccaggccagagagtcatcgaacacttcacagccgcacttggctagggtgcaggtcctagaacctcgctgggacctctctgatagactgggacccggctctggaccgctgggagagcccctcgctgacggactggcgcttgtccctgccactttggcttttaatcttggctgtgaccccctggaaatgggagagctcagaattcagaggtacttggaaggctccatcgcccctgaagacaaaggaagctgctcattgctgcctgggcctccatttgccagagagttacacatcgaaattgtgtcttctccccactacagtactaatggaaattatgacggtgttctttaccggcactttcagatacccagggtagtccaggaaggggatgttctatgtgtgccaacaattgggcaagtagagatcctggaaggaagtccagagaaactgcccaggtggcgggaaatgttttttaaagtgaagaaaacagttggggaagctccagatggaccagccagtgcctacttggccgacaccacccatacctccttgtacatggtgggttctaccctgagccctgttccatggctcccttcagaggaatccactctctggagcagtttgtctcctccaggcctggaggccttggtgtctgaactctgtgctgtcctgaagcctcgcctccagccagggggtgccctgctgacaggaactagcagtgtccttctacggggccccccaggctgtgggaagaccacagtagttgctgctgcctgtagtcaccttgggctccacttactgaaggtgccctgctccagcctctgtgcagaaagtagtggggctgtggagacaaaactgcaggccatcttctcccgggcccgccgttgccggcctgcagtcctgttgctcacagctgtggaccttctgggccgggaccgtgatgggctgggtgaggatgcccgtgtgatggctgtgctgcgtcacctcctcctcaatgaggaccccctcaacagctgccctcccctcatggttgtggccaccacaagccgggcccaggacctgcctgctgatgtgcagacagcatttcctcatgagctcgaggtgcctgctctgtcagaggggcagcggctcagcatcctgcgggccctcactgcccaccttcccctgggccaggaggtgaacttggcacagctagcacggcggtgtgcaggctttgtggtaggggatctctatgcccttctgacccacagcagccgggcagcctgcaccaggatcaagaactcaggtttggcaggtggcttgactgaggaggatgagggggagctgtgtgctgccggctttcctctcctggctgaggactttgggcaggcactggagcaactgcagacagctcactcccaggccgttggagcccccaagatcccctcagtgtcctggcatgatgtgggtgggctgcaggaggtgaagaaggagatcctggagaccattcagctccccctggagcaccctgagctactgagcctgggcctgagacgctcaggccttctgctccatgggccccctggcaccggcaagacccttctggccaaggcagtagccactgagtgcagccttaccttcctcagcgtgaaggggccagagctcattaacatgtatgtgggccaaagtgaggagaatgtgcgggaagtgtttgccagggccagggctgcagctccatgcattatcttctttgatgaactggactctttggccccaagccgggggcgaagtggagattctggaggagtgatggacagggtggtgtctcagctccttgccgagctagatgggctgcacagcactcaggatgtgtttgtgattggagccaccaacagaccagatctcctggaccctgcccttctgcggcctggcagatttgacaagctggtgtttgtgggggcaaatgaggaccgggcctcccagctacgcgttctaagtgccatcacacgcaaattcaagctagagccatctgtgagcctggtaaacgtgctagattgctgccctccccagctgacgggcgcggacctctactctctctgctctgatgctatgacagctgccctcaaacgcagggttcatgacctggaggaagggctggagccaggtagctcagcactgatgctcaccatggaggacttgctgcaggctgccgcccggctgcaaccctcagtcagtgagcaggagctgctccggtacaagcgcatccagcgcaagtttgctgcctgctaggagccccccagggtctgggacccgctcagcatggctgcaggtaccttgatagcccacagagagatctgggaaggaagggctcctcctcaggctgctgcaaccactggaggcactctagagatccaggtgcaagtggattgagacagcagcaacagctcaagagatatctctgctacttgcc

SEQ ID NO: 28749 - DNA, 5638 bp, Homo Sapiens
ggcccgaccgccgccactaccggggcctgagggggcctggcggagcccgagcgcggcccggcccgcagcgtggggccccgagcgcggtgaagagattgttttctgaaagctgcgttggaggctgtgacagagctgagagcctgtgtggagcggatggggaggctttctcaataacatggccctttgccattagccttgccatgaccacatttttcaccagcgtccccccctggattcaagatgcaaagcaggaggaggaagtgggctggaaactagttcccaggcctcggggccgggaggcggagagtcaagtgaagtgccaatgtgaaatttcgggaacacctttctcaaatggggagaagctgaggcctcacagcctcccgcaaccagagcagagaccatatagctgccctcagctgcactgtggcaaggcttttgcttccaaatacaagctgtataggcacatggccacccactcagcccagaaaccccaccagtgtatgtactgtgataagatgtttcaccgcaaggaccatctgcggaaccatctgcagacccatgatcctaacaaagaggccctccactgctctgagtgcggtaagaattacaatacgaagctgggctaccggcgccacctggccatgcatgctgccagcagcggtgacctcagctgcaaggtgtgcctgcagacctttgagagtacccaggccctgctagagcacctgaaggcccactcacgccgggtagcaggcggtgccaaggagaagaagcacccctgtgaccactgcgaccggcggttctatactcgtaaggatgtacggcggcacctagtggtgcacacaggccgtaaggacttcctgtgccagtactgtgcccagcggtttggccgtaaggaccacctgacgcgtcatgtcaagaagagccactcgcaggagctgctcaagatcaagacagagcccgtggacatgttaggcctactcagctgcagctccacagtcagtgtgaaggaagagctgagccctgtgctgtgcatggcctctcgggacgtaatggggaccaaggccttccctggcatgttgcccatgggcatgtatggtgcccacatccctaccatgcccagcacgggcgtgccacactccctggtgcacaacacgctgcccatgggtatgagctaccctctggaatcctcacctatctcttccccagctcagctccctccaaaataccagcttggatctacctcatacttgcccgacaaattgcccaaagtggaggtggatagttttctggcggagcttcctggaagcctgtctctctcatccgctgaaccccagcccgcctcacctcagccggcggcagctgcggccctcctagatgaagcactgcttgccaagagccccgccaacctctctgaggccctctgcgctgctaatgtggacttctcccacctactgggctttcttccactcaacctgcccccgtgtaacccacctggggccacaggaggcctggtcatgggctactcccaggctgaggcacagcccctgcttaccactttgcaagctcagcctcaagattccccaggagctgggggaccactgaactttgggcctctgcactccttgcctcctgtcttcacgtctggcctgagtagcaccaccctgcctcgtttccatcaagcattccagtagcccccacagaggccctcagctcagtttttggctctgttatggagccttagtacccaccccgtctgtgtcccccatgaaggcagctgagctttcagagctgggttcaaaaaaaaaaattccagtgtctgtatacaggagcacttggtttgggggttcaggctctaggatcgattccagaaggagccttgagccccaaccccgtgaaaagatctcataccgtaggacttcaggtattatttacttttatttttttgacctgaatcgggagccacacttggccctcttcctctccaaagcgccagaacctccttctctttggagaatggggaggcctcttggagacacagagggtttcaccttggatgacctctagagaaattgcccaagaagcccaccttctggtcccaacctgcagaccccacagcagtcagttggtcaggccctgctgtagaaggtcacttggctccattgcctgcttccaaccaatgggcaggagagaaggcctttatttctcgcccacccattcctcctgtaccagcacctccgttttcagtcagtgttgtccagcaacggtaccgtttacacagtcacctcagacacaccatttcacctcccttgccaagctgttagccttagagtgattgcagtgaacactgtttacacaccgtgaatccattcccatcagtccattccagttggcaccagcctgaaccatttggtacctggtgttaactggagtcctgtttacaaggtggagtcggggcttgctgacttctcttcatttgaggtcacatttttcccccgtggggaaataaactgactttggactgcttcagtctctgccatcttccatgactgcatttgttcctgcctgcctcggcggtatccacagaagacaggcaagaggattggagcagttttctcacaggtctgcaattctgtttttctccaagtacattatgaccccctcatccttctcttgaactggagaggggaagaaatgaaaggcatgcccacgtccgtcacctccccatcccctagtccccaccttgaacatcatgagctgttgttattagtcttggaagcagagtctgggttggtgtggatagcaaaggaggaagtctgagcccctcattggtcttcctcccacctgtcccttttccgggaagttgtggaattgttggaagaagagtttgcagaaggttaggaatgggtagatagctaagtcctaatctatgggtacattgttgtgtcccaaaccaaaattttccttatccacaatgtcccttctgtctcttccactttacagtggactcggccactgtgcataggcttctctgctctccatcaaatcacttccactttcctgtgcccccacccccgcctccagttttccgctagtatccggcaaggtttcttgcaacaaatgattagttcttttcttctgactcgtggggctccctgctgcagagagcacagcccttgcctggagcccaggaaccccatccttgcttcatctcagttcttcatgggcttcactcttcccactcacggaagggaggtagctcagggacctccactgtgggacccttgagatgcttccactctgattcagaaacacacttctacctctttactgttaactcttaacagatgcagtcagcagtttctgggcacttctctcagtaggtgcctcatgctgacttctccactagggtttcaggacaaactaccaaggaattgcctcagcctcctaccagtcctccctcacccaccttctgtctaggttcacttggtttgtcatcaggaactgagcaggtccaggactcagctttctgcttcagcctaagccagtactccttgtttgaggtaaaagccttaaaatttagctccctagctcttgattagaagcaatttggagtaagtgtgttttgatttaggcagggtagcttgggatacctttttaaaaacaccagatattaaaatgtctggcaaggttagaatcagactagatgatttgcttctaaaaattagtttcagtgagtcccagggactaattaaggtttattttaaaaagtgtctaccttggtacgcagccacctcctgcatgctgtgcatgttattgggacttgtattataggcgatggtatgtgagaatccagttgggactcgctgttgccatcctctttgttgtatctggttttcatcactagactcagcaacccttctcaccttaactgccaccttccctacactctcagtttacagaggccactgggcctctggctgcagaatacaaagtcccgggctgttagaggagtcctttcctctctgcctgccctttcctgtccctccctcgaattctctctccccgtaagtgatgctggaaaagtcataggactggcaaagcaactgtttaaaccctttgtaaccggggccttgcccccacctcctgtcttttctccttgccttccccactcctgtgtcctcccatctatcctgtctttcctttcctcctctcagtgtcctcagcacccacaaggaattttcctatcactgtgaactttgctggtacagaggaataatatctgccttcacctttttttttttggaccatagctagccagtcatttcttaaacctcccttcctaaaatctggggggtcggggggaaagaaaaaaaaagccttagtggcctggttgttcaaaggataagaatagctttatcctgcactcagtacccgaactcacttcagtatgcttactgaggccatgagaacctgaggggcatctgcccaggacagaagccatggcatatgacaaagaccaatgagggaccaggaaaaaaagtgatgtcccctttccctgccacctccagcctctgccagcaatgagctgtccccctcccaccctacacagtagctggtcagggctgagtacagtcctgggggtaaggggatgacatgcccaggtgtcagctcaaaggatctctgcatcatcttgaggtgggaggcagggaaaggagcgccaatgaggttccctgcaacccccgccctccagcccaccgcccagccttttacaaatggcattttcttaattgaaaatccgggaagcaggtgtgattacttttttgctcgtagatattgtcctaagttggaattctcccactgccctaaaactttccctagtagtcctttaaactcccccctccctttttggtagctgtttctccgtcctctctccacctgccctcttatctaggagctgtttgtaagcacgatttttttaacaggttatattgtacaggatcaatattttgctttttaacaaggatatttatgtaataagaaactttgccttaggcaggtgttggccagaaaagtccagattcctctgggatcccaccctggcctctcctggaactctgaacctgctgtggaaggaattggccatgaccttcacctctggagagtagggtctatggcgagggaaaagggtgttcaccatgataacctagtgcctccatagaggggtttggaaaaattccagtccgatttctttgtgtgtcagctgacttccttagctgattgttcccacttgcacctctccacctttggcactagaactcctgagacaccacttctcatgcttctccctccctaccagcggtcaaggctttggagccactcttttgtaactccagattatttaaagagaaaagtacaagacagaaatcttctagcactttgtaaacacagtgaataacctcttggagtatttttggctttatataaaacaaggtttttaattgtaaagtataagtgccattagaaaatgcacagggcatatctttgttaaagtagatttttcaatgttttacagaattacattttcaaaaaaaggtttttataatgaagttgtttattaaaaacttctgaatgatgtgtt

SEQ ID NO: 28750 - DNA, 4248 bp, Homo Sapiens
aaaggtaaccactcctttgtggaggtcgccagggtcattgtcgtggatttgcacagtcggctgggcggtgcaatggcggaaagaaaaggaacagccaaagtggactttttgaagaagattgagaaagaaatccaacagaaatgggatactgagagagtgtttgaggtcaatgcatctaatttagagaaacagaccagcaagggcaagtattttgtaaccttcccatatccatatatgaatggacgccttcatttgggacacacgttttctttatccaaatgtgagtttgctgtagggtaccagcgattgaaaggaaaatgttgtctgtttccctttggcctgcactgtactggaatgcctattaaggcatgtgctgataagttgaaaagagaaatagagctgtatggttgcccccctgattttccagatgaagaagaggaagaggaagaaaccagtgttaaaacagaagatataataattaaggataaagctaaaggaaaaaagagtaaagctgctgctaaagctggatcttctaaataccagtggggcattatgaaatcccttggcctgtctgatgaagagatagtaaaattttctgaagcagaacattggcttgattatttcccgccactggctattcaggatttaaaaagaatgggtttgaaggtagactggcgtcgttccttcatcaccactgatgttaatccttactatgattcatttgtcagatggcaatttttaacattaagagaaagaaacaaaattaaatttgggaagcggtatacaatttactctccgaaagatggacagccttgcatggatcatgatagacaaactggagagggtgttggacctcaggaatatactttactcaaattgaaggcgcttgagccatacccatctaaattaagtggcctgaaaggtaaaaatattttcttggtggctgctactctcagacctgagaccatgtttgggcagacaaattgttgggttcgtcctgatatgaagtacattggatttgagacggtgaatggtgatatattcatctgtacccaaaaagcagccaggaatatgtcataccagggctttaccaaagacaatggcgtggtgcctgttgttaaggaattaatgggggaggaaattcttggtgcatcactttctgcacctttaacatcatacaaggtgatctatgttctcccaatgctaactattaaggaggataaaggcactggtgtggttacaagtgttccttccgactcccctgatgatattgctgccctcagagacttgaagaaaaagcaagccttacgagcaaaatatggaattagagatgacatggtcttgccatttgagccggtgccagtcattgaaatcccaggttttggaaatctttctgctgtaaccatttgtgatgagttgaaaattcagagccagaatgaccgggaaaaacttgcagaagcaaaggagaagatatatctaaaaggattttatgagggtatcatgttggtggatggatttaaaggacagaaggttcaagatgtaaagaagactattcagaaaaagatgattgacgctggagatgcacttatttacatggaaccagagaaacaagtgatgtccaggtcgtcagatgaatgtgttgtggctctgtgtgaccagtggtacttggattatggagaagagaattggaagaaacagacatctcagtgcttgaagaacctggaaacattctgtgaggagaccaggaggaattttgaagccaccttaggttggctacaagaacatgcttgctcaagaacttatggtctaggcactcacctgccttgggatgagcagtggctgattgaatcactttctgactccactatttacatggcattttacacagttgcacacctattgcaggggggtaacttgcatggacaggcagagtctccgctgggcattagaccgcaacagatgaccaaggaagtttgggattatgttttcttcaaggaggctccatttcctaagactcagattgcaaaggaaaaattagatcagttaaagcaggagtttgaattctggtatcctgttgatcttcgcgtctctggcaaggatcttgttccaaatcatctttcatattacctttataatcatgtggctatgtggccggaacaaagtgataaatggcctacagctgtgagagcaaatggacatctcctcctgaactctgagaagatgtcaaaatccacaggcaacttcctcactttgacccaagctattgacaaattttcagcagatggaatgcgtttggctctggctgatgctggtgacactgtagaagatgccaactttgtggaagccatggcagatgcaggtattctccgtctgtacacctgggtagagtgggtgaaagaaatggttgccaactgggacagcctaagaagtggtcctgccagcactttcaatgatagagtttttgccagtgaattgaatgcaggaattataaaaacagatcaaaactatgaaaagatgatgtttaaagaagctttgaaaacagggttttttgagtttcaggccgcaaaagataagtaccgtgaattggctgtggaagggatgcacagagaacttgtgttccggtttattgaagttcagacacttctcctcgctccattctgtccacatttgtgtgagcacatctggacactcctgggaaagcctgactcaattatgaatgcttcatggcctgtggcaggtcctgtggatgaagttttaatacactcctcacagtatcttatggaagtaacacatgaccttagactacgactcaagaactatatgatgccagctaaagggaagaagaccgacaaacaacccctgcagaagccctcacattgcaccatctatgtggcaaagaactatccaccttggcaacataccaccctgtctgttctacgtaaacactttgaggccaataacggaaaactgcctgacaacaaagtcattgctagtgaactaggcagtatgccagaactgaagaaatacatgaagaaagtcatgccatttgttgccatgattaaggaaaatctggagaagatggggcctcgtattctggatttgcaattagaatttgatgaaaaggctgtgcttatggagaatatagtctatctgactaattcgcttgagctagaacacatagaagtcaagtttgcctccgaagcagaagataaaatcagggaagactgctgtcctgggaaaccacttaatgtttttagaatagaacctggtgtgtccgtttctctggtgaatccccagccatccaatggccacttctcaaccaaaattgaaatcaagcaaggagataactgtgattccataatcaggcgtttaatgaaaatgaatcgaggaattaaagacctttccaaagtgaaactgatgagatttgatgatccactgttggggcctcgacgagttcctgtcctgggaaaggagtacaccgagaagacccccatttctgagcatgctgttttcaatgtggacctcatgagcaagaaaattcatctgactgagaatgggataagggtggatattggcgatacaataatctatctggttcattaaactcatgcacattggagatttatcctggtttcttaggaatactactactctgattgtgtctactgattggctatcagaaccttaggctggacctaaatagattgatttcatttctaaccatccaattctgcatgtattcataattctatcaagtcatctttgattcctggacctaataaattttttttccctttctttgggtgtccaagagaaatggtttttgccaaactctttttaaaaaacaaattgttgctatttcctagaagtttctggtttttaagatgaacataaaagtgtcagtatgcttccttttatgaggtgtactttatactttgatgaaggctaaggtgtacctaacagctttttatagtatattcatttatggagttagctgtattttttttaaaaaaagaaaagtagtaaattagcagctttttttttttttaaatgaagagaacttcatgatgatttaaaagaactaatgagaatattttgacttgacttcaattactaagtattttgtataaagaacaaataggtcctgcattttataagactttttaaagctttaattattcaactaagaaccaataatggcttcttcaaggctaatatcaatagtttataagcagtatatttcaccta

SEQ ID NO: 28751 - DNA, 1856 bp, Homo Sapiens
attgcgggcggcggcgttcggagtcgccgggagctgccaggctgtccgcgccgccgctgcggggccatgatccggaacgggcgcggggctgcaggcggcgcagagcagccgggcccggggggcaggcgcgccgtgagggtgtggtgcgatggctgctatgacatggtgcattacggccactccaaccagctgcgccaggcacgggccatgggtgactacctcatcgtaggcgtgcacaccgatgaggagatcgccaagcacaaggggcccccggtgttcactcaggaggagagatacaagatggtgcaggccatcaaatgggtggacgaggtggtgccagcggctccctacgtcactacactagagaccctggacaaatacaactgtgacttctgtgttcacggcaatgacatcaccctgactgtagatggccgggacacctatgaggaagtaaagcaggctgggaggtacagagaatgcaagcgcacgcaaggggtgtccaccacagacctcgtgggccgcatgctgctggtaaccaaagcccatcacagcagccaggagatgtcctctgagtaccgggagtatgcagacagttttggcaagtgccctggtgggcggaacccctggaccggggtatcccagttcctgcagacatctcagaagatcatccagtttgcttctgggaaggagccccagccaggggagacagtcatctatgtggctggtgccttcgacctgttccacatcgggcatgtggacttcctggagaaggtgcacaggctggcagagaggccctacatcatcgcgggcttacactttgaccaggaggtcaatcactacaaggggaagaactaccccatcatgaatctgcatgaacggactctgagcgtgctggcctgccggtacgtgtcagaagtggtgattggagccccgtacgcggtcacagcagagctcctaagtcacttcaaggtggacctggtgtgtcacggcaagacagaaattatccctgacagggatggctccgacccataccaggagcccaagagaaggggcatcttccgtcagattgacagtggcagcaacctcaccacagacctcatcgtccagcggatcatcaccaacaggttggagtatgaggcgcgaaaccagaagaaggaagccaaggagctggccttcctggaggctgccaggcagcaggcggcacagcccctgggggagcgcgatggtgacttctaacctggcagaggccctggccggccctccccctgctctgcttctgcgccttctgcgtttggacataggactctgcagggccgccctctctaactggcctggctctggaagggctggtgaggactctgcctccttgcctgcctacaaggtgcctggtttgcagcaggctctccgctctttccagcaaagctgctcagagagggtgtccagcacagtggagaggccggaagtgagacgggcagacggcacctgcagcctgaaacgcaccgctcctgcgtgcgcccccacctggtccccggatgcccccaccacctggacagaggccacactgactgcccacccagctgtggcgggaggtgcagagcagggggctttagggagcagtgactgcggtcacccctttagttctctgggtgtagaccacaccacctcccactgggcaccccccaacacggtgtcctgccacccagcgcctggctccaggaaaacacgcttgccttccttcccggcagcttcgccactctccttatggactctgttctgtttgtacatggctgacggaaatctctttggtacaaccgaataaagcctggtggcagtgctgcgcggggctcccagccaat

SEQ ID NO: 28752 - DNA, 2160 bp, Homo Sapiens
  misc_feature (2053)..(2053): n is a, c, g, or t
ggcttttaacggtgggagggcaccatcctcttgctctgctctcgttctccagaaggctgtcccggggcccccactctccgtcccgctccggggacagtggctcgcctgctatgcgcggcagcccgcgccggggccggcaccagcagcgcccgggcggatgcagcgagcccacggaggggcatgcttccacgcaccaagtataaccgcttcaggaatgactcggtgacatcggtcgatgaccttctccacagcctgtcggtgagcggcggcggaggcaaggtttcggcggcgcgcgcgaccccggcggcggctccctacttggtgtccggcgaggcgctgcgcaaggcgcccgacgatgggcccggcagcctgggccacctgctccacaaggtgtcccacctgaaactctccagctcgggcctccgcggcctgtcgtcggccgcccgggagcgggcgggcgcgcggctctcgggcagctgcagcgcgcccagcctggccgccccggacggcagtgcgccctcggcgccccgcgccccggccatgagcgccgccaggaagggccggcccggcgacgagccgctgcccaggccccctcggggggcgccgcacgccagcgaccaggtgctggggcccggagtcacctacgtggtcaagtacttggggtgcattgaagttctgcgctcaatgaggtctcttgacttcagtacaagaacacaaattaccagggaagccatcagccgcgtctgtgaagctgtgcctggtgcgaagggagccttcaagaagagaaagcctccaagcaaaatgctgtccagcatcttgggaaagagcaacctccagtttgcgggaatgagcatctctctgaccatctccacggccagtctgaacctgcgaactccggactccaaacagatcatagcgaatcaccacatgcggtccatctccttcgcctctgggggagacccggacacaactgactatgttgcatatgtggctaaggaccctgttaatcgcagagcttgtcacattttggaatgctgtgatgggctggcccaggatgtcatcggctccatcggacaagcctttgagctccggtttaagcaatatttacagtgtcctaccaagattcccgctctccatgatcgaatgcagagtctggatgagccatggacggaagaggagggagatggctcagaccacccatactacaacagcatcccaagcaagatgcctcctccagggggctttcttgatactagactgaaacccagaccccatgctcctgacacagcccagtttgcaggaaaagagcagacttattaccagggaagacacttaggagacacttttggcgaagactggcagcaaacacctttaaggcaagggtcctcggacatctacagcacgccagaagggaaactgcacgtggcccccacgggagaagcacccacctacgtcaacactcagcagatcccaccacaggcctggccggctgcggtcagcagtgctgagagcagcccgaggaaagacctctttgacatgaaaccttttgaagatgctctcaagaaccagcccttggggcccgtgttaagcaaggcagcctccgtggagtgcatcagccctgtgtcacctagagccccagatgccaagatgctggaggaactgcaagccgagacttggtaccaaggagagatgagcaggaaggaggcagaggggctgctggagaaagacggagacttcctggtcaggaagagcaccaccaacccgggctcctttgtcctcacgggcatgcacaatggccaggccaagcacctgctgctcgtggacccagaaggcacgatccggacaaaggacagagtctttgacagtatcagccacctcatcaaccaccacctagaaagcagcctgcccattgtctctgcagggagtgagctgtgtctccagcagccagtggagaggaagcagtgacctggccagcactgctcccagcactgcgcaccaggtcaggaggacctggagtggactagaatcggggctgctggaactgggacagctncctgtggctcagagccttcttcaaaagcttcaaaaggaaggcttcctttaaggtcaagtttcataaacttggttctgaatttctcatatgcatattaaaggtgtaca

SEQ ID NO: 28753 - DNA, 2443 bp, Homo Sapiens
ccacacttcccgcctccctaaaacgcacaccccgctagccatgggcagccgcgaccacctgttcaaagtgctggtggtgggggacgccgcagtgggcaagacgtcgctggtgcagcgatattcccaggacagcttcagcaaacactacaagtccacggtgggagtggattttgctctgaaggttctccagtggtctgactacgagatagtgcggcttcagctgtgggatattgcagggcaggagcgcttcacctctatgacacgattgtattatcgggatgcctctgcctgtgttattatgtttgacgttaccaatgccactaccttcagcaacagccagaggtggaaacaggacctagacagcaagctcacactacccaatggagagccggtgccctgcctgctcttggccaacaagtgtgatctgtccccttgggcagtgagccgggaccagattgaccggttcagtaaagagaacggtttcacaggttggacagaaacatcagtcaaggagaacaaaaatattaatgaggctatgagagtcctcattgaaaagatgatgagaaattccacagaagatatcatgtctttgtccacccaaggggactacatcaatctacaaaccaagtcctccagctggtcctgctgctagtagtgtttggcttattttccatcccagttctgggaggtcttttaagtctcttccctttggttgcccacctgaccattttattaagtacatttgaattgtctcctgactactgtccagtaaggaggcccattgtcacttagaaaagacacctggaacccatgtgcatttctgcatctcctggattagcctttcacatgttgctgactcacattagtgccagttagtgccttcggtgtaagatcttctcatcagccctcaatttgtgatccggaattttgtgagaaggattagaaatcagcacctgcgttttagagatcataattctcacctacttctgagcttatttttccatttgatattcattgatatcatgacttccaattgagaggaaaatgagatcaaatgtcatttcccaaatttcttgtaggccgttgtttcagattctttctgtcttggaatgtaaacatctgattctggaatgcagaaggaggggtctgggcatctgtggatttttggctactagaagtgtcccagaagtcactgtatttttgaaacttctaacgtcataattaagtttctcttgtcttggcatcaagaatagtcaagttttttggccgggcatggtggctcatgcctgtaatcccagcacttggggaggccaaggcaggcggatcacatgaggccaggaattcgagaccaacctggtcagcatggcaaaaccccgtctctactaaaagtacaaaaattagccaggcgtgatggcacgtgtctgtaatcccagctactctggagactgaggtgggagaatcgcttgagactgggaggcagaggttgcagtgaaccgagatcatgccaccgcacttcagcctgggtgacagagaaggactccgtctcaaaaaaaaaagaaaaaagaatagtcatttttaaactacctatctcatgcaatgaaagcattttcttccacaaagagcttaatcctcatgataggattgcctagtgtctcccatttgcaggtttctgggttgatgtcttaatgcataatactgcaagtgacatcagctggctgtgatgcttcgaaataggtctgctcctcacagctttgggaatctgaatggaagaagaaaagagagaagttaacaacctccactggggcaactttgtgaacatgtaggcacttagtcataggaaacatattatgtgcaggtcctagcctggggtaggaaagtagatagacagaaaatcattaggtaatttaagtactaaattgggcagggctttttagtatcaaatcactactagaccgtttaatttgttaaattatctctaggatggtgatttataacctacccaaagttatcgatattcttactaaactctgaggcctgaagttctgtgatagaccttaaataagtgtcctaagtcagtggttcccaaatctggctggtcgggaatacctgggaagtttgttaaaattttttaaaaatgttttaagatttttgggtcctgagccaggcgtggtggctcacacctgtaatcccagcactttgggaggctgaggcaggtggatcgcctgaggtcaggagttcaagatcaacctggccaacatactgaaaccccgtctctactaaaaataagaaaaattagctgggcgtggtggcgggcacctgtaatcccagctacttgggaggctgaggcaggagaatcacttgaacctgggagttagaggttgcagtgagctgagatcacaccattgcgcttcagcctgggcaacaagagtgaaactccatctcc

SEQ ID NO: 28754 - DNA, 1458 bp, Homo Sapiens
agtaaactgagttgatttgactttatctcagtactactcttgacctttcacaactttcgtaggttcacagtctctctttttctaggaacttggctgtgttgtcctgcctcagagacaaattcatctattgtaggcctagcccctgcctttgaaaacaaggaaaggttggtagaacatcaacacagcatggaatttccagggaggtctcatttcaaaacttcataaagaacaagaaccacctggacttctgtgagggcgatgattaaactggcctgagtttgaatgaaaggataatgtatgctcaacctgtgactaacaccaaggaggtcaagtggcagaaggtcttgtatgagcgacagccctttcctgataactatgtggaccggcgattcctggaagagctccggaaaaacatccatgctcggaaataccaatattgggctgtggtatttgagtccagtgtggtgatccagcagctgtgcagtgtttgtgtttttgtggttatctggtggtatatggatgagggtcttctggccccccattggcttttagggactggcctggcttcttcactgattgggtatgttttgtttgatctcattgatggaggtgaagggcggaagaagagtgggcagacccggtgggctgacctgaagagtgccctagtcttcattactttcacttatgggttttcaccagtgctgaagacccttacagagtctgtcagcactgacaccatctatgccatgtcagtcttcatgctgttaggccatctcatcttttttgactatggtgccaatgctgccattgtatccagcacactatccttgaacatggccatctttgcttctgtatgcttggcatcacgtcttccccggtccctgcatgccttcatcatggtgacatttgccattcagatttttgccctgtggcccatgttgcagaagaaactaaaggcatgtactccccggagctatgtgggggtcacactgctttttgcattttcagccgtgggaggcctactgtccattagtgctgtgggagccgtactctttgcccttctgctgatgtctatctcatgtctgtgtccattctacctcattcgcttgcagctttttaaagaaaacattcatgggccttgggatgaagctgaaatcaaggaagacttgtccaggttcctcagttaaattaggacatccattacattattaaagcaagctgatagattagcctcctaactagtatagaacttaaagacagagttccattctggaagcagcatgtcattgtggtaagagaatagagatcaaaaccaaaaaaaatgaaccaaaggcttgggtggtgagggtgcttatcctttctgttattttgtagatgaaaaaactttctggggacctcttgaattacatgctgtaacatatgaagtgatgtggtttctattaaaaaaataatacatcc

SEQ ID NO: 28755 - DNA, 7246 bp, Homo Sapiens
agatctgcctgctggatgctcctgatagttatttatgtaactatccgccatgatgctcctgatagttatttatgtaacttttttatggggaggctgagggtctcactgtcacccaggctggagtgcagtggcacaatcatagctgcctgcagcctcaaattcctgggctcaagagatcctcccgcctcaggaggcaggaggatggtcttcttcttcaggagtccctgtctgcccaggggcagctgtcactggaatcttttagctgccaggaatgaggtgatggctgaagagcccaccactaagaaaatggttagtcacccctttgacaatgcttcctttgtgccatgcctgctctgagcactttgcaaatgttgactcatataaacttcacagccctcatgatgtgggcacaactgctatcctcattcctcattgtgcagatgaggaagctaaggccagcaaaggcctagtaactaacccaaggttacccagccgggaaatgctggagctgggaatgaagcccagctgtctggttccagagccagtgttacatggctctgacctcccaggcagttcttccaggaacctcccccacttccctgggcccttcccaggtggaacccctttctgagcctccttttcccatcagctctgtccttgacagaggcaccccagactttcagagccaaacgcgatcgtgttgcctacaattgaggaaacagaggccttgaaaggtgtgtgacacacctatgtccccccaaattataaaggtagttggggaagaaaaagaagcacgtgtgtaagaacggggaatatttatgaggttctcactgcgttccaggcactggggacccagtgcagacaggacctggcccctgcccaggtggcgatgtcagactgggagggaagacacattgaaagccaagagacaagataaatttcaaatttagcggcaagtgatcttgagagggcagtaaagggaagaaggcgggactgggaggaccttgggagatgcgcttccgtccagatcctcaccttgctttaggaggtgagaacagaggcagtcttccgtcccaaaatccttctccccacggttgggagaatagcgctggtgggttttttgttcattttactttattttacttattttatttatttatgagacggagtctcgctctgttgccgaggctggagtgcaacggccggatctcggctcactgcaacctccgcctccccgattcaagctattctcaggcctcaatctcctgagtagctgggattacaggttcgtgccaccaacgcccgggtaatttttatatttttagcagagatggggtttcaccatgttggccaggctggtctcgaactcctgacctcaagtgatccgcccgcctcggcctcccaaaatgctgggattacaggcgtgagccaccgcgcccggcctgtttgttaatcttaaatagaaacggagtctccttatgttgcctaggctggtctccaactcctaggatcaagagatcctcctgtcttggcctcaggaagtgatgggattacaggcatgaggctccgcgcccggcctgataggttctcttattgccatgttgtagatagaagggggcccctgggttaggcagacacaggttaggtagttcgtccggcgtcaccgggcgggagcccaccgcaggccccacgagacaagggcgagcaggttcatcgcctcccggggaaaggactgggtagtcccaggccccaccccttcctggaacagcaagttcgctgtgggtcccgacctactgacccaggcggagggcgggacgcagggtagctggggccgcgtagagagggaaagaaggtcgcgattggctcgtcccgaaaggtgggcggggcctcctccgacctgtgcgcgcgcgccgcggggaggtgttgccgagggcggagcgggagggggcgtggccccgcgcgggcggccgttgacggcgaggccccgccccggatgtcgcgtgtcgctgaaagggcggcggcgattggccggcgccgcgggggcgggcggggcggaaggttctggagggggctggcgggctctggaagcttccgccggacgggtatatagagtccgggactggtcggcggcggagccgggggacggcgacagcgggtcggcgggccgcaggagggggtcatgggtaaagactactaccagacgttgggcctggcccgcggcgcgtcggacgaggagatcaagcgggcctaccgccgccaggcgctgcgctaccacccggacaagaacaaggagcccggcgccgaggagaagttcaaggagatcgctgaggcctacgacgtgctcagcgacccgcgcaagcgcgagatcttcgaccgctacggggaggaaggtgtgtgctcgcggccaggggcgcggccccgccttttgacagacagggaaactgaggcacgctggcccctctcggcggccccccgggaaggacgccccgggccgtggggccgagctgccccgccctccggtctcgcgggcctccgccctcggattggcggccgcgcggtgggaggaggagccttggcccagccgctcggccagaagcttctagcatgtctggggctgcccctccccgggcgcctcctcccgcggccccgagcagccccggggtgcggtgcatgggggtgggggagccgggggtgacgacggggacggcgcggcggagcccgctgcggacccgggctcacctgggctcggccgccggggtccgcggggcggcgcctccggctcagctgcggggcgaggggttgtgaatgcaggagacgaccccgttcgtgggcttgggggctgggttgggataattcccgggaagtgatgacctggccccggcagggcacgcaggaggcagcggccgcccaggtccggagagcggggccgcctcggagggtaaggagagcagggctttttgttcctgtgcccgttgatgattcaggctggcttctgggcttgatctggagctgactttttgtgcaaggatggtggcagtgaatgctaatgtgtgaggatttaaaaactccctatttatttttgttttttttaatcttctcttcctacgcaccattagccctaaaacgttgagagtaaacacttaccgaaagccgaccctggaccatgtgtctttagccatctcttggtgatgttgccaggaggatgggtcagtccaggagtggcagggcctaggtggcacctggaggtgaacacctaaccgcatgagtccttttccactgtcaggctacgcggaaatactgttggtaggggggcgtctctgctgttggcagtgagaggtagaaacttggggttcttccttgctctcccctgacagacaaaaaagttcctcccccatggcttccaagctgtttccccctgtaagggaagctcgagagagagtctgctgttcagccatctgactgcttctaaatctgcttttcaggcctaaaggggagtggccccagtggcggtagcggcggtggtgccaatggtacctctttcagctacacattccatggagaccctcatgccatgtttgctgagttcttcggtggcagaaatccctttgacaccttttttgggcagcggaacggggaggaaggcatggacattgatgacccattctctggcttccctatgggcatgggtggcttcaccaacgtgaactttggccgctcccgctctgcccaagagcccgcccgaaagaagcaagatcccccagtcacccacgaccttcgagtctcccttgaagagatctacagcggctgtaccaagaagatgaaaatctcccacaagcggctaaaccccgacggaaagagcattcgaaacgaagacaaaatattgaccatcgaagtgaagaaggggtggaaagaaggaaccaaaatcactttccccaaggaaggagaccagacctccaacaacattccagctgatatcgtctttgttttaaaggacaagccccacaatatctttaagagagatggctctgatgtcatttatcctgccaggatcagcctccgggaggtaaggtgccaggtggggcggtgtctgtagagggcgatggctgctttttgaagcagtttagtatttgctgaaccaatgtgttggggtgtgtggtgcgtgccaggcttggggcacaacagtgaacaggactgaccagggcgctgttgtggagctttcgtggtggggacgtgtagatttgggggccaggtcttagctgcagaggcctgatgggtcttatctatggcagacggcctctgggcaagagctgagcctcttgagccagcttccatctaatgctgtccttttgcttttcaaggctctgtgtggctgcacagtgaacgtccccactctggacggcaggacgatacccgtcgtattcaaagatgttatcaggcctggcatgcggcgaaaagttcctggagaaggcctccccctccccaaaacacccgagaaacgtggggacctcattattgagtttgaagtgatcttccccgaaaggattccccagacatcaagaaccgtacttgagcaggttcttccaatatagctatctgagctccccaaggactgaccagggacctttccagagctcaaggatttctggacctttctaccagttgtggaccatgagagggtgggagggcccagggagggctttcgtactgctgaatgttttccagagcatatattacaatctttcaaagtcgcacactagacttcagtggtttttcgagctatagggcatcaggtggtgggaacagcaggaaaaggcattccagtctgccccactgggtctggcagccctcccgggatgggcccacatccacctccagtccctggccaggggtgagaggcagaccagcagatggacttgatccctctgtgtctttttgcttctggctggtagataatgtcaacctgcagtcttgattcccagaccctgtacactcctccttttctgttgtgtgatcagtttgtgctttattctgtatttgtctcccatgtcttgctcttctcctggagaattctgtcttctctttggccatctcaaattgagaacctaaactattcctgcagaactgcctggttggcgtccacaagcaatacctctcgttccagcaggaccaagggagccagcctccagtgagtgactccagcaagtgcagccacctctcccttgatggtctgggagcctggcctcagcaaggggccttcctgacctctggctccagtgaagctgaatgtcctcactttgtgggtcacactctttacatttctgtaaggcaatcttggcacacgtggggcttaccagtggcccaggtaattttttgtttcatggactatggactctttcaaagggatctgatccttttgaattttgcacagccctagatacaatcccttttgataaaagggtctttgcttctgattacaggagcactgtggaacgtctgtaaatatgtttttataattccatgtatagttggtgtacactcaaaacctgtccccggcagccagtgctctctgtatagggccataatggaattctgaagaaatcttggggagggaaggggagttggaacaaatgtctgttccctggaggccagtccagtgctcagacctttagactcattgtaagttgccactgccaacatgagaccaaagtgtgtgactagtcaatgaagtgcgacagcattaaagactgatgctaaacctcaggggagcggtcctgtgactctgtttgagggttctgctggttttgggggtggagtggagagctgggcatccttccaaattcaatcaaggtgagagggtgggatgggcaggaggcaagtgccctgcaagggaaacgtaagtctcccttcctcagccataagtgggttggagaacttctacccagactcggggtccaaaaaaccagagacccaagcacagtggccttggggatcattttttgatgaaggttggagtcaaagtagcggtggggagaggcagggtctggctcctaattctgcctttcttcagggtccctggctttttcagcagaccttggctctggggccaaggggccaacccagggtctggcctcttaattccttatcactccttccctgctagaacgggctgggcgtcctgaaggctggccaaacccgagctcaaggtcctgcccaggactagccccactgtagagaggacccatttcctgccttggctttatttgcaggctactaaagctgcttttactttgtaactttctttaaaataactggttttattataaagtaattgctcaggcttaaaacaatgtattgctgctttgttacaaaatgttctaaagtggaaacactgtatatagaccaggagcagtggctcaggcatgtaatcccagtaccttgggaggccaaggtgggtagatcccttgagctcaggagtttgagaccagcctagacaacattgtgaaaccccacctctacgcaatctaaaaattcagccggagaatgcagcgtacacctgtagggccagctattatgggactgaggctggaggatcaattgagcccaagaggtggaggcagtagcaactgtgtttgtgccactgcactccaacctgggtgacaaagtgagaccctgtatcaagaaaaaaaaactaaaacacagtatccaaaagtcaaactgggccagacgcagtggctcacacctgtaatcccagcactttgggaggccaaggcgggcagatcacctgaggtcaggagtttcagaccagcctggccaacatggtgaaaccccgtctctattaaaacaaaaagccaggcgtggtgcacgtacctgtagtcccatttactcaggaggctgaggcaggagaatcacttgaacatgggaggcagaggttgcagtgagcaaagatcccaccactgcactccagcctgggtgacagagcgagtctgtgtctcacaaaaaagtgtcaagctaagagttgctttcccttcccactgaaacagttgaagcgctgaaaacaggctaggggcagccctgccagtccaggagaactttctgcaatgactagaacgttctatataccgtttacttaaacatcttacaaattcaataaaattagaatcagttcctcagtcctgccacacttcagttgcttagcagccacacatgtatgtggccagtggcaactgttggacaagtcaagtctaga

SEQ ID NO: 28756 - DNA, 4829 bp, Homo Sapiens
atggagggggaccgggtggccgggcggccggtgctgtcgtcgttaccagtgctactgctgctgcagttgctaatgttgcgggccgcggcgctgcacccagacgagctcttcccacacggggagtcgtggtgggaccagctcctgcaggaaggcgacgacgtaaagctcagccgtggtgaagctggcgaatcccctgcacttcttacgaagcccgattcagcaacctctacgtgggcaccaacggcatcatctccactcaggacttccccagggaaacgcagtatgtggactatgatttccccaccgacttcccggccatcgccccttttctggcggacatcgacacgagccacggcagaggccgagtcctgtaccgagaggacacctcccccgcagtgctgggcctggccgcccgctatgtgcgcgctggcttcccgcgctctgcgcgctttttacccccacccacgccttcctggccacctgggagcaggtaggcgcttacgaggaggtcaaacgcgggcgctgccctcgggagagctgaacactttccaggcagttttggcatctgatgggtctgatagctacgccctctttctttatcctgccaacggcctgcagttccttggaacccgccccaaagagtcttacaatgtccagcttcagcttccagctcgggtgggcttctgccgaggggaggctgatgatctgaagtcagaaggaccatatttcagcttgactagcactgaacagtctgtgaaaaatctctatcaactaagcaacctggggatccctggagtgtgggctttccatatcggcagcacttccccgttggacaatgtcaggccagctgcagttggagacctttccgctgcccactcttctgttcccctgggacgttccttcagccatgctacagccctggaaagtgactataatgaggacaatttggattactacgatgtgaatgaggaggaagctgaataccttccgggtgaaccagaggaggcattgaatggccacagcagcattgatgtttccttccaatccaaagtggatacaaagcctttagaggaatcttccaccttggatcctcacaccaaagaaggaacatctctgggagaggtagggggcccagatttaaaaggccaagttgagccctgggatgagagagagaccagaagcccagctccaccagaggtagacagagattcactggctccttcctgggaaaccccaccaccgtaccccgaaaacggaagcatccagccctacccagatggagggccagtgccttcggaaatggatgttcccccagctcatcctgaagaagaaattgttcttcgaagttaccctgcttcaggtcacactacacccttaagtcgagggacgtatgaggtgggactggaagacaacataggttccaacaccgaggtcttcacgtataatgctgccaacaaggaaacctgtgaacacaaccacagacaatgctcccggcatgccttctgcacggactatgccactggcttctgctgccactgccaatccaagttttatggaaatgggaagcactgtctgcctgagggggcacctcaccgagtgaatgggaaagtgagtggccacctccacgtgggccatacacccgtgcacttcactgatgtggacctgcatgcgtatatcgtgggcaatgatggcagagcctacacggccatcagccacatcccacagccagcagcccaggccctcctccccctcacaccaattggaggcctgtttggctggctctttgctttagaaaaacctggctctgagaacggcttcagcctcgcaggtgctgcctttacccatgacatggaagttacattctacccgggagaggagacggttcgtatcactcaaactgctgagggacttgacccagagaactacctgagcattaagaccaacattcaaggccaggtgccttacgtcccagcaaatttcacagcccacatctctccctacaaggagctgtaccactactccgactccactgtgacctctacaagttccagagactactctctgacttttggtgcaatcaaccaaacatggtcctaccgcatccaccagaacatcacttaccaggtgtgcaggcacgcccccagacacccgtccttccccaccacccagcagctgaacgtggaccgggtctttgccttgtataatgatgaagaaagagtgcttagatttgctgtgaccaatcaaattggcccggtcaaagaagattcagaccccactccggtgaatccttgctatgatgggagccacatgtgtgacacaacagcacggtgccatccagggacaggtgtagattacacctgtgagtgcgcatctgggtaccagggagatggacggaactgtgtggatgaaaatgaatgtgcaactggctttcatcgctgtggccccaactctgtatgtatcaacttgcctggaagctacaggtgtgagtgccggagtggttatgagtttgcagatgaccggcatacttgcatcttgatcaccccacctgccaacccctgtgaggatggcagtcatacctgtgctcctgctgggcaggcccggtgtgttcaccatggaggcagcacgttcagctgtgcctgcctgcctggttatgccggcgatgggcaccagtgcactgatgtagatgaatgctcagaaaacagatgtcaccctgcagctacctgctacaatactcctggttccttctcctgccgttgtcaacccggatattatggggatggatttcagtgcatacctgactccacctcaagcctgacaccctgtgaacaacagcagcgccatgcccaggcccagtatgcctaccctggggcccggttccacatcccccaatgcgacgagcagggcaacttcctgcccctacagtgtcatggcagcactggtttctgctggtgcgtggaccctgatggtcatgaagttcctggtacccagactccacctggctccaccccgcctcactgtggaccatcaccagagcccacccagaggcccccgaccatctgtgagcgctggagggaaaacctgctggagcactacggtggcaccccccgagatgaccagtacgtgccccagtgcgatgacctgggccacttcatccccctgcagtgccacggaaagagcgacttctgctggtgtgtggacaaagatggcagagaggtgcagggcacccgctcccagccaggcaccacccctgcgtgtatacccaccgtcgctccacccatggtccggcccacgccccggccagatgtgacccctccatctgtgggcaccttcctgctctatactcagggccagcagattggctacttacccctcaatggcaccaggcttcagaaggatgcagctaagaccctgctgtctctgcatggctccataatcgtgggaattgattacgactgccgggagaggatggtgtactggacagatgttgctggacggacaatcagccgtgccggtctggaactgggagcagagcctgagacgatcgtgaattcaggtctgataagccctgaaggacttgccatagaccacatccgcagaacaatgtactggacggacagtgtcctggataagatagagagcgccctgctggatggctctgagcgcaaggtcctcttctacacagatctggtgaatccccgtgccatcgctgtggatccaatccgaggcaacttgtactggacagactggaatagagaagctcctaaaattgaaacgtcatctttagatggagaaaacagaagaattctgatcaatacagacattggattgcccaatggcttaacctttgaccctttctctaaactgctctgctgggcagatgcaggaaccaaaaaactggagtgtacactacctgatggaactggacggcgtgtcattcaaaacaacctcaagtaccccttcagcatcgtaagctatgcagatcacttctaccacacagactggaggagggatggtgttgtatcagtaaataaacatagtggccagtttactgatgagtatctcccagaacaacgatctcacctctacgggataactgcagtctacccctactgcccaacaggaagaaagtaagtacagtaatgtaaaggaagacttggagtttacaatcagaacctggaccctaaagaacagtgactgcaaaggcaaagaaagtaaaaaaggaattggccattagacgttcctgagcatccaagatgaacattttgtagtgcaaaaagacttttgtgaaaagctgatacctcaatctttactactgtatttttaaaaatgaaggttgttattgcaagtttaaaaaggtaacagaattttaactgttgcttattaaagcaacttcttgtaaacatttatcattaatatttaaaagatcaaattcattcaactaagaattagagtttaagactctaaacctgatttttgccatggattccttctggccaagaaattaaagcacatgtgatcaatataacaatataatcctaaaccttgacagttggagaagccaatgcagaactgatgggaaaggaccaattatttatagtttcccaacaaaagttctaagattttttacctctgcatcagtgcatttctatttatatcaaaaggtgctaaaatgattcaatttgcattttctgatcctgtagtgcctctatagaagtacccacagaaagtaaagtatcacatttataaataccaaagatgtaacaattttaaaattttctagattactccaataaagtgttttaagtttaaaaaaaaaaaaaaaaaaaaaa

SEQ ID NO: 28757 - DNA, 6072 bp, Homo Sapiens
ggtggtcggcggggaggcccccgcgctttaaaataatgcccgcggcgcccgcgcgaccatgcaatggcgagcgctcgtcctggggctggtgctcctccggcttggcctccatggagtattgtggctcgtcttcgggctggggcccagcatgggcttctaccagcgctttccgctcagcttcggcttccagcgtctgaggagccccgacggccccgcgtcgcccacctcggggcccgtgggccggcctgggggggtatccgggccgtcgtggctgcagccgccggggaccggggcagcgcagagcccgcgcaaggctccgcggcgtcctgggccggggatgtgcggcccagccaactggggctacgtgctgggcggccggggccgcggcccggacgagtacgagaagcgctacagcggcgccttccctccgcagctgcgtgcccagatgcgcgacctggcacggggcatgttcgtctttggctacgacaactacatggctcacgccttcccccaggacgagctcaaccccatccactgccgcggccgtgggcccgaccgcggggacccttcaaatctgaacatcaatgatgtactagggaactactcattgactcttgttgatgcattggatacacttgcaataatgggaaattcatccgagttccagaaagcagtcaagttagtgatcaacacagtttcatttgacaaagattccaccgtccaagtctttgaggccacgataagggtcctgggaagcctcctttctgctcacagaataataactgactccaagcagccctttggtgacatgacaattaaggactatgataatgagttgttatacatggcccatgacctggcggtgcggctcctccctgcttttgaaaacaccaagacagggattccatatcctcgggtgaatctaaagacaggagttcctcctgacaccaataatgagacatgcacagcgggagccggttccctcctggtggaatttgggattctgagtcgactcctgggggactccacatttgagtgggtggccagacgagcagtgaaagccctttggaacctccggagcaatgatacaggattactaggcaatgtcgtgaacattcagacgggccactgggttggaaagcagagtggcctgggtgccgggctggactccttctatgaatacctcttgaaatcttacattctctttggagaaaaagaagacctagaaatgtttaatgctgcatatcagagtattcagaactacttaagaagagggcgggaagcctgcaatgaaggagaaggagaccctccactctatgtcaacgtgaacatgttcagtgggcagctgatgaacacctggattgactctctgcaggcctttttccctggactgcaggtgctgataggagatgtggaagatgccatctgccttcatgccttctactatgccatatggaaacgatatggtgccctccctgagagatataactggcagctgcaggcccctgacgttctcttctacccactgagaccagagttagtggaatccacatatctcctctaccaggcaaccaagaatcccttctacctccatgtaggaatggatattctgcagagtctggaaaagtacacaaaagtcaagtgtgggtacgccacgctgcatcacgtcattgacaagtccacagaagaccggatggagagcttctttctcagtgagacctgtaaatatttgtatctgctgtttgatgaagacaatccagtacacaagtctggaaccagatacatgttcacaacagagggacacattgtatctgtggatgagcatcttcgggaattgccatggaaggaattcttctctgaagagggagggcaggaccaagggggaaagtctgtgcacaggccgaaacctcatgagttaaaagtcatcaactccagctccaactgcaatcgtgtacctgatgagaggaggtactccctgcccttaaagagcatctacatgcgacagattgaccagatggttggtttgatttgatctgctctctgtgaggcctcatcttgaaccagaccttaacgaccaaacccagaccatgccaaagtccagtctgaaatgaaaggggacagaagtcttgctgtccatggtggtgtaggaatttctgtgcaacacctcaccacgtctggttaatccttgcacacttcagtgtttctctcctgttcaataaaatgccctgttaaggatataatttgaagtgagaagatacatggaaattgccctcttatgacatgttgatgttataagcacaatagatggggcatctttggattgatgttcacagctttatacttcagaacctaagtctcttcactttgctggcacctgctatactggagtattgctatgtctttaaaaaatttttttttattatattttatttttttgagacagggtcttgatatttttttgggacagggttacctgggctcaagtgatccttctgcctcagcctcccgagtagctgggattacaggtgagcaccactgtacctggctagctacttctttgttagaggattgagaatgaaatttctgcaaaagggcccatggttcatttggtatccctatttaattgcattgaaaatgtcatcctttctgttgttagataattggggtcttcccctgatatccaaccgtgattttggatcacatgggagaaaaagtcatccagtttttcatgtttgcctcaagtaatctttacagtgttacaaattatttgcttaagaagaatggtcttaaccagaattcttaacagatagtctcttaggttattatgttatggtctaagaggttaactgacatcttttggatggtattttgcattttgaatatgaacttacctgaggaactcccatagttccagaatcaggtgccttttagggagagaacaatacctaagattgtctgagcttccatctttctcatatttcctaagcaaggattctcacttatgaccatatttgggttagagttctgttttgtttctgttttctgtgtctagtgccaattagctaaatcagggagaaagaaatgatcacatgacttttagcatccttgagccatttctctgtgtaatacaggctttagattagtgccttatattggttttggtttggggcactggatgtcgcagctactgctatggtttcaggaggcctgtttagccacatggtgagaccgtggtgaaagggggatggaaattgcttggccagtctttgcctttcatcctgtaaaagtaagcatgtagaaggaggaagttgtgctaaaatgcctttgtttttttgttattattttcttagccagaacatctctctttgaactcacactgatacacacctgctactcttacacagtgcagcagggctgactcttagtctggcttccatgaagcgtcatgggtggaaacgcattctagtaaaaaaggtaggaaatccctaaaacttccagcctcacatagcacggttctcacctgtcactgttttcccacctctaaggatttcatgtacatcttttcaaagctagaaataagcactgtctaagtttatgttgcatttttagtcaaaagggagaaatcttattccttcttgaaaattttaagtgttatggttttatatagttcagttctttgagatttttgaaaagagtattttcagtaataaacgtgccatctctatctcttaaacatttattacaacaattgttttaaaatagaaaaaataaaatgcttctattttaccttttttcatttcagaagcattattctgtttattaacagtgtcccatctactgaatagaaaactttgagaataatatatatatatattttaaatgttttcactgactcattgaaaatgttaattacacacacatgcatgcatgcacacacgagcatacttgtacctttgtctctgggcaaacaggtgggactgttagtgacccatttgggaaaatagagcatctcagagaaggaggtgagttcttcctgcctgtgatttctcttggcgctcccctcctctcccgctctggcttctgtggcggcagtggtgggtaagcactccagtgttctcttaatgaggcactttgcctgtcactcgagcaagcctgggtgttccttcctcctcatgctcctggaatagggaatagggatctcatgcttgcaaactacacaatgctgcaggtgcttcccaggggccacaggctgtcaggaaacgtgttttatgttaagtcacaaacccacttgacttctgggtactggaattaataccagtgggtgagactgagggtgagtgagttagtacatattaatcctggttgttgagcttccagactaccccgtccaaagtttgatgctatgtagtcagtggtttgtggggctggatgccagaaggttctttgagccagtttcaaaggttacttgtttttttttttttttttttaagtcagaatgttaacagctgtgatatatcctgcagggcttttgcagtttcttctgttctgtgttctgaaatcctgggtagagaatggctgaggaggagattaccagagaagttgctttgctcagtgctttgccccaggattgcctcaaatctgagtggacttcatcctttgcggcggctctgagcctggcccatcttcctattcccacgtgtagctagtgtctagtgtcagctttgctcaatgtggtggaaacattttgcagaactgttgtagaaagctgccttatagttggcttgacaaagcataattctctcataacaaactttcaaatcattacagtagcttagctactttagttgatgtgaccgaggaatcccttctagaatcataggtggcaagggagggtttgctagctctccatttgcactggccattgtgaaaaaccagcttctgtattcaaatctttccttcatttttttaaattttttttttggcagcgcttgtgctggaacttactcattgtaactgaatcctcagggcttttcttgttttagatcatggactgtgcacgtgacacttaaataattttctatgtatttaaagaaaaatgcaccaggatggtgtctgtgcacgtgactattagaggagcgtctgtagaagtacctggtttggtcagtgcagttgtgcaatctgagggccttgtttcctcctcccctttccccttctccccaccaaaggaaaatatccctcttaatgatttcgtagttcagtttactgaatgattaccacctgtaattcctctttggattgtgtagactcaacatgagacattcctttctgctttctggagggcaccaggggcctttctctttgataaattttttttgtctgttgacaaaaacaaaaatcttttttcaaatgtagtgctggtgaaaaggtagggctgagtgattaccttagccacagggtggctgagcaggaactttagaagaaaatcctgagctttcctgtccattcccagcatccagctcctattctagtgcctcttccctgcagggcagggaccccttgggaaatcgaggaggtgggacgggctgggccctgtgtcccaggtttcacagggctcagggttatgctcccgcttgaatctggacgtgaatctggtaaaaatatcaagtacctgtggaactccctgattctataccctcttccttctttctgcaaggcagaggaataatatttttaaaggttattttgttttagttttaaatagcaaaacacaagctgcatttttatttattttgcataagaaaggtaaatctttttacaaaaaaaagtatagagttggaaactctgggaaaacttacggaaatacacaaatgcttctctgtaatgtgcaatatgctttgcaactgtagatgatattttatgtttaatctgtaaataagaaatgtatttaaattaaaagggatctttttgtaaaaggaccaaatgttcttttataaatgtaataaggaatatcttgctctttaaaatttattaggatttttatgagtaatttttattaaaagatttctttttttg

SEQ ID NO: 28758 - DNA, 5640 bp, Homo Sapiens
agcatcctgaggttagcattacacttctcccagtggagcccatgacttctgatcaggacgctaaggttgtggctgaaccgcagacgcagagagtccaggagggcaaggacagcgctcatctgatgaatggtcctatatctcaaaccacttctcagacaagttccatcccacctttgagtcaggtaccagcaactaaggtttcagagctgaaccctaatgcagaagtgtggggggctcctgtgttacatctggaagcaagcagtgctgctgacggtgtgagtgctgcatgggaggaggtggctggccaccacgcagaccgtggcccgcagggatcggatgccaatggtgatggtgaccagggccatgagaatgccgcattgccagacccgcaggagtcggacccagcagacatgaacgctctcgctctgggtccctcagaatatgactctctgcctgaaaatagcgagacaggaggaaatgagtctcaaccagacagccaggaagacccccgagaagtacttaaaaaaacattggaattctgcttatctagggagaaccttgctagtgacatgtatcttatatcacagatggatagtgaccagtatgtgccaatcacaacggtggctaacctcgaccacatcaagaagctcagcactgatgtggacttgattgtggaagtgctaagatctttacctttagtccaagtggatgaaaagggagaaaaagtaaggccaaatcaaaatcgctgcatagtaatattgcgtgaaatatctgaatctacccccgtggaagaagtagaagcactatttaaaggagataatttaccaaaatttataaactgtgaatttgcatataatgataattggtttattacatttgaaacagaagctgatgcacaacaggcttacaaataccttcgagaagaagtcaaaacttttcaaggaaaaccaattaaggcacggataaaagcaaaggcaatagctataaacacatttttgccaaagaatggatttagacccctggacgtgagcctgtatgcccagcagcgctacgcgacgtcgttctacttccctcccatgtacagcccccagcagcagttccccctgtacagcctgatcactccccagacgtggtcagcaacgcacagctatcttgacccacccttggtaactccatttccaaatactggatttataaatgggtttacgtctccagcgttcaagcctgcggcgtctcctctgacttctctcagacagtatcctcctcgaagcaggaatcctagtaaatctcatctgcggcatgcgattcctagtgcagagaggggacctgggttattagaaagtccttcaatatttaacttcactgcagatcgattaattaatggtgtccggagtccacaaacaaggcaagcaggtcaaactagaacacggattcaaaacccttcagcatatgccaagagagaggctgggcctgggcgtgtggagccaggcagtctcgaatcctctcctggtttagggaggggaaggaagaattcctttggctaccggaagaaaagggaggagaagtttacaagcagccagacacagtctccaacgccaccaaagcctccgtcgccaagcttcgagctggggctgtccagcttccctccattacctggagctgccggcaatttgaagacagaggacttgtttgaaaacaggctatctagcttgataataggaccatccaaagaaaggaccctcagtgcagacgcaagcgtgaacacccttcctgtagtggtctccagagagccctcggtgccggcttcttgtgctgtatcagcaacgtacgagcgatccccctccccagctcatttacccgatgatcccaaggtggcggagaaacagagggaaacccacagtgtggacagacttccttccgccctcactgcgaccgcgtgtaaatcggtgcaggtgaacggagccgccacggaattgcgaaagcccagctacgcagagatttgtcagagaacgagtaaagagcctccttcttccccattgcaaccccaaaaagaacaaaagccaaacactgttggttgtgggaaggaggaaaagaagctggcagagcccgcagagagataccgggagcccccagccctcaagtccacacctggagcccccagagaccagaggcggccggcggggggccggccctcgccctcggccatggggaagcgtctcagccgagagcagagcactccccccaagtctcctcagtgaaaaccgtacgtctgggaggggtcgcagagcgctgtgttaaccacaaacgagacactctcccactcagtgcgagggcgagccgctggttaggagcttgcagtgtctgaggcctgtgggatcctcaagttggttttcttctgtgagttggattctccccctcttgaaaaaaaatcgatttttcaggatttaattaatacaaaccttattttaggttggtgcttaactggaggtgatgcataagtctgatttttttttccaagatagaaaaagcatttatcctaacaaattggtattttttattaagcctccatgtggctctgaatgcaagctatatatagtgagtttttctaaattaagggaactctgctttttttttttttttttaagtaactggtctgtaagtgcatatctctagaacgtccccgcagatgaatgagggccagtggccttggcagaggcaggtgtggcctcgtagaggcagtgctggccgcgccagggcatcagtgctgatgtgggagctgtgcttccacctaagccgttggtaggggactgtggcatttaagaatgtagagagcgcatcctttttgatctcctgggcggagtgaacctgcaggggccaccccagaaaccttggttctgatgcactgcaagcaagtaaccagcttctcactccagtttcaagtggctattatgtaatataaattcaaagcacattgtgaatagaacctacatgaaaacatacactttgttgcccactgacatgttaccagaagttgtaccatgatgttgttttgacccctgtgagctgatggccccggccctgctctgtgcacatttctgtccgtgttccccagcactctggttggagagagtccacatcttcagctccgtgtggacatctccctgtacctctgcatcagcacatggatttaagagttatgtaatcgtgagagaatggtgtttgtggtttttccccctctttggctggtggaggataaagttcctgctcttttacctccaagacgagggcctcattgattcacttccagaagtgctgcacttctgaagaacaaggatgcactaaagttagcaagtttataataaagttaaatataaattattttgttttaaaatgcctcaaatttttctttattctaagcagcaaacattaaaataagaatatttcctgctaaatgtaaccatacactttattccacaaaatgttatttaacaagactgagggttttttttaagaaaaaattatttccatccaatatttaaagacttgaattttatttaaacttgaaaatgactttgccttaacttttgtataagacagcttagagtccatggagcccggccctgggttggcgtgagtgggtcagagttactcagttactgcgtggatctcctgtcgctagttttactgagtaagcatactgtagtacaagagctagtagtagtttttgtaatataccttaaagatcttcaacagttgatcttttttcagaatgttggaaaatcctgtaaatgcaaatagtcaatactgtattaaatacgtgcacttggagtgtgcttcgcttgtacagttgtaaataatcagaacatatgaaaaaggtaccctacagagaaaattctgatacagattattgatatattataaatgttgctgttgagcgggatgtagataaactaaatgttgtggtttgaatattattttgatttgttgagattttcttttttctcttacatcggtgtgttgaactgattctgcctctttgctgcaaaagggaattggaaagtcttattaaaagcctccagatgttttcatactcttttaaaatgtatgtaaatgcatactaatcatatctaatgtgaaagagttttaaagtatatagagagcaaaaactggcaggatcgtaagtgaaggtgactagtaatctaatttaaatcacctgcagctaagcatgattgaccctgccagaggaaaacatgcctatttgaccatttcctttaaagcagttgccattattcaaatacagagaaatagccacagggctagtgtttttcaaatgcattttaaagaacatggggatttttttttgtagttgtcagttcactgaccaaaaaaaaaaaaaaaatcagaaataattgatctgtgaaacccaaactctcaatactcagaaagctgggaggcaacctcgaggcctgggcctacgagctgcatcttcgctacggaagggccagggcgccatcagccattcccaaaacacaaggcctgcccgtccgccagtgagtccttggtttttaataatgagaagtcctttcccccaaggtgtgagcattgcagcgcagtgtgtgtgtgtggttagagccagcttagtccttcactttgtcgaccgaagtgggagctcaacagctgcatgaggagggcagcgcgtgcattagccagtcgccactggagggctctgctgccctccggtcaatacactgtagttactgcctagccagcagcagtcttctgcatcaagaactgaaaccttgctcggaggtgatttttatagcatcctttttaattaaaggtgaaatacagattgctatataatgtctgaaaaaacctgatactacttcaagagtttctgctcagaagaaaatgagagttatcataataggaagctgtggcggtccatgccaactgtgctgtgtcacatacagcgatgagagtggctttcatactttttttttttttaagttaacaccctcctttacccccagcagtatctcaggttatagaatcagagatgcagcagtgacaaatggcattttaacttgtaaaatcgtgtgatgatgcttatcattttgaaatagaagaataaaaacctggtcccgtttcaccagacatgaatttcaagtggagtcgtcgttctctgagagtgagtgtcttgacattttcacccaggccctcctgtcatcacatcaccggctgtcactggcgggtggccgtaaacgtcctgcgttgctatattaggatctctgcagttcaggcttcaaaaccagttcagtgtatccgggcgacgggtagtggtggtgcatgcctgtctgtgtgccccgctggcgagctgtagttgcggcttgcgtgcctcgcggcccactacagggctgcagacaatcgaggcgagggcgctggccgccagcagctcacagcgcgggggtcatgtggtcgctcctcgagggtttcgtttttgttctgcttcattaagactggaatcaagcttacatgtaaactattggtaatttaagtttccttttgtgtcattcagtgtaaaactgtctaatttgaaaaaaaatgtaggttatgaaaataaagatttaggcactgttc

SEQ ID NO: 28759 - DNA, 7840 bp, Homo Sapiens
cgcaggccagggccgcccggcgctcggcagccgcccgcagcccctcggagccagaggagaggcgcccccgccggccgccgcgccgcccggcagcctcggcaggtagtgtacactgataaaggtagggcgcggtggactctgcccctgtaaccgttccggagaatgcgttgagaatgaagacaaccagttctgccggagacttccatttggcctcaatgtgaaattaaagtagaaaatcacatctacatgcatgttgctatcaggatgttgattcattagtcatgcctgaagagggaaagtctgttttaggtggctgactaccagcaaaaataaatgcttatcctacatgtcaagcatctctactttttactggagtgaaaatcccctccagataccaacagaatatcaactgcagaaaatgcttcacattttaaggatgtcggcaacctaaattcatgtaccctatctgtacagttgttgtggatggtttgccatctgaaagctcctcaagttcttatccaggccctgtgtctgtttctgaaatgtctctgcttcatgctttgggtccagtgcagacctggctgggacaagagctcgagaaatgtggcattgatgccatgatttacactcggtatgtcctcagtcttctgctgcatgacagctatgactacgacctgcaggaacaggagaatgacatcttcctgggctgggaaaaaggagcttataagaaatggggaaagagtaagaaaaaatgttcagatctaactctagaagaaatgaaaaaacaggctgctgtccagtgtcttcgatctgcttctgatgaaagctctggtatcgagactttagtggaggagctctgctccagactgaaagaccttcagagtaagcaagaagagaagattcacaaaaagttagaggggtctccctctccagaggcagaattatcccctccagcaaaggatcaagtggaaatgtactatgaagcatttccaccactttctgagaaaccagtttgcctgcaagaaatcatgactgtgtggaacaagtctaaagtctgttcttactctagctcttcttcatcatccacagccccaccagctagcacagatacttcctctcctaaggactgcaacagtgaaagtgaagtcaccaaggaaagaagcagtgaagtacccaccactgtgcatgagaaaacccagagcaaaagcaaaaacgagaaggaaaacaaatttagtaatggcacaattgaagaaaagcctgctttgtacaaaaagcaaatccgacataaacctgaaggaaagattcgccctcgctcgtggtcttctggctccagtgaagcaggctcaagttccagtgggaatcagggagaattaaaagcatccatgaagtatgttaaagtaagacacaaggcacgagagattcgaaacaaaaaagggcggaatgggcaaagcaggctttctttgaagcacggtgaaaaggctgaaaggaacattcatactggaagtagtagcagtagcagcagtggttctgtcaaacagctgtgcaagcggggtaagagacctttaaaagaaatagggagaaaagatcctgggagcactgaaggaaaagacctgtacatggagaatagaaaggacacagagtataaagaggagcccttgtggtacaccgagccaattgctgaatattttgttcctctgagcagaaaaagtaaactagagaccacataccgaaacagacaggatacaagtgatctgacatcagaggcagtggaagaattgtctgaatcagtgcatggtctttgtatcagcaacaataatcttcataaaacatacctcgcagcaggtactttcattgatggtcattttgtagaaatgcctgcagttataaatgaggatattgacctcactgggacctcattatgttctctaccagaggacaataaatacctggatgatattcatctatcagaattaacgcacttctatgaagtggatattgatcaatccatgttggatcctggtgcctcagaaacaatgcaaggagaaagtcggattttgaaaatgattcgacagaaaagcaaagagaacacagattttgaggcagaatgttgcatagtgttagatggtatggagttgcaaggggaacgtgcaatatggacagattctaccagctccgtaggtgctgagggcttattcctgcaggaccttggcaatctggctcagttttgggagtgctgttcatccagctccggtgatgctgatggggagagttttggaggagactctccagttagactctctcccatcttagacagcacagtgctcaattcacacctgcttgctggcaatcaagagctcttttcagatattaatgaaggatctggtataaactcttgtttttcagtgtttgaagtgcaatgcagtaattctgttttaccattttcttttgaaacactcaacttgggaaatgaaaatacagattctagtgctaatatgcttgggaaaacacagtctagattgctaatatggaccaaaaatagtgcctttgaagaaaatgaacactgttctaatctttcaacaagaacttgtagtccatggtcccattcagaagaaacacgttcagacaatgaaacattaaatattcagtttgaagaatccacacagtttaatgccgaagatattaattatgtagttcctagagtctcgtcaaattatgtagatgaagaacttctagattttttgcaagatgaaacttgccagcaaaacagtagaactttaggtgagattcctacattagttttcaaaaaaacatctaaactagaatccgtctgtggtattcagctagaacaaaaaacagaaaacaaaaattttgaaactacacaagtatgtaatgaaagtccacatggagatggctacagctcaggggttattaaagacatttggacaaagatggcagacacaaattctgtggctacagtagaaatagaaagaactgatgctgagttgttttcggcagatgtaaataactactgctgctgtctagatgctgaagctgaactggagacccttcaggagcctgataaggctgtgcggaggtcagagtaccatctgtgggagggacagaaagagagcctggagaaaagagcatttgcttctagtgagctatcaaacgtggatggtggtgattatacaacaccctctaaaccctgggatgtagcccaagataaagaaaacacattcattcttggaggagtttatggagaactcaaaaccttcaatagtgatggggagtgggcagtcgtaccacctagtcacacaaaaggaagtctgttacagtgtgcagcttctgatgttgtgacgatagctggtacagatgtctttatgaccccaggaaacagttttgctcctgggcacaggcagttatggaaacccttcgtgtcatttgaacagaatgatcagccgaagagtggggaaaatgggttaaataagggattttcttttatcttccatgaagacttactaggagcttgtggcaactttcaagtcgaagatcctggacttgaatactcattttcttcctttgacttaagcaatccattttcacaagttcttcatgtagaatgctcatttgaacctgaagggattgcatctttcagccccagttttaaaccgaaatcaatcctctgttctgattcagacagtgaagtgtttcaccccaggatatgtggtgttgacagaacacaatacagggctattcggatctctcctcggactcactttcgcccaatttctgcatccgaactgtccccaggaggaggaagcgagtcagaatttgaatctgagaaagatgaagcaaatattcccattccttctcaagttgatatatttgaagatccgcaggcagatctcaaacctttggaagaagatgcagagaaagaaggccattactatggaaaatcagagcttgagtctggaaaattccttcccaggttaaaaaaatctgggatggaaaagagtgctcagacatcactggattcccaggaggaatcaactgggattctttcagtaggaaagcaaaatcagtgtttggaatgtagcatgaatgaatccctggaaatagatttagaaagctcagaagcaaattgtaaaataatggcacaatgcgaggaagaaattaataatttttgtggttgcaaagcaggttgtcagtttcctgcttatgaagataatccagtttcttcgggacagctggaagagttccctgtattgaacactgatatacaaggaatgaatagaagtcaagaaaaacagacctggtgggaaaaagccttgtactctcctctttttcctgcatcagagtgtgaagaatgttacacaaatgccaagggagagagtggtttagaagaatatccagatgctaaagagacacccagtaatgaagagcgcctgttagattttaatagggtgtcttctgtttatgaagcaagatgtacaggagagagagattctggagcaaagtcagatggcttccgcggaaagatgtgctccagcgccagctccacctcggaagagacaggctcagaaggcggaggcgagtgggtgggccctagtgaagaggagctcttttctcgaactcatctctaaacctgcaaaatagtacaaattattgtttaaaaatgatatgtgatggaaaattactcttcagtgagacctgttaatctaaaacaacaacttaggtttcctcttcaattaactgattcagattggtaataattatctttctcttcttgcttattttagagttgaggacagctatcctgttaaagattttttttcccagctgttaaattcttggctatttgaaatagactagattgtgttgtcaaatcaagaatgggtgtgcatgtgcttgtcttagaagtatcactgctttttgcatcttaactgcagttaattttccttccgactgcggttatatcactatgaccttactagcattgcagtgtcaacaaccacttctgctcttcagagacttcagctttggagcatttaggctttgttctccaagaactgggatatccattcttaccctacagtggcttgatgcctttctgaaggcgagagggaagcctgggtgactcagcggtggtctccattcagcaaaatctcatgtacatttccagtaggaaccgcagaggtgtgcttttcaagactcaccaaatactgtgttttctctcttaggatttcttttcccctaaagtatcacggaagatactatggttcgtgactttcttgctaactgaagaagccaaggatttggggtgtggggtcgtatgcgagacacagtggggtaagggtgcataccccaccccttacctgctctcatactgcagttacatttacaccaaaaccccatgcagggttctttgtggtgagtgttccatacgtgctaaggaccttagttgcagattgttactttctggtgacctatgttgaattgaaacccccaaaacttgaaattgtgaacatttgacatgcagtaaaggccacctcatcacccagagaaatctttggctgctgcagctagccgcttcttggctgtgatgtagtatagcttcgatctcattttgtgtttgagagaatgttctgggcaagttctgtgtgtggtgggttggggcgggtagagtcatgagttttccacatccctgtgtggtggttttgctgactgtcgctccgtgggactggctcccgtttctccttggtgagcccggggagccggcgcatcttgtgagtcgcgtctgtgcatggcgatccgctcctccggctctcatggcattgtgccacaggcagaggccaggaggagcagtatgtgcacagccgaaacattttacattttttacattgtttttcttttttaaccaactcattgtttaaaaaacaaaaacaaaaaaaacctaatctgtgaaatcagcgtagcatgcctggagcatcaggaatggcagaaaagtctgatgcgctctagacagcttcaccactcatttgggcaggcagtaaacacacatataatttattagctgggagctgaactggctgtgaaatctatgatttgctttgaacatttgggttttgttgcctttttcttaattgataacacagaaaagaaagtaccatcaaagactgtggagtcattgagggtctgtgtgtcctcaccgagagggacctggtgtgcccgccgggtcgatcttcccacgtgttagggtttatttttatacaacacatcttttgacactttaaggtgggtgggtgtgggtgtgtgtgtgtgtgtgcgcgcgtgcgcgcgcgcatgtgtaaggttttatgttgctgttatttatttacgaacttcagatacgtttttatgtatttttcattcttctggagcttcctaaaaattgataagcatctgcactgaaatataatttaacagcaaaagtaaaaaaggattgaaagttgtaaattcctcatatcactacagtgacgattattctagaaatcgttgcttgtgtagcaaagaccaaataaatagatttcagacacaaccttgagcacagttgattttggacagctgctgtttattaggaaagggctccaggtggcaaaggtgcacacttcctcagacacaggtgagaagatgcagcaccttccacaggtgaatgggacggattcgaagtgagcaaagggattcacaaattatgtatttatttgttttcatagttaagtagctgaagctcagaggctttcagcaacagagatgaaagtgtggctttttagttttgtgaatggatgatcacaaagaaaaagcatttttaaaaagttggcaaacgctgaaacgcactgtggtatgaagcgcattgcatttccatagcactgaagtaccagtttccattcctgggctgagattgtttttcccgtggttgtattgttctgatttcacgtacaccagagtaactgatttttttttgtttgttttcttgtggagttaacaccaaataaaaattgtaaaaaacagtttgttgtttttatttctcatagcaaagcttcttttgtaaagaactccagcttccttttactcatgagcatccgtggaagagcaagtgcccaggttacatttgttctagatggaggtcatttagctctcattgcagacactgctgaaaacattgtgcagctttgctagggaagaaagtggtgtggcctgctgagaaatcagcggctcctccccatctcacccccagcacacgcagggactactacctgagtctgcaaaacacatagcatttttgtccgtggatggtacacaaagctcaatctttttgttttcttctggggaaaaaattaaatctttatatgttaatatgattgatattcattgtgcaaaaaaaatcagtgtgtttttaaagaagtataagggaaaaggaaaactcatatgtccttctgtcactctgagacatacactggtaacatctgtgcaagcccctttccaggattctgaatgtacagtatatatgaatgcatacacagagaaatttacattcaagagtgtactatacttgttcttctataacatcagaaataggtttttactcagatgtcttcatgtcggtaattatagaactacataattatttttatagctgtattatgtagatttaacaggttcctcattgataaaacaatgtttttttggttgtttattcagtatctgaataacgtttctatggacatctgtaaacatgtatgaggggacttttaaaagttcatggaaaatggaattaaaagaaaaataaaaaaatataaacttt

SEQ ID NO: 28760 - DNA, 36465 bp, Homo Sapiens
gatctcgaactcctaacctcaagtgattcgcccacctcggcctcccaaagtgctgagattacaggcctgagccacactgcgcccagccatattttgcaatattctgtacctcatccactctccacccaccagccttagcctccctaggtctgtaaccctcctgcttgaatcagcttatcagaatgatacttaccaagtggtgctttctctattttcatcacccctctccattcatgggttggcactgtcctgtaaggaagagccttcccttctcttcagtcagcacagaatcatggacgcctatattatgcagtagtttgtagtctctctctcttttttttttgttttttgagacagagtcttgctctattgcaacctctatctcctggggtctggtgattttcgtgcctcagcctcctgagtaactgggactacaagcacatgccaccacacccgtctaattttttaaaaagtatttcttgtagagacaggatatccctatgttgcccaggctggtcttgaactcctggctcaagcgatcctcctgtcttggcctcccaaagtactgggagcacaggtgtgggccactgcacctggccatctggtcatttttatttggatgctccgattgtcccagacttggccaatgggagccccttcaggctggctcccacatctttatatacacacgtatgaagagcccacactgacatctccagtgcctcggggctcttttcagcctttcctctttccatatttgtaattctcatctccagcagtgagaaacctggctcccattatcctcaatgtatttgcttgattttttatccacaccagctgcctcctcagcttccagccacgttgccatctccaaggaaagggaagagggaggaagagaggagagaaatgtggaggaagagggtctttttttttttgagacagtgtcttgctctctcacccaggctgaagtgcagtggcacaatcttggctcactgcaacctccgcctcctgggttcaagcaatctccctgcctcagcctccgtagtagctgggattacaggtggctgccaccatgccagttaatttttttgagacgtagtctcactctgttccccaggctggagtgcagtggtgcgatctcggctcactgcaagctccacctcccaggttcacgccattctcctgcctcagcctcccaagtagctgggactacaggcgcccgccaccatgcccggctgattttttgtattttgggtagagacaggtttcatcatgttagccaggatggtctcgatctcctgacctcgtgatctgcccgcctcggcctcccaaagtgctgggattacaggcgtgagccaccgcgcctggccactaatttttgtattttttagtagagacagggttttaccatgttggccaggctggtcttgaactcctgatctcaggtgatccgcccacctcggccttccaaagtgctgggattacaggtttgagccacggtgctgggcaaggagggtcttaaacacttagcaacgcagccctccactctgtccgcacttattctgccctgactgctgctcatctggcctctctgtggcaattagccttcagcctcttcctcagctcattgtctccatctggtttccaagaaggtttcttttctttctactttacaatttttttttaactacaaaaacatttcatgctcatttttacaaattcagtaatgcacataaagcacataaagtaaggcacacaaagcacagcatgaacgccctcagccaccctctccatgccacctccaagagccaaccagacttcttccctgtttacccaagaatgcccctattgtttgtacctaggatttggaggctgcactgagctgagtgggtcactgcactccagcctgggaaacagagagagagcctgtctcaaaaaaaaaaaaaaaaaaaaaaaaaaagaatatgcataaatgcttactttatttatttatttattgagacagggcctcgctctgtcgcccaggctgaaatgcagtggtgcgatttcggctcacttcaacctccgcctcccaggttcaagtatttctcccacctcagcctccccagtggctgggactacaggcgttcgccaccatgtccagctaatttttctattttttggtagagatggggtttcaccatgttggccaggctggtctcaaactcctgacctcagatgatccacctgctattatataatcaccacctgggattataggcatgagcttccacaaccggccctgaaatacttatataatgctttttgttttgttttgagtcacggtcttgtaaacatagtttactgcagcctcagcctcctgggctcacatgatcctcctgccttggcctcccaaagtgctgagattatgggtggtgagccaccacatccggccttatccatgtgattttcaagggacattgtccaggaggcagctggagatgtggtcctcgcccaccgaacatcactggggctggcaagccctggctcttgctttatgagggtcactcagcagcacagttgaagtatcaagtatctcagcaatgcctgtgttagggcattggtgagttagggaaaaggggaaggaacattgcaatttctaatcatttgtcatgttcgtgtccctgagcttatcacacacaggtctcagatactcaaccttgaaatacaatgtgtcgtgcaaattgtatcttagttaaaaaaaaaaaaaaaaaaagaaaaaaagtggggaagaatatgtggaccatctcagccagagctctagcttggtgggatttaccttttcttcctgtgacccctcccaccaggcagctctgtggtccattggtggagatttgttgggggtcaccctgccttgttgagaaagacaagacctggggctcagagagaggtgtggccccccaaggttgggcctgtgcaatgcacctgagaacttcagaggttaagtgtgaggactaaactctgattttttatcttgcccaaattcctatctaaggggtctggggagccaagccctacaaaccataaattctcttcagaggggttttatttaaccctattgtatcatgacttatttccagcctgactctggcataggattatgagacaaggaagaaaataaaaatattttaccccaaaacatgtttctttgccatattttgaaatggccctgcaaagctgttctttgtggtagaaaatttgtctctgtaaagaatctctgtccggcgtggtggctcacacctgtaatcccagcactttgggaggccgaggcgagtggatcacctgaggtcaggagttccagacctgcctgaccaacatggtgaaaccccatctctactaaaaatacaaaaattagacaggcatggtgctgcatgcctgtaatcccagctacttgggaggctgaggcaggagaatcgcttgaacccaggaggcagaggttgcagtgagccgagatcacgccactgcactccaacctggggaacaagagcgaaattctgtctcaaaaacaaacaaacaaacaacaacaacaaaaaactctattaatatagctagatctttttcttctataccctcccaatcctaaagagattaactaagaactaagatctgaagctgggcgtggtggctcacgcctgtaatcccagcactttgggaggctgaggcgggtggatcacctgaggtcaggagtttcagaccagcctggccaacatggtgaaaccctgtctctacttaaaatacaaaaaaattagccgggtgtggtggtacacacctgtaatcccagctactcgggaggctgaggcaggagaatcgcttgaacaggggaggcagaggttgcagtgagccgagatcgtgccactgcactccagcctgggggacaacagtgagacttcgtctcgaaaaataaataaataaataaataaagagattaactaagatctgaataggaaatatttgtcatttattgtctctaagggcagccactataagtcttcaaaagaactttggtctccacgatctttatcttaaccagaaccttccctttctatgaatcccaggtttttagacaaactcaaccaattgtcaaccagaaatttttttaattcacctattgcctggaagtgcccccccacctttgagttgtcccacctttctggaccaaaccaatgtatttcttaaatgtatttgattgatgtctcatgcctctctaaaatagataagaccaagctgcgccccgacaccttgggcgcatgttctcagaacctcctgagggctgtgtcacgggccaagttcactaatatttggctcacaataaatctcttcaaatattctgcagagttcaactcttttcatcgacaagtcaaaagaacagccaccacgtctgcatctattcgatgtcagcatccccacctgcagatgaggggaaggtcccttgcccaaggttgccaaagttggcagtgctgagctttgagccaggtctttcctttctacccctctgcctgccctgccttccacatgggagcttcctccccatcctgcctttgttgatgctgacagatcaacttggtgaattacatccttcattcaatagacacaacagagtcatgtagacatcatctctgggacccagccctgtgctaaagataccaaagatgatgagaacatggcccctgacctgaagaggttataatccaatggtaaacaggtacataaagaaataaaaaaaacaaggccaaggcaggaggatcgccttgggtaactgtccaaggggttcaccttgcccactgcctagacagagccgattcatcaagacaggggaattgcaatagagaaagggtaattcatgcagggctggctgtgcaggagactggagttttattataactcaaatcagcctccctgagcattcggggagcagagtttttaaggataacttggtgggtgggtggaagccagtgagcccggagcgctgattggtcagagatgaaatcatagggagttgaagctgtcttgcactgagtcagttcctgggtggggtccccaagatcagatgagccagtttattgatctgggtggtactagctaattcatcaaatgcacggtctgcaaaatatctcaagcactgattttgggagcagtttagggagagtcagaatcttgcaacctcagctgcatgactcctaaaccataatttctaatctgtggctaatgtgagtcctacaaaggcaatctagtccccaggcaagaaggaggtctgctttgggaaagggctgttactgtctttaccatctttttttaaattataaaccataaactaagtttctcccaaagttagttcagcctacacccaggaatgatcaaggacagcttggaggttagaagcaaggtggagtcgattaagttagatctatctcactgtctcagtcataattttgtaaaggcgatttcatcaggaattcgagaccagcctgggcaacatggcaaaaaatatttatttaaaaaaaagtatttttttaatagatctatttttttttaaaaaagatatattttttaaaagtatctattaaaaaaatacaaaaaattagctgggtgtggtgatgtgtgcctgtactctcagctacctgggaggttgaggtgggaggatcacctaagcccagaaggtcgaggctgcagtgaaccatgatcgaaccactgcactccagcctgggtgacagataatttaagattaagtttgagactctgtctcataaaaagatgaagaaggaaatagagagagaaagagaaagaaagaaaacggcatatctctgttgttcagatgagaaaaatgaggccccaggaggaaggtgacccacccatacccatgtggttttttaggggcaagaacagacctagagacaactctgtcctctggtcttaaaagataagtcagggccaggcatgatggctcacacctgtaatcccagcacttcgggaggctgaggcgagcggatcaccaggtcaggagatcaagaccaccctggctaacacagtgaaaccctgtctctactaaaaatacaaaaaattagccgggcgtggtggcatgtgcctataatcctagctacttgggaggctgaggcaggagaatggcatgaacccgggaggcaggggttgcagtgagccaagacggcgccaccgcactccagcctgggtgacagagcgagactccatctcaaaaaaagaaaaaaaagtcaggctgaggcaggtggtttgcttgagtccagggatttaagaccagtctagacaacagggtgaaaacccatctctatttaaaaataataaaaatataaaaatttttaaaaaggccaggtgtggcggctcacgcctgtaatcccagcactttgggaggccaatacaggaagatcacttgagttcaggagtttaagaccagcctggccaacatggtgaaaccccgtctctattaaaaatacaaaaactagccaggcgaggtggtaggcacctgcaatcccagctacttgggaggccgaggcaggagaatcacttcatctcgggaggcagaggttgcagtgagccaagatctcaccactgcactccagcctgggcaacagagcaagattccgtctcaaggaagaaaaaaaaaaaaaagtcagctggatgtggtggctcacgcctgtaatcccagcactttggagtccaaggtgagaggactgcttgagctcaggagtttgaggccagcctgagtaacaaataagacctcatcattacttaaaaaggaaaagaagaagccaccacagtcaacacactcaccaactgctcaccctcttgggtaaccaaggaagtgcaaattgaaatcacaacacgatgctattttacattcattacattgacaaaaattttacaagtaggatggtcccaagtggtggtgaggatgagaaacgaggtggtgaggacaagaaacaacagaaatgctgtgagcactgacattgggtacaagccgatgcatggcctagacaggtgggcatgaagactcagtgcagactggccttgtggctgcacacctgtgtggtcccatggggcctgcacctggtttaatgtgatgctgctgctgtacagaaatccctgatattttatcaaggaactcttttttttttttttttttttttggagacggagtcttgctctgtcgcccaggctggagtgcagtggcgtgatctcggctcactgcaacctctgcctcctgggttcaagcaactctcctgcctcagcctcctatgtagctgggactacaggcgcacgctgccacgcccggctaattttttgtattttagaagagacggggtttcaccgtgttgcccaggctggttttgaactcctcagctcaggcaatccgccttcctcggcctcccaaagtgctaggattatagatgtgagccatcatgcccagtgagctcatatatatatattgctcatatatatatatatagctcatatatatatattgctcatatatatatagctcatatatatatatatatatagcccatatatatatatagtgtgtgtgtgtgtgtgtgtgtgtgtgtgtgtgttttgagatggagtcttgctctgttgcccaggatggagtgcaatggcacgatcttggctccctgcaatctccgcctcctgggttcaagcaattctctgcctcagcctccggagtagctggaattacaggtgcctgccaccacgcccagctatttttttttgtatttttagtagagatgggttcatcatcttggccaggctggtcttgaactcctgacccggtgatctacccgccttggcctcccaaagtgcttggattacaggcatgagccattgtgcccagatgagctcatattttaatttgtaaattaattttaactattttgttttattttattttatttgagacagagtctcattctgtcacccaggctggagtgcagtggcgtgatcttggctcactgcagcctccatctcctgggttcaagcaattctcctgcctcagcctcccgagtagctgggattacaggcacgtgcccactacctcgcctggctagtttttgcatttttagtagagacggggtcttgccatgttggccaggctagtcgcaaactcctgacctcgtgatctgcccacctcggcctcccaaagtgctgggattacaggcgtgagccactgcgcccagccctaaacatttaaatttaaaattgttaaaattggcctgggtgggccagttgtggtggctcatgcctgcaatcccagcactttgggaggcctgggcaggcagatcatgaggtcaggagttcaagaccagcctggccaacatagtgaaaccccgtctctactaaaaatacaaaaaattatcagggtgtggtggcgggcgcctgtaatcccagctactcgggaggctgaagcaggagaatcgcttgaacctgggagacgtagctgagatggcgccattgcactctagcctgggtgagacagcaagactatgtctcaaaataaataaataaataaatttaaaaaatgtttaggtcaggtgcagtggctctcatgcctgtaatcccaacactttgggaggctgaggcaggcggatcacttgaggccaggagttcaagactaccttgggcaacatggtgaaacctcatctctacaaaaaagtaaaaaaattagccatgcatagtggtgtgcacctgtagtcccagttacttgggtggcttaggtgggaggccagattgaacccaggaggtcgaggctccagcgagccaactggactccaacctgggcaagagagtgagatcccacttgtaaaacaaaaaacaaacaaaagaccaggtgcagtggctcatgcctataatcccagcactttgggaggctgaggcagatggatcacttgaggtcaggagtttgagaccagcctggccaacatggtaaaatgccgtctctactaaaaacacaaaaattagtggggcatggtggcaggcgcctgtaatcccagctacttgggaggctgaggcaagaggatctcttgaatccaggaggcagaggttgcagtaaactgagaacgtgccattgcactccagcctaggagacagagtgagacaccatctcgaaaaaacaaacaaacaaaaaaacgaacaacaaaaaaaaggaaaaattagaataaaaatgtaaaatttaattaaattttaatgcaattaatttaattttaatttacaaattgcatagcctgctctgcccagcattttcacttcttggtgtataccctagagaaactcctgtgcatggaaaccaggagacccgacaagaatgtttatggcagctctgtttctgcaaagatccagaaacccacacagcatggatgaattcgagaaacatatgctaagtgacacaaacatgaagtataagaaagcagacagtaaaatgtcattttcagaaagttaaaagataagcaaaactatacagcagtgtgtagggatatagacatagtggtaaatctatgaggatgattctaacatttaggatactggttagagggtgagtggtgggggcggccgagggtgaagtctagaaggatcttcttattatgggcaaagttgttttgatgttggctggtgggtctgtttcactgttaggctttggagctgatctggacatcaattctcaaggtgttgatgtcaaaggctttgtgttttaaaaatggaagaaagccaggcgtggtggctcacgcctgtaatcccagcacgtttggaggccgaggtgggcagactgcctgagctcaggagtgagtttgagaccagcttaagcaacatggtgaaaccccatctctactaaagtacaaaaaattagccaggcatggtgctccacgcctgtagtcccagctacttgggaggctgaggcgagagaatcgcttgaacctcggaggcagaggttgcagtgagctgagaccgcgccactgcactccagcctgggtgacagagcgagactctctctctcaaaaaaaaaaaaaaagaaaaaaaaaaggaagaagatttttgtcttccatttactgaaataaaacagcacctgatgaactgctcatataggattgtcagggcttgatatctgtgtccttatagacacatacggtgtaagaaacttccactatttttttctaaatgtctgcctacaaacttttcttggtgcaaaaatctttcacttactgaaagaaaacagaccatgataagctgttcagaaaagtctgctacattgttgggatcaggcattgagatggcagggagggagtgggccccagaggcaggcctttgagcctcctggggctgggcagtgagtgaggaagaggtcccctgactatggccacagtgactgcctaggacagtggtccaaggagaggcctgcctgtgatggggctttggtgccaccatggctccctgtgctgctcctggagctaacacatctggccaggaccctctatgggggtaggacaaatcctcagggctggctctcgagggcttgtgcccacttcttggctgtgggaggcccagatgtccagaacaccgatgtccaagtcccaggaagcagatccaagacagctttgtgtatggagccccccagctgaggtcctgtcctcaactggttcagagcctggctccacccaagaccagccacctgttctcaagaccaggtgagaacaggagggatctgcaggaccacaacgcagctgggatccagggaccttctgagggaaatctggggcaggccagtcatcagccctcccagccaggattcttgcctctgtttccctggctctgcctcacgtcacctcttgcctgggggaccttggttttgggctcccttccaccagctgaagcctccatttggtgggtgtgaggcccagtcctaaccccccagctccccaccccttccccaggcagactctggcctcagctgtctgtgctagacttagctccaggtttggccccctcctgactgaggggttggctcacacccctttcacctccatccccacccccacttgccacactgtggcctgctcccatgggtgaaccccctgtaggtgccaggcagctccagcccgtctgcctgcctgtgcaccctcagtcccttgggcctcccccccccccacccagaggtcctgagagagggtgctctccgggatcagctctgtgaaagtgaggggcagacagagagcactgagccactatctggctgtgaagatgagtttcagacacataagccagttcaccagagaacagtcaagacagcagatacttaggaaggaaatcctgctgggagcttcagaggagcaggggtgtggggaggaggacatggatgcttgagtaggtgtggtgggcggcccagggcctggtcccagctcttgcatccggggctagttcccctgcttccctaaggatgccccctctgtgacacagtggacacagataaagctgtcttttggctaggcgcggttgctcacgcctgtaatcccagtactttgggaggctgaggcgggtggatcacaaggtcaagaaatcaagaccatcctggccaacatggtgaaaccctatctctacacaaaaattagctgggcgtggtggtgtgcacccgtagtcccagctactcagaaggctaaggcaggggaatcgcttgaacccaggaggtggaggttgtagtgagccaagatcgcaccactgcactccagcctggagacagaacaagacttctctcaaaaaaaaaaaaaaagctgcttttctggcgctggtcctggagagttggaggctgcagccctgggcagcaggcactgccgggagccgggggaggggactgagagctctctcaggtggcttgggaaggaccaggagaaaatgcacagacaaggctacagacaggagagaggaggcctgcaggcaaagtgggagtggggaaggcaccgggctcaggcagccctaggacagctgctcccatgcgcccacaagcctgagggcctcccccacattctacggagaagttcagggcagcacttttggccgtggctgggcagtgtctgcggggaggcatttctgatgtttgtgtgcccttgaagcctgagctcagccaggagcacaagggcgagtttcccggcccctgctgccttgctttctcttgattgagaaaggaaccaaagatcaaaaggcagtgaagaattggggactctgagaagggtgactttccaaggcttggaccccttagcagctttgcggcctaggggcacttgacccctgtgtgataagccgaatcctctttgtcttaggtggggaattggtagctggctcatcccttgccccagcacctgcagcagcgtggcaaacacttggccaacatgcgctgaaggactggtcgacagagtcccacgactggctgcttcaatactgaccccctgagggcactgagaaggctctgaagccgtctccaagagcagtttcatgtgtgctaggagctgcagccacatgggactgggcctgtgcgtgctatcctggggcttcagggggaaccagccctccagcctgctaagcgaccagcagcaacgctcgggccaaggccctgcattttgctgctggccgtccttgggtgggtgaggctacagaggtctggactggaggttgtggttgggggccacaggtctagagcaaagggaggcaggtgggcgggccttgtggggggttccctaaaatccatcaggtgtggtggtcctgaggtgagtttctgatatctgtccaagcagccatcaggggccagtcccttccaccaggaacagtgaggcttgcccaccaccgaagcgctgctccccaccccctcagcctcgctcccccacctagtgcagccaccactgccattcctagttctctaccaggaccccagggcttagcactgcccacccctgctgctggtggatctctccaggtcttctgttaaggcatttttatcttttttttcccttaaaattcccatgacagattacataaaagcatttttaaagcatgttcaccgtactaaaaaaaattaggatttagaagaaaacctaaaggggggaggaaaaaaccccctataaccctgcccctcagggagcaccagcagtgaacctgcagtggattcacttctgggcggcagccgagctcccatgtgggacaagtgccatgcaggcttcgaggatggcggagcggggtggcgggagcagggggcagaagaaaggctcagtgctttgttctttttttgagacaaggtcttgctctgtcacccaggatggagtgcagtggcgcaatcctagctcactgcagcctcaagctcctcaaacttaagcgatcctcctgcctcagcctcctaagtagctgggactacaggcttgtgccatcatactggggctaattttttgattatctgtagagatgggggtctccctatgttgcccaggctggtctcaaactcctgagcgcaagagatcctcccacctcagcctcccaaagtgctgggattacaggtgtgcgccaccacacctggcctcaggaggtgccaggagggtataaatggtgggcctcaagagcgtcatgtcagagggtctccatcctcaggatggaacctcctggggcacatcaggctcctggataaaatgaggggtcctcaatgctcctgtggctccccaatgtcatgtgaggtcccaggggcttaatccctttcctgtcaccttcctgctgctggtgggggtgggctcagagcccctcagggaggaaaatcaggttgctggctagaccaggagggtgtaggccaccagggctctctccagaatttgtctgctcgcttcgcaagatttgcagatggtccccaatattaaagcagcttccaaacacatctggacatcaaaggggacaagatgctcagaagtcaggaagaaggcaggactcgggcgacagagttcagaacttgtggtttattgacacttctgcatggtgggtccttgggagactgcctttctggcatcttgggacttgtccctaagaatagggaagacagtcatcctgtcctggagcaaagctcccccttgcacaggaacacaactcccatgcaggagaagcccaccgagacgaacgcagataaacccttcgcaaggcctgcactgcaccggaatggcagagctccgtgcatttggcaaagctatggagccttggcagaatgcacaggactctgggggctgccccccttgagctacagaggcagaatcgaaccaaaaacactgcttcctttaacacagcccaactggcttacatttagcttgggacgaggctaggcctaagaagggccagagctgtcctcccagccctgggaacacggctgagacggcccggtgcccacgctgggctcaccataggagaggagaggagagggagggggccccatactggccctgccgtctgcaccccgtccctttccccactaaacacacccatttcctatcctgggttctgaggctgggactgcctctgggattctgagggactgccctccacccctgcaggcctgggctcagagtcagccacacctgtaaggcaggccctgcttccccagcttttgtattccatatacggtgctggcatgtggagctccattcttctccagcccacttaattttaagaatagacactaataagacttaaccaccccaacctgctggcagcaggagggcccctgtgtgctggcagcatctccccaggacacgccggctcacctgcacccacagcgttctaggaggtcgcggcctctgcagactcagtgcaacccctgggccttacaaaagggacactcagaggtgcactgcctgctcagctcacacaaggaacaagtggagagctgggctggagaaaggattacaatttacagaccagtgtccctggctaggggccctcatgggactgtggctggaagagaaggtcgccccggaggttggaggctgaagacacctggtgcttcttggtgcagtcctggtcaagatggaagagcgctcctctgtgcccagctgctgtgcaggggtggacgagggctccctcggccccaaggcaagggcggagcagctcccagtgctggcaccagacctctgccaggcacggggcatggccatcctctggggtcctggctcaggggtggggagcggcagtgctgggacaagcctggggaaagggtttcccatacactgaggctgcgagatcttccagtggagcctcaggctagggtatgaatcagaccaccaggtgataggagccaaacctccacatggtgaaacttcactctcggcagccaggaacagaattattagcaaagaaaagagaaaagcagatgccaatcattctctctcttcgtcaaggttatgcccacgggcagggtgggctagtggtgagggtggagctgcgtccctgacccccagaaggagacagcaggccttcaagttaagccaagcaatacttggtcattgtttgtggccaaccattctctgaatgtctgaatgacagcgactatgtttaaggtttttttttgtaaataagagaccttaagcaatgcattgactgcatggtctcaacctcatctgtgctgtgagaatgaggggtaaggctgggcatgcaggtagggccccagcaaagctggctccccgctccctgtgggacagagggctcccaccgggaaggcggctctagcgtgcctcctcggcgagctgagaggaggccaaggtgcttggggcacagctgtgcaaaccttcctggggctctcgctgtctgcaggtggactctgaatgccttcatggggaccacacagcccagcttcctccctttctcctctcctccccctgcactgctctgacctgcctggagcagccctgcccacctccagctcagcccttcctgtggcttggccctgcagatggcctctgagtcctcccctagccccctgccctcttccctctacccgacaccctcccccagccttgccactttcaactttgcacgccctcagtgagctccctgaggcacccaggatcggtcacttgtgagccccctctcagggtgcactaggggacgtggagctctcatgcctgttcagggcatggggcagagcaaggcaggcgtgctgccagccaccgcggcaaggtgaggggctgtggcctgtgccatggactcccagcagcatccctgctgcctccagactgagacagagacccacgggctgcctctgtgcttgcctgagcctcttaattaagagtctttcccaatgagaccaatttgattacaaattcacaagatatttgggaatgttccaatcacacagcagcaaggtccctctgcctgggatccagccaggcccaagggggtgggaatgcaggcagatgggccaaggtcacccgggatgcccagagccccgctgtcgggcccaggcaccactacgtggcagtcgcagctcctgccagtcacctgggcagcggggggaggggagaaccttgggggtgttcagcatcacaaagaggcggaaaactcttccagaaagatctcaccaaaatcatgcctccctaacaaaacaaatcctgcttttctaaaaacctcaatgggcctatccgagcccactgcagtcctagtttcttcaaagctgtgtaaggcacttgaatggcttattaacaccacctggaaaagttcctgtttcaatcctgatttagaaaataaattcaataatactgcaaaaaaaggttccttgaaaaatagctttaaaaaagtaaatacttaagttttctaaagaataaaataaatgctaagctctgcttaaattatatgacacaacaggtcatcttggcactgataaaacaaagagaaaacctggaatactgcttcggaattagacctccctggaaaaaaacaaacacaccaacaaaagacacatgtgcgtcgccggttccgggctcagggaagagagcagcccggaaggccctggtgggcccaagcacatcatggctgccctggagtgggggcaggggggtggctgctacagaacagacccctggctctgctgcgctctcctctttgggacactggtgtggccgaccaggactggctgggcatatctgtaaatatgaacccacctggccctggccgcagagaggagcaatgggaaactggggctggccactccgctgctgggcctgacccagggggtgcttcaagagtttggctcctgggtccgccccagggtcccacgtgcacaaccatgctgccccatgcacaccagtgtctttggtttggctgccgttgggcacctatgacctctggtcccaccccgggcctaataggagctgggagcaagagccggtccatcttctctttggtgaggtctcctaagctgccttccaccatctgcccgccacccagtgcagttccacagccaccaggacgggctgcggggggtgtcccgactggctctggggtgctggggaaagcactgtggggcgggcaccctgtccactgcctgccacctgttgggtcctgaggcttctgagggagagaaggacaaggatgggaggaaggggagggcaggggcctggaaaccacctagcttcttggtggagcctgggtctcaggttctggaaggctggagggcaagtcctgcctcctcccttctgcctgggggtccccttctccctggttcccgccctccagcagctcttgggggtccctgaggaagaccaccatgaccgtgatgttgtcgtgggagccccgctcccgggccgcagccaccagctcctcggcgacacggagcccgctgccctgctgcctggtcaggtggctctggaccaggccaacaacttcctggtggggtacgacgtcaaagaagccatcacaggcaagcagcaggtagtcctcggagcccgtcagcgcccgggaagctgcatcggcctccccagacacgtagggcttctggaagacatcccctggacaggcggagaagagcccgggtcagaggaccacggtgtccacagcttcctccccacctacccaggcctagacctcacatcctgcagggacagagaccaacctgctctcatggggtctggggtctgttgctcccttatgcaaactgcccagtacttcccacttgcctgggaacggaaacccctgaccttggcctgtgagctccccctttttttcttttttcttttttgagatggagtcttgctctgtcgccaggctgcagtggcgcgatctcagctcactgcaacctctgcctcctgggttcaagcgattcccctgcctcagcctcccgagtagctgggattacaggctcgcgccaccatgcccagctaattgtttttttttttttttgtattttagtagagatggggtttcaccatgttggccaagatggtctcgatctcttgaccttgtgatctgcccacctcagcctcccaaagtgctgggattacaggcatgagccaccacaccaggccgagctccctctttctctgccctagccgtcccatcctggcctcacttcctggagtgtccagagacacaaggaaagacacagcctgaggatgggctgtcaagaaggtgccacatctgccaaaaaggacagaatgtttcagaggggtaggtgccaaatccctggcaatcagctggggagggagagattttctaagtaccaggaaggaggtgtggtcacagtgcccacagcctgagacccggcactgaccgcatgctgagacaatgagatgcaggctggacccacttttttttttttttttgagatggagtttcgctcttgtcgcccaggctgcagtgcaatggtgcaatcttggctcaccgcaacctccacctccagggttcaggtgatcctgctgcctcagcatcccaagtagctgcgattacaggcaggcaccaccacgcccggctaatgttttttgtatttttagtagagatggggtttcaccatgttggtcaggctggtctcgaactcctgacctcaggtgatccacccgccttggcctcccaaagtgctgggattacaggcgtgagccaccgcgcccagctacttttttttttttttttgagacacagtctggctctgttgcccaggctggagtgcagtggcacgatctccgcttactgtaacctccgcctctgggttcaagcacttctcctccctcagcctcccaagtaactgagattacaggcgcgtgccaccacacctggctaactttgtattttttgtagagaaggggtttcaccatgttggccaggctggtctcgaactcccgatctcaggtgatccgcccaccttggcctcccaaagtgctgggattacaggcgtgagccagcatgcccagccagacccattactttttaaaatttttatttatttttattattattttttgagacagagttttcctcgttatccaggctggagtggagtggcgcgatctcagctcactgcaacctccgccttctgggttcaagtgattctcctgcctcagccttctgaatagctggaattacaggggctcactaccatgcctggctaattttttgtattttttttttagtagacatggggtttcatcaggctggtctcgaactcccgacctcaggtgatccacccacctcggcctcccaaagtgctgggattacaggcgtgagccaccgcgcccagcgaacccacttttttcccaaaagagaaaaaaggattgtcagcatgaacgcgggaggaggataaacctcatttccggaatattggaagctctacttccagcccatagggtggtgagccacaggtttctatgagatttgtaggagctgttttaggtgagataataacatacagtgtaacttacactcagacactggtgctgcagtctctgaatctgccctgttcccttcacactacgagggtatcaccccagtgcatgacaaatccccctcggcccatcacactgcctccctgaacccctggtgagccgcgggccacactcgaggcctgggcttccgagagaccttctcccacttgggtcggcctctttggctctcaccgatggctctggagacggccagggtcccgttgactctccagcagtccatgtgagacacaaagccacccaatgcttcaatgcgcgccttctcatcctgcagaaacacagccagagttgggggcagggccggggggatggggcgtgaagccccctgctgctacctgagcagaggcacagctgcttctaagacagcagcattcaaagccgcagcactggaacaaagccaggaggctcagagatgcacccaaacgaggctcatcaaaaacagtgagaaattatacacaacccacaagtcctttagttgcaggaatggtgaaatgaacggaccacctgaggccgcctagcggtgcctgcgcccctgggcagcattctgggtcagggaggcactcacgaggcttgcgagcccgacacagacagcagatccttctgcttccctgtctctagctcggggacaccgtctctgccctgaaagctgctgggccaagatggagcatgtgacgtgagtggtcacacagcagggaagcctgagcgaggccctgacggcagcctgtgcccgcccagttcttttttttttttttttttgagacagagtctcgctctgtcacctggctggagtgaagtggcacgatcttggctcactacaacctctgcctcctgggttcaagtgattctcctgcctcagcctcctgagtagctgtgactacaggggcgtgccaccatgcccagctaatttttttgtgtttttaatggagacagggtttctcaaagttggccagactggtctcgatctcctgacctcatgatccaccctcctcggcttcccaaagtgctgggattacaggtgtgagccaccgcgcctggcctagttcttgtcctcctctacccaagctcagcacaggcacagtctccactcagctggggaccacaacaccccaggcctgggttcctccagggacaggacagaggcttggtccacccacaagtcctctagaaacctctttggtcctatcagcctctgcccaaaggagaggctgccccgatgagagcctgctgactgaagcctgcacaacagcatccctgacagagtgacggaggcaccctgggagtgaggcacctcccaagtctactgggggaagagggcatcccttaccggtttatcaggtaaacctcttgaccccacgcagcaccagcccttctagtccccaggcacagcaccagctgggcatgagaactctgatgccccaggtgatggtgtcccctagacagattgggatatcagccaattccctccccagagcagacggacatgcactgcgggaggcctgggggaggcagccctctccagatgcctgcaccaaggaccaggcctctttatgtggctcccctgcagagggcattgtggtgggaatgacatgggtttgcaggagtcccggccttcctgggcactgcagccatgagcctgtgtgggaactggaccagtgcctggtaggctgggtgctcctgtcccagctgaggtggagaatcaagccatgaagggggcaggaacagggacctcaaggctctctctgggtctaagatctgccacctccggggtctgagcagggcaagggaaaggcaaggaggaccaggaaggagggaagagcaggagacagccaagaagagggcaggagaaagggcacggggagaggcaggtggatgaacacagagtacgcacgaatgttcacacatacatgtgcccacacacacgcgtgaaggcgcctgcagacggcgaggagctgcagaggaagcagcgcctcctcccctgtgcctcagaggcgttccctggggaggggctgtgagcgtgggaggctccagggagaatgaggagcctttctctgcttctgtctcccacacaccccagcccactccagcccctcaatgtcccagaggcaggaatgtgggcaggtgatggagaatgaacggcaatctgcttcccatgccctctggaggtggctctcccccacagggggccatgcaggctaagcttagaaccttcctacctgaagcccctccccaccaccagggatggctgtgggacagggtggagccaaagggcaggagggcacaggggctgtgctgctcccctgcagcctgtgatcccctctcctgccattctgcaccccctgtgctggacaggctgcgccggctccccgggctcgcccctctaaccctggccctgaacctgggtcctcctcccctccagtggctcccacctccgtcacacactggccaggctcagtctggtccgggactaacatatccccaggctaaggggtcttgtcccattccccctgagtctcctagtcactgattcttgattctgttttttgttttgtttttttttttttttttttttttttttggagacagggtcttgctttgttgccaaggctggagtgcagtgtcatgaacatagctcactgcagcctcgacctctagggctcaagccatctcctgccttcgcctcccgactgcccagcgcccaccccctcagcagctcttccctctgctcctcaaacctcatcctctccacctgcctgaaacagcttcccaggtcaaagctggagccggtggcctgtgggttcctgtgaacagccatttcctgcttcctaggagtgcagtgctccacacggccaggccgcagcagcgtcgcctatggcactgccatcctcctggatgcccaaggccctctgcgatgtctccacctgcagagccgggactcctatctctcccaggctgcctgccaggcgtgccagcgtgacctgtgaccttgagtgactctcactgccctcctgaactcacttttgtgacccagccctcaacttgtcctccagtggcctgatcacttcagaagcttctagtgagtccttacagagttcctcccagcctggggcagtccagcttttccagctgaaggagcagcaggtgggtggtcttctcccctgccccgagtcttctacccactgattctggggcttgtttttgttttttgaagacagggtctcactctgttgccaaggctggagtgcagtgtcatgaacatagctcactgcagcctcaacctctagggctcaagccatcctcctgtctcctgaggcttgagaggtgggaggatcacttggggcacacctccacacctggccctgattctggcataacctgccctttcctcctggtctctcccctggcctgcaggaattgcaactgcctgagatgcggctccattccattcatctctctgcctcatcctgccaggtccttgccctcctcctgctcccccattagacttagaggcaggaagtgggtcctgtgttatctcactgcctcaacaaagtatcttgtgcagagtgggcactcagtgtttggaggctgaactgagtgcagaggcaggagactgttcagacagccgcagaacaaggcagagcaccacgcactccccccacgtactcctggaagctgctctgggccgctgctggacccccgttgaagctcgccaagttgaggccagtttcttgctcttgtaaccgacatgatgcttgtttttgtgggagaaccttggcctggatctgtgattaattctctagggtggaaggctgtgatcaggatcacagcaggaggggccaagcctacagagcatggcggcaggaaaggggaggtggggggcactggatctgaactccttggcccatgcgggctgcagccaagaacacagacacctgtgtgtgcttctcttgtgcaagctctgatctctgtgctccacatgcactgggacactcaatccttaccccaaacctccagggacccctgtgtgatggacttggaagcggtggagccgggaccaggcaaggccatctgtccatgctctgccacgacgccatactgcaggactcaggcagtgtttgaacagagcccccactgggctttaatggggtgctgaatgctgagcctgtaggtgtgcaggcagcaggtgggagtgggcccagcacgaatcctgacttggccacatttcatctgactgcatatcctggggaggagagcccactagggagcaggtgccaaattcccccacggtggtggaggcaggggagtggcagagactatctgtgactttggcggtgtgctctgggcaagtgactgagcctcagttttctcctctgtacaatggggagaggacgtacagggggcccataccagaccgtgagccgcagtgaaaggccaaggaatgtagctgcccctgactgttacaatcatcaagtcctggtgtctctatgtgctttccaaaccagaagccacaaaaagactactcaactacagaaaaacacaaagcctccatgtggcaaaagcccataaacaaaaataaaagatgcatggaaaaacatttgcaaatcatcacagacaaggaaccaacctccttcacatatacaaggaacctataaactgataagaaaaacaggcaaaggaaaaaaacagtgtttgcaggaaaggctgtgtaaatgatcttcagcttttgaaaacacgctcaaactcactctgtaacagaaaagcaaacttaacaattgccccaagacaggcttcttacctgacaggaagaatcctgcagcctggtgagactgtggggaaatggaccttcttgggaatgtagtgccagcccaggctggcatggcctgaggtgggaagcttggcaaatctacccagactgtacgtgcatcagttccaacctagccatcccacttctggggatgtgtcctacagatataggtacacttgactctgagcaattaatgctgcacaaagtaggtagagatgcattgtttttagcaccgaaagactgaaaagatcttcatgctcacccacaagggactgcatgatgaatgcaatgtccgcagccccaagaaaggatgggtgctcctatgtgctgacgtagaattatccaccatgtgcatggttaatcaaacatagctggtggagaacagcacgtgggaaaagtggggtttgagggataaacagtcattccatgatatctgaatgctcgcaatccaacctcaggagacacatggatgagacagtcttctgagaagaggtctgagtgggactgtcatcctcatgtccaggtgatgacctgagtgccagggtcccaggcagcctctagtcagtacagccccaagccaggttccctccagcctcggggcagcatcacctccctgaggccttcctcacccacagcctgtggcctccttgtccgtgtgtatgatgggctctggtctgcactgggctgcactgactgcactgggatgcctgtcagtgcagagggctctgctctcccccggagctctgggctccatatagctgtgacccacagagctctcaggaagggctcacgtgggacccccggccactcaaatcaggcagggagccctccctcttgaaaggtgccaggattactactacctgaagttcccaggctgggtggggttcccctatgggcccagcatgatggaggccaggaatatcctgggcctgggcgcagggatccccttacctgccgttctggtctgtgtggctccatcagcttcaccacctgtccctgctgtaccaaaatgacctgggaatccccgagccaggcgacgtgcagggtcgctcctgcaatgagcgcacacacacctgtggtgccgctctgcagccgctgcagggagagagggcccatgagagttgagaggaggtagggaagggcagaggatgacacggggcaggatgaagcttccgggggtgatgaatacttccgttactgtggtgaggaatccacaggtgtatatgtgtataagccaaaacttgccaaattgtggacttcaaatatgcaccacttactacctgtcaattgtatctcaataaagatgtttatttatttatttatttatttatttagagacagagtcttgctctgtcattcaggctgggctgcagtggcacaatctcggctcagtgcaacctccgcctcccgggttcaagtgattctcctgcctcagcctcccaagtagctaagattacaggcgtacagcaccacgcctggctaattttttgtgtttttagtagagacggggttttgccatgtttctttcccaggctggtcttgaactcctgagctcaggcaatctgcctgccttggcctcccaaagtgctaggattacaggcgtgagtcactgcgcctggctatttatttatttagaggcaaaatcttgctctgtcacccaggctggagtgcagtggcacagtctcagctcactgcaacttccatctcctgggctcaagtgattctcatgcctcagcctcccaagtagctgggactataggcgcgtgccaccatacctggctaatttttttttttaatttttagtagaggcagggtttcaccatgttggccaggctggtctcaaactcctgacctcaagtgatccacccacctcagcctcccaaagtgctgggattacaggcatgagccaccgcgcctggccaatttttgtatttttagtagagacgaggtttcaccatgttggccaggctggtctcgaattcctaacctgaagtgatccgccggcctctgcctcccaaagtgccgggattacaggcgtgagccactgtgcccagcctcaataaagcagttacgcctgcttcagagaatcccttttctactctgaggctgccttgagctcagaggcctttgtcacttcctggggctgaggtgagaggccaggagtggaggcttgcctgcttttcactggggtccttgcagctgcagagattgcatggttttctattgagatgcaaagcctggctctgctaatttccatgaaggtctgtgctcagagcgtgtgacaaaagtgcacctttcccctggtgtcttctcactggggcgggtcttttaagcaacctgagcctcagtttcccaatgtctaaaatgggtacaatattagtattcacctcacagggctacaaggaggacctagtgaaattctgtgggtgaggttcagagtggctaagttcacagaggaggggcctgatgcatttgtattctttcttctttcagaaacaaatgcctcatccctgcacatggctataactcccgaggaaggattgttcccagaggacgtcggtagcctgctgagaccctgcctagaggaggaaggggaggaaggcagtagattaatcaggttttacatattccgccttttatgatgctttgacaacttggggccttgctggtcctggaggggctgccccttcccaggccagctgattcctcgagacagcaaatacctggggaggatgcagagacggctctggcccagcttccctctcttctctctgcgccccgactacctcagtgctttccatgcatggctctgtgaggcgtggcccctcctctcaggaactgtgagtagtagactctttgttaaggtcctggtctgtgtctgtcaccttgccatatctcattaaaacaaaatcccaggaacgcttgaccacagctgccttccccgaggccagcagaccctctgcgccaggcaggtctgtgtggctgagaggcccaccatgctgggtcggggcaggctttgtgctgcttccgttcaagtgaaaaccaagcccctttagaaaaaatggcaggaccaccggcagtgtttagtgaggaccttccagcaccaccagcccctttggcgtttttcccgctgcagaggctgggactctcactggcctccaaactgcacctgaggcccagcggccagtcctcacctctcgcttggctttcctgagaaacatctggtcggtgcgccggaaggcttctctgagggctccctcagggtctgtgggcagctctggctggcgggcagcgttggtgtgcacgtggacagcggcgtacctcgcagcatccacgcctccgtgaccatcaaacacagcaaagtaggcgcggttcacagggtcctggtggggatgtggtgggagtcacagacccgcgggacccagggtgctcccagtggggcgtggcgccaggcactgatggggtagagtctgggagaatcagtatggccttcgcccggcttatgtgcgtatgagggggtaggtttggaaaaggacagctcgcgggagcctcggtttcaccatctgttatgagttgctacaagcataaaatgaggggctgccccaggtggctcctggtgcaggagtcaggggaacgtggcatccaggcctccctcataacagactcacactgttgcccttcttagtctcttgctgggcaagtacaggggctgacgggtgtctctcctgtctcagccttggtgggcagctcttctcggtacctggggggcccccaccctcgccccggtcctccgaagctgtccccagggtctggacgggagcactcacagacaagccgaagagctggttgaaggaagggagggacacgtgccggtcctccatcttgcggcgagtgttccggatggcgtggatggagaccagccactgccgctgtgaggcccgggcagccaatggcacctgcttctgccactggccggcgacttcccaaaggcggttaaagaaactctgtgccaggctttgggcatccagcactgatgggcacaatggagggattgtcagggaagtgccaaccaagccagctgaggcctcgctggctccctgacagctcccacaggggcctgcaaagcccccatcacctcccggggcattgtgagcacatcaactcaataacgcgcacatggcagcctgttaccagaattagaaatgtctagtttggcaacttgccccttgaagtctcccatcccaccatggagcaactctactcatgggaacccaccctgaagaaatcatcagaaacacaaaaataattttaaagacaaagtacagaatcacttataattgcccattaattagaaatactatatatccaatgacaaaggaataatacttaaattatgatctagtctcggccaggcgcagtggctcacgcctgtaatcccagcactttgggaggccgaggtgggcggatcacccgaggtcaggagttcgagaccagcctagccaacatggtgaaaccccgtctctactaaaaatacacaaattagccaggcatggtggcgggcgcctgtaatcccagctactcgggaggctgaggcaggagaatcgcttgaacctgggaggcggaggttgcagtgagccgagatcatgccattatgctccagtctgggcgacagagcaagactctgtctcaaaaaaaaaaaaaaaaaaaaaagatctagtctcttgatgaagaattaagctgctattaaatatgattttcataacgaaatatgcaactcccatacgaccccaccgtggcactcctgtggacttatcccagaacaatgaaggctgttcacataaaagcttgaacacatgaacacaaatgttcatagcagctttatctggaacagccaaaatctggagtcagcctagatgtccttcaacgtggaaatggttaaacaaaccgtggtcgacccatacctttgaataccactcaagaatggcaaagaatgaactcctgatgcatcaaacaacctgggctaatctccagagaattaaaccagtcccctaaagttacacatcatatgcttccatttatatgtgttcttgaaataataaaatggtagaagccgagaagattagtagttgccagtggttagggatggggtctgtaggggtgggggtataagggtggccttaaaagggtgacaggagggatcctggtgatggaactgctctgtattttgaccatgttaggatcctggtggtgatattttattatagttttgcaaaatgttaccattggaggaaactgggtaaagtatacatggaatctctttgtattatttattacaactgcatgtgcagctatgattatctcaaaacaaaaagtttaattaaaaaaaactagcccaggcatagtggctcatgcctgtaatcccagcactttgagaggctgaggtgggaggactgcttgaggtcaggagttcaagaccagcctggataacataaagagaccttgtctcttaaaaacaaacaggctgggcgccatggctcatgcctgtagtcccgcgctttgagaggtaaaggcaggcagatcacttgaggtccggagttcgagaccaccctgaccaacaaagtgaaaccccgtctctactaaaaatacaaaaattagctgggcgtgctggcatgcacatgtagtcccagctacttgggaggctgaggcaggaaaattgcttgaatccgggaggcagaggttgcagtgagccaagattgagccactacactccagcctggacaacagagcgaaactcagtcgcaaatgaacaacaccaaaccaaaaaaaattagctgtgtgtggtggtatatctactcccagctattcgggaggctggggcaggaggatcccttgagccaaggacgtcgaggttacggcgatctccgattacaccactgcattccagtctgggtgacagagggagacctggtctcttaaaacagaaaactaaaaaatggattttaatagagtttataagcatgtaaaatgcttctgtcatgatactaagtgaaaaaagaaggaaaattacatatgcagtttaactacaagtccatgaaaaaccaccagggccagaaaaaaaaaaaggcgggaacagcacacaaccaaggtgtcagagtgggcctgcacgtggcagttccacggacagctttttcctgaagtacactttcttaatacttccccagtttttcattacaagtgttagtctcgtgtgacagtggctttaaagcatgtccacaaattctttgacttccccttttgcgaggtggagctcacttcccactgctgagtgtgggagctggctgcttctgatgaagagtggcagtgactgcgtgtgcttcaggtgttacgaaacaaagaggccctgcgcctcccgccttgtgtattctcactctcttcctccctccctctcatcgctcaatctgagctgtgaggatgctcaagcagcgccacggagagtccacatgggacgggaccagggcctcctgtcagtggccgtgtgttgaaaccaccgtggaagcaggccctccagcccagccagcaaccatgtcaccacaacccagtaagagaccctggaccagaaccagctaagctgctcccagattccagacccacagaaactgggagaataaatgtctgttgttttaagccactacatttggggcaatttgttatgtagcaacaaataatataagccacaatactcatttgaaaagaaaaaatacccaaatcctacctaagcttggcttctcaagaaaagatcaaccagtaacaggcccaaaggaaaccatgggggctctggcttcagggactcatgtcacttcaatgcacaaactctcctggaactcctgccagcccaggtgcatgtggcaagcatggtgaatcagggccagtcagccgagggcaggagttgagtgtcacaggccacacccaaaggacatggggaactgagaggaggaaagagctcctgcctaaaggcggaggctgtggaagaaaaggagaagggctgaggccagagggggccaccgaggaagaaccatgaacgcgagggcttatgcacgcaggaggtcacagaaagacaggttcttgggaatccatgcatcaaggcaggggtgggggcatccagagccagctgctgccgccatggccaacacaggggcctattcaagcatttggcaagaactggggactggcaaggctatgggtgaaggaggggcctgagaactcattcaggcaggcccagctcagggaaggcagctccacacaagtttggccagtggatcccctgcaaaccagcaggaaacccccctcgtcctgccagtccttgtagcgctgcctcctcttcctctcgtctgagggccactgtgcccagaaaactgcccctaaatgccatggactcctcctcactccctctggaaactgtgggctcctggtgcttaccaggcctgagctcgggctgggggagactccggccgccgctgtggctcacggtctcgccccgggtgctactgctatttccaacagccgcttagcctagactctgctcaggaaaggccagcggctgaggcagtgctgcccagcccacggactccccatgccaagggctgcagccccgcaacctcgcttctggattcttcgctgatccagtcaccggggaggggctgactggcagccacacagaggtttcagccactcgctgctcttcagtggcaattcttataatacaatccccactctgacgcaattttgtaagaatggcttggagtccaaaaacttgactacattctacttccgtgacagggagagcatgatcaaggccgctaggcaggcctgcatgcgaggcactctgacagacggggaagcaagggcaggcgagacttccttctagctgcgccctccctccttcccaggcctgcaggagccccgagcgtaggactgggctggtgccggcgcagcaacgctccttctcaccggcaggtggcgctgtctcccgcgtggacggacagagacccatcaggcggggagggcctgggcggtggcggcgcccccttggtggggccgcagagcggaggagcagcagctgccaccggccggaagcctgctggctcggccgagaacaatggccgcctgtcactgtggacagctgtctcccaggctaaggcaaggctgcgctcccagggaatgcgggcagggagccagggcggagggcagaggacgagagcgaggaggagagcgcgggcacccactgatgctggcggcctcgggtattcgctttctctctcttctcccaccttgttccttttccccggatgcacgcatgcactagtaatgccgaatttagaacaacagggaaaggaaaggaaatggcaaaggaagggaaaggaaatggccgacaggaaatggcaaggaagggaaaatccactgcaactctgctgcctgctggcctgtccagggacaactattcagctgggtgggacgttgctacccccttgtggcacccctgctgcagcctgcgattcttacgccctgtatttctggtctaacatcaaccaacactttggcgaaatataataaaatgaaattactaggagaatgaaagaaagtcacatgaaataaaagccctgctttttaatgattatatcctctgtgaaatggatctgcagccctctccatttctgggttcccctggccacaccatgcttatggctgtcccaggagcaggctgacagacaagcttccaccagcatctaaccatggggctcatggacaccgtagagcgtctccacccaacagaatcctgacttgggggcagctgaggcagggggcccgagcgttgaggggaccacgctgctgccccgagacctgctggcatgccacctggccaaccctgacttcgcctgcccgggcgcatgttaactgagttacaacactgagggcacttgaacctggctgcatgaccagagatcgatcacctgtgagatcctctgtgaaacgggataagcatctttaatttcctgggctgttctggaacttcagtcagacaggacacaggagggtgtctgcaccacccacccctgcctcgtgggctgactgggaactatatgacctgtggagggctgtgaccgccaccctccacctcactggggccgcaagccttctctgctccttgattctgctgccgttgtgagcgagggccccagcacccttagggaccccaatcaatgggcttcccacaatgtcgtcaccctttgttgcctgctaagcagccctggggccacctcagaagaaacagaactcacaggtcacaggggccttttcctcctcgtcatcgtcctcctcctcttcttcttcctccctgggcaacttcctgaattcggaaaggtctgtctgtagcagctgtgaaactgcttcgtgggccagagcagcagcaagtggtggcggggccttcctagggatgaggagggggaagtgaggggcagcccccagcaggagaccacacctagccccccttccccaactgtcagcccacatgctgaggggtcacggccagcagggcggcccctgtcctcagggagctgggacaggaaggtcacaggacagcaaaggcagacgcacaaccatctggtggggagctggaccatacttgagcctgcggctagttgggagggggctgttgatgggcaagtaaactgcctgacatccatgctgatgatggctcctggccacaggagggcagaggaatcacccatgccagctggggaccctggggggtggggagtgttctgggttgaattgtgtcccccctaaattcatacactgaggccctaacccccagtacctcagaatggagctcatttggaaacagggtcattacagatggaattagttaagatgacgtcatgctggagcaggctgggcccctactccaatgactgatgtctctatgaaaaagggaatttgggccgggtgcggtggctcacatctgtaatcccagtactttgggaggccaaggcaggtagatcacgaggtcaggagtttgagaccagcctggccaacatggtaaaacctcatctctactaaaaatacaaaaattagccgggtgtggtggcgcatgcctgtagttccagctactcaggaggctgaggcagaagaattgcttgaacctgggaggtggaggttgcagtgagccaagattgtgccactgcactccagcctaggcgacagagcaagatgctgtctccaaaaaaaaaaaacaggttgggggaggaatttggacacagacacacacacacagagagaatgccaggggaacatgaggcagagacctgggggatgaacctacaagccagggaatgccaagggttgcccacaaaccaccagaaggagccagttctgtcaatatcctgatctcagatgacagcctccagcaccatgaagcacacttctgttgtttaagctgctgggtctgtggtcatttgtacagcagctccaggaagctgatcctggggtgtgggacccatgggcacactcagcagaggaagtggctgtgcgtggtccacaaggtccctgggcggatggggccataggagctgccggggtgaggggctgtgggaacagggcaggccaagctttatgctaacagggaagcactgccattggtctgtgttttatttatttatttttagagacagggtcttgctctgtctcccaggctggagcacagctgtgcaatcatggctcgctgcagcctcaaacccctgggctcaagagatcctctcacctcagactccagagtagttagggctacaggcagtagttagggctacagacatcaccatgtccagctaatctgtaaatttttttgtacaggtggggttttgctatgttgtccaggctggtcttgaactcctgccctcaagtgatcctcccatctcagcctcccaaagccctgggataatggcgtgagccgccacacctggccgcctttggtctgtttgaagagggacatggcatgatcagatggggcttttaggcctctctgaccctggtgtggagggtgggctggcaagaaggggacgactgtctaaaggagagagtctaagacctgggctgggcagggccatggtgacaaacaggagcagacagagtcgggcagtataaatggaggggcagggacagtgttgaagtttctattctgagcaactagaaggctcgtggtacagttaattaccctgatggggatggaagagtcaggcaggggatgggcaatgggctctgtttccacagcgacttgtgttccacggaggtcaagaggcctgagggcctgcaagaacatggtctgggcaggagatggagctgcggaatgaatgaggatagggggctgagtcccacagggccagagcatggctagcaaagtggggatgactccaggagtggccttctgggtgccacgaaggaaatgttttaagaagtgagattgggtcactgctttcaatgtcatagaacagagctgagcagttgaggaggcgtagtgggtagaaagggaggtcgcagcaggctgaaagcaaaccgacaggagggttagcgtcttttagcaggtaggcagggcagaagagagccacggggcagatc

SEQ ID NO: 28761 - DNA, 38756 bp, Homo Sapiens
gatcttaaaggagaaatgcagaaacaagcacaggtgagaaacctcagttcctctcagccccttgtcaagactatcacatagtgtaggaatccctgactttctttgggtccctgcttcctatcctgcttctgtgcctttcacttggactcctgggtagatgcatgtgagtgtgtttattcatgcagtgagctcattgtttctacagtcagaaggtcaccagaaaaagatccatacctattttgtaacaagaattaggaaaccgaaatgactgagacatggtctctacttttgagacttttacaatgtagcgatctgagatagtgtgttcatttcagtgcaagccaatgctgcctattccgatcgctgctccctgatttgaatggcaggtgatcagtggcccgtgtggcttatggacacaccagagctcccaggggaagtgctctgaaaacatcctggtcagagttcagaaggacatgtggagtataaggtcagatgcggagataagggagatggtgtggccctcctgcccaggggtgctgagcaggttgctggaggcggtgatctcactctgaaggagacagacacagaaacgtatgtacagttgatggtgagcatctgagttgcgtcttgttagtgaggccaggagtgcctgtgtaagctggaacagattaggtatatgatttgtgaaacggagtttcatcctacgtcttcatctagtcaaaggactgtttcctgattaggcattagcttagtggttgctagtctgtgttgacctttgaaaggcatgactaggctaactctgaagttgttgcttcacaccatttacaatttaaaattacctagagccttgtgggccattggaaaagactgaatgtttcactctgaaatgggagtccttggagggttttgaccagagaagagacattcaggtaatcagatcactctgccaagagatcagtccagtggcacaaaccagagggctggcagtggagatgagacagagtcaaacccggattgagtttatttggaagctgggtcagtaggatttcctggtggactgaatgtggggtgtgtaagaggaaatgagggtggcgactggaagttcctggaagggtgggttgttgcaggttagataggaaaccgtctgcagatgcagttttgggaagatgatgtttggttcggctgggtatcatgcagacaagcggagtgtcaagtctggagagacaggtctggccagggacttagatgtacagccctcagcatgtagatgccacttaactctgtgaggtggccggggagtgagtgcagagtgactgggaggagcaagactggcatgggcgagatggggcgattgcggccgtgaggcctgagcagtgcctaggagggagagggagaagcagtgtgagcatgcaggcacgcaggagtccagttgtacacggaggcgaagcactgttcagatcccgctgcagtgttaactacggtaaaggcagagttgaccactggaggagtccttcagcgtggaggccttcagcgatcttggcaagcaccaattttcgtggatgtaggagaatgggagcagaggaactggaggctgcaactgcggaaaacttttgtggggttttgctgcagagagaagcagagaaatgaagcagttgttggtggaagaaatggaatcaaaaggttttgagatagagaacagagggaagagctgttggaataaagtccaggaagagtggatggtgtctagtgagcaagtgatgtgtggccctgagtagaggcacgtacaaatcacctgtgcctgagctgcccttagaactttctgtgatcatggagatgcacgtctgtgcttcccaatattgtaacattggccgcaggttgatatggaccacttccagtgtgactagtgtgattgaggaactgcattttaaatattatgtaattgtaattaattttaatttaaatagccacacgtagctcctctataggccaggtcagagctctgataaggctggatatgggaggaaaccctggtagagggttgactgtagaggttcttttggttttggagtgaatcaggaaacagccatcagctgagtgaaggtgagggtggtggtgggtgtttgaagacaagggaaaagtgtgaaagaattgtttggagaggaaggaaagaagatgtggactggggatgtttccaatgttcgagcacgcagggctccacagttatctacatttgctgtcccttggagcaggagagaagaaaacggttgggacatattctgagcagactgtagaggtaaaatacgtagtttttttttgttttttgagatggaatctcgctctattgcccaggctggagtgcagtggcacgatcttgactcactgcaacctccatctcccaggttcaagcgattctctcacctctgcctcctgagtagttgggactacaggcacgcaccaccacacccagctgattttggtatttttagtagagccagggtttcaccatgttggcgaggctggtttcaaactcctgacctcatgtgatctgcccgccttggcctcccaaagtgctgggattacaggcatgagccactgtacctggccaaatatgtagtatttttaataggataaagcctacataattctgtccacagttcctttacttagaaattgctcatttgttcatgttaatgctatgtttattacagataacagcatacaggttttccccccccaccccgtcatgtacagctgaatcatgcagaatttgaagatcaagatgatgaagccagagttcagtatgagggttttcgacctgggatgtacgtctgcgttgagattgaaaatgttccctgtgaatttgtgtagaactttgacccccgttaccccattatcctgggtggcttgggcaacagcgagggaaatgttggatacgtgcaggtgggtccctttgctgcatatttggtgcctgaggctctgtggatttcccctccatcaatcatcttaccctctcatccccctcagatgcgtctgaagaaacatcgctggtataagaaaatcctcaagtcccgagatccaatcatattttctgtagggtggaggaggtttcagaccatcccgctctgttatatcgaagaccacaatggaagacaaaggcttctaaagtataccccacagcatgtgcatcgcggagcagccttttgggataaaatatgattacaataacttgcctattgctgagattaaaccttacaggctgcgttattttagctttgtgcttttcctttcataaaattccactcctaagatttttctcttttctgggagcagggaggtggtttggagtatatacgtaaatctatatccaaatctaaatgtccatatccagtatgttaaactagaatctaaaatttgtggtttgctatatttctttttttccttttcctttaagaccctatcactccacagggaactggtttcttggcaatacagtctgtcagtggcataatggtaactatcttggatgatttcttttacagattggttttgagaaatatatcctgaatgtggattactatgtacatgagactttaagttgaaaattactcatttttattaatataaagtaaatttccctttgcttttaatcttcgtacatccttttcagtagggtgtgggattagaggaggggaggtggaagaattataatggtacatttcctatttttgtgcatcttttgcatttatttatctaagcaagtacttaagcagtgctcaccatgtgctaagcactgtatgaggttgtgaggagccatcagagaccacccagacacaagactccctgcagctgtgctggggtagcagtctgttcactccattttcatttgaccagtcaggcagggcagggtttactggtcccatttaacagagaagaaagcagaataatgagcagatggaatcttccctggaggtccaaattttaatttcctaaacattgcaactgtatttttcttttccatttcgttccaaataaatcattatagtaaaattacattcctctgaaatcactctcaggaaagtactcaagtagccttttttttttctttcttttttttttttttttttgagacagagttgcactctgtcgtccaggctggagtgcagtggcacaatcttggctcgctgcaacctctgcctcctgggtttaagcggttctcctgcctcagcctcccgagtagctgggattacaggtgtgcaccatcatgccgagccaatttttgtatttttagtagagacaggatttccccatgttggccagactggtttcaaacttctgacctcaggtgatctacctgccttggcctcccaaagtgctgggattacaggtatgagccactgtgcccagcctcaagtcacccttgttagtttggcttaccaactttaaagttttggattgcttttgtcaagccactgggttgcaagttcagatggtctttcttgtttttcttagctaattgtaagtaaaattcactttggtaatttattgtgtcacatagaattgaagtttttctcttgctaatattattcctattttcaaattttggggttcctgttagcctgattttcggatagctgccacataagttgtccttgatctggataaatccataaaaattgtgaagaaattaaagctaactggttttccatataaaatttttaagaacacttcatttattaaggtctgtatatctatatattctcatatttataaatctccatattgtttgagaaaaggaatgaaatacctctaaaatatgggcctcatatttttagaaaagtgtttgaaatcttttataaacttcatattttgtttgctcctttatattctgtattacttaaatatgctcagaaaagcagtggtaaacagctatttaggaattgaggctgttactcctgacttccatgtgagactgccacagaactcatattgaaaatatgtcattttatccactaggttttgtttcctactttttaaatttgtgttaagaaagggaaaaaaatcacaagtttgtctaactcagtagaaaaatcgacaaagcatttgcagacaacttggcaagggtacagagaaacggatgtactgtttttcagtatttggggagggtggtttgagcagcatttattgacaatttcattagtggggatgtttctattgaaaacagggttaggaagtcataaaatgttcctgcaatataaggtaataataccaccagcgtttatcttactgttttcatgttctaagtgcatgcatctgagtaaaaggatctgggctgcagtccagtctgagagatgccagcaaaggcttcctaggccagttcagtccagtaaatccctcttcgatcttctcttccacacagacagcagtgatgagcatgcccatgaactcacatgattattttggggaaaatgaaagagttgtattctttttgaggtagtaattccactttcaggggcaaatacattttgattattttatcacccttcagtgagttgtttttgttctttaatcaaggatgtatgtttgaagtaagaagtaaagcataaagtatatgattttgtgtgtgtgtgtgtgtttttatcttgctgtacctgtagggaatgtttaattcagccttggaagtggccaaatttgaaggtgctgtgattcgaactgtcagtgggataagggggcagatcaagaaagcactctgagctccagaaggagctttccgggccagctttgaggataagctgctgatgagcggtgagtgtcttaagtagtgttcagggcagggtgttaccattcatgcttgacttctagccagtgtgacgagaggctggagtcaggtctccggagagttgagcagctccagccttagatctcccagtcttatgcggtatgcccattcgccttgtgtctgcagccccctggccacacccagtaacagttctgtgatctatgagaatagttcccttagcgacctttcccttcaaatactttgcagccaggtagagaagtttggagtgaaggttttgttctttgtttcttcgcaatatggatatgaatcttcttttgaaaatattaaagtaaattacctcttttcagatattgtcttcatgcaaacttggtatcctgtttccatcccagccttctgtaacccagtaacatctttgttgaaaccagtgggtgagaaagacacctggtcaggaacgcggaccacgggccaactcaggcttgcccatggtgtcagactaaaggcaaacaaggactctctgtataaggtactggtcgtgtgtgtgttagtggagatgaagcctgtgctctacagacagggagtcacacagacacttttctataatttcttacgtactttgaatgttcaagtataaagtctaacattaaatttgattgaacaattgtatgtttgtgggatattttggagtggaacaccaaaaaatggtaatagtggttctttctggattgaagacaaacttttcttttttaaaataaattttattttatatatttgaggttgacaacatgatcttaaaggatacatatagatagtaaactggttactatagtgaagcagattaacatagctaccatctcacatagttagatttttgtttgtgtgacaggaacagctaaaatctacttatttaacaaaaatcccaaagacaatatatttttattaactatagccctcatgatgtacactagatctctaacttgttcatcctacatgtctgctactttgtattattttaatgtacatctccccatttcctattggtcatttcctatttggcccatttttcaactgggttgtttttctgctattaagttgtaagagttctttactgatttttggatattaacactttatcacatatgtggtttgcaaatatttcttccagtctgttggttcccctttcattttgttggttgttcctttgctgtgcagaggctttttagtttgatgcagtcctccttgtttatgtttacatttgtagcctggcttgtggtgcgatatccaaaaaattattgctaaggccaatgtcaagaggctttccccctatgttttcttctaggagttttatggtttcaggtcttatttgggtctttggtcttgtatctgttttgagttgatttttgtgtatggtgtatgatcagggtccaattttattcttttgcatgcgaaaatcctattattgaagagactatcttttttaccattgtgttgtcttgtttgcccttgtcaaaaattagttgacagtatatgtttggatttatttcaaaggtctctgttctgttccattggtctatttttttgtttttatgccagcaccatactgttttgattactatagctttgtaatacaattttaaatcaagaggtgtgatgcctccaactttttctttcacagtaatccgttggctgtttgggattttttgtggttccataagagtttcaggattgttttttcttttcttttttttttttttgaggcgaagtctcactctgtcgcccaagctggagtgcagtggcataatctcggctcacggaaacctctgcctcctggattcaagcaattcttctgcctcagcctcccaggtagctgggactacaggcacatgccactatgcccggccaatttttgtagttttagtagagacagggtttcactctgttggccgggctggtctccaactcctgacctcgtgatccacccgctgcggtctcccaaagtgctggaattacaggcgtgagccactgtgcctggccaggattgttttattcggttctgtgaagaatgccatcagaactttgatgaggattgtgttaaatctgtatatttgctttgggtagcatgaacattttaacaatattaattctcctgatccataaacacgggatgtcttttcattcgttcatgtctaaatttctttcatcaatgttttatggttttcaagtgtacacatctctcaccttcttggttaaatttattcctaagtttttgtttttctttgatgctatcgtaaatgagattattttcttgattgcttcgtcagctacgttatttgtatatagaaatgcaactgatttttatatgttgagtttataccttgcagcttaactgaattgatttagtagttctcacagttttttgtggaatctttggagtttttttacgtaaaggatcttgtcatctgcaaatagagataattttacttatttaatttagttgcctttttttcctcatctgattgctcttgcaagtattctattgaataaaagtgatgaggctggccatccctatcttgtactcaatcttagtggaaaagctttagttgttccccactaactatgattagactgtgggtttttcataaatggtctttattgtgttgaggaactttccttctatacataaactattaagagttttatcaagaaacgttgctgaactttgttaaatgcttttactgcatcaattgaggtgaccatatcgttttatctttcattttgttaatgtgatatatcacattgattgatttacatattttaaatcagccttgcatgccagggataaatcccacttaaacacgatgtataatgtttttgatatgttgttgaattctatttgctaaaatttttttaggatgtttgcatcagtgtttaatttattggagaagttgacctgtagtttttgtttgtttggtgtgtgtgtgtgtgtgtgtgtgtgtgtgtgtgtgttttggtttggcttaggtattaaggtgatactggcctggtaaaatgtgtttggaattatttcctctcgctctgttttttcgaagagtttaagaagtaaactcccaggggatgggagtgactctggacatgggagtgacatgatagtgactctggaccctgcagtggtgggacacagcagcatctctgtctctgtgaggccaggcgcagcatcagcaaggaccccagaatggtggagcactactgtggcttgggccctcgggggcagggaccagtgcagcaactacttctctccctggggaggcaggtgcctgggcaactcagattctccagagctagtccagttccaaggaagcagggttctacagttgtttgtcctgaagggcaaggtaccccagttcagccaatgccgttttcctgggatatgggggtgccatgttggctcatccctggcaggtgtggctgctcagctcagccaagacactgattccctgtgaagcagggcagcgcttcagctctcatgcagtggggggtgtgactgctcagactggccaaggcactgattccctggaaagcagggcaccaagtcagctcaggctccaaggggcagggcgcaatggcagctgggaggggaggggcacagcagcatggccctgcaggtggggtgtatgctgtgatgtggacatcatttgttcccaccagccatttgaaatttcatccatttgaaatttgattccaaatgtggtggtgtgggaggtggggcctagtgggaggtatttgggtcacagggcagatcctttatgaatagattaatgccttttcatgggactggattagttaccaggagtggattgttatcagagtgagttcagcttcctagactctcgtgtttcctctcttgccatgtgagccccttgcatacacctgtttccccttccactttccctatgagatgaagcagcacaagaccctcgccagttgtgctgcccaatctcggacttttcagacacaagcagggtgagccaaataaaccttttttataaaataagttaccccgagtctcaagtattctgttacagccacactaaatggcctaagacagtgtaacagcggctcgggggtggtgggccactaggtgggtgtgatatagagcaacaaagcctgaggatggaagaagggtgcggtggcagctcaccctgggtgggacatgctcccgaagtggtccaggtccaggagggcacgttgcagcagcagctggtccatgggggtggggcacaatgtcagttccttctctgaggggagtgctggggctactgggcccctcttgcttccttatccctgcagggagacatcccctctgcttcaggctgatccctctgggggaatgggtggtgggggccagatgtttccttccctcctttatgtgaccgtcctggttttctgtgctctgctggatttctgctactccttgatgcactctggggctctcttttagtgactttcatcaaaatatagatgtttgctgctttggctgtctttgtcaggggatgagtgcaaggggctattgatcagccccttgctggcatcactccctcttaaacttttcactgggtactcttttgaactattttttcccccaccgtatacatgtattttttaaacgttaatgtgctaatttctactgaagcaatgtggatttttctgaaagttttaatgttttaataagctttttattgaaatgttaatgtccacacagaagagtgcccgaatcataagtgtgcatctagatgaactgtagcacaccaggctgccacgccctggaccaagcagtagcctcgccctgtggcctctcccaggcactgctgccccaacccacagaatagctactttcccagttcctgatgtagatttgttctgcctggttttgacttctataaaatacagcacattctgtttagcctggcttctttggttcagtattacagaacacatccatgttcttgtctatggcagacattgatttatcgtcattgttgagttccattatatgactgtgtcaccatttttccattgatgagtaaaatgatttcctatttttggctgttatcccacggccctgaacactaggtctggatatgggacttgcaggtatgcaggggcacacgcacttctgctggaggatccctgggtggggtggagactccagggcacctgtgctctgcttcagtatggagtagttggagtgtattgcttagaacaaaagagatgagacactaacactgtgtgtatattctaaatcatatatcagtgaagaaatgtgatgtttgcaacatcttctctggggatgctaaccccctaagtcattattaccatgcatgtaagcacctcacctagatctgcactccatctagcagtgagaaattccaccataatctacacaccataatatcatcaatgtgtctagaagtcagatcctctatgtgtgaaccaagacaatgcctggcaaacaagacagctgggctctcaggtctctgcaccatggggaggtgtgtaaggccattcttgaattactataaagaaatctctgagactggatgatttacaaagaaatttacaaagaaatgttgaattgactcacagttctgtgggctgtacaggaagcttggtgctggcatctgctccttttctgggatgcctcaaggagtttttactcacggcagaagatgaagtaggagcaggcatctcacatggcagaacaggagcaggatagagagtgggtaggaaaggtgtcacaaatttgaacaaccaaatcccatgaaaactcactatcataaggtgaaaaccaacccaagaaggatactctctcatgacccaagtacctcccacaaggtcccacttccaaccttgtgaattacatttcaacatgagatttagtttagcatccaaactataccattattcccctggtctctaaagtctcatgttcttctcacatggcaaaatacaataatgtcttcctaacaatccccaaaactcttaactcattccagcatcaactcagtcgaagtccacagttcagagtctcatttgagttaaggcaagtccctttcacctataggccagtaaaataaaaaacaagttatttacttccaaaatacactggtagtacagacattgggtaaatattcccattccaagagagaaaaaactgccataaaaaaagggctacagatgtcatggaagtttgaaaccccgcagggcattcattaaatgttaaagctccaaaataatctttttttgactccgtctcccacatccagggcacactgatgtaaagggcaagctaccaaggctgagggcagttctacccatttggctacgcagggttcggcccctgtggctactctcataggctgttaagtgcctgcagcttttccaggtgtaggatacaatctgccagtagatctaccattctggaatacagaggacagtgacctccttcccacacctccactaggcagtgccccagtggggactcggtctggggcctccaaccccacatttcccctccacactgacctagtagaggttctgtgggagggttctgcccccacaacaggcttctgccttagcacccaggcttttccatacatcctctgaaatctaggtggaggttgttgaggctccagcactcttgcattctgtactcctgcaggtttaacaccacatggaagcttccaaggcttaacatggcttttgctccccaaaactgtggcatagcattatctggagcctcttgagccaaggctggagctgaatcagccatgaggttgcacaggactgtggggccctaggccagacccagcaagccattcagttcacctaggcctcaggacctgtaatgtgagaggctgcctcagagatatctgaaatgcctttgaggtctttttcccattgtcttggctatcaacacttggctcctctttagttacgcaaatacctctagcaagtgattgtttcgcagcccacttggattcttttcaggaagaggggatgttattttctgccacatagtcaagctgaaaatttttcaatcttctatgctctgctttccttttaaatataaattccaaattaaagtcatttctttgatctcacatctgagtataggctgtagacacagccaggccacctcttgaactctttctgcctagaaatttcttctgccagatactctaaatgattgttctgaagttccaacttccacagattcctagaacatgaatagaattcagccaaactctttcctaaggcataacatgggagatacttgccccagttcccaataagttactcactttccgtctgagatgttgacagcctatgcttcattgttcctaacaccatcagcattttgatcacaaccatttaaccagtctctataaagtctgaagcattttctaatcttcctgttgtgaacccccaaaattggacacaagtctcagttaactcagaaagcttattttgccaaggttgaggaggcacatctgtgacacagcctcaggagatcctgatgacatgtgtccaagatggtaggggtacagcttggttttatgcattttaggcagacatgagacatcaatcaacatgtgtaagatgtacatcagttcagtctggaaaggtggaacagctccaggtgaaggcaggacaacttgaagtggggaaggggcttccagtcttagatagataagagacacatggttgcattcttttgagcttctgatgagcctctccaaaaggaggcaatcagatatgtgtttctctcagtgagcagaggggagactttcaatagactgggaggcaggtttgctctaagcagttcccaggttgagtggggtcccaagatttgttttcctttcacactgtcttctcctgagccccccaaacccttccaacctctggccatgactgagttccacagctgcttttgtactatcaggtatcttttagccatactttatttaccaattatctgtgttaggacattgttgcattgctacaaagaaatttgttgggaaatttacaaacaaaagaggttgaattggcttatggttctgcaggctgtacaagagtcatggtgcctccatttgcttggcttctgaggacacctcaaggggattttacttggtggaacatgaagtgggagcagacatctctcatggcagggtgggagcaagaaagagagtaaggcaggaggttccacacatctaaacaatcagatcttgcaagaactcactcactgtcatgaggacagcaccaagcctcgcggaatccgcttcaatgacccaaccacctcccaccaggtgccacatgcaacattggggattacgtttcaacaggagattgagagaggacacacatccacactatatcaggaggtgtgtgccttgcaaccatcaggggatgctgcaggactgccctatggtccctacacagctgcttagtaagaaccattcactccaaggaacctgtgccctgtgctcaatgatggggactcaggagctgtgtcctctctggcctggcagagtcccctaagcagagacctgtgtatggtctcggcaggtgcttcctcccagggccctcccgagggggaaaccaaaccttcctcctcctcagtctggagtgtgagctaagcttcagctccagggctcagggaggggctgggcagtccttggatggaaacatatttgcatgagcagcccctcctctggcagaggatggagaagaagaggagacctggggcagctcaggcccactgttagggctcaggggctgtgtccaccatggcctggactcttctccttctcgtgctcctctctcactgcacaggtagggaaagtccttataaactgagtctcagtgtccaacctacaccatcccctgtggctcagacctacaagaagctttaccctgggaactgccttatcacccatgatgtctgtgttttcaggttccctctcccagcctgtgctgactcagccatcttcccattctgcatcttctggagcatcagtcagactcacctgcatgctgagcagtggcttcagtgttggggacttctggataaggtggtaccaacaaaagccagggaaccctccccggtatctcctgtactaccactcagactccaataagggccaaggctctggagttcccagccgcttctctggatccaacgatgcatcagccaatgcagggattctgcgtatctctgggctccagcctgaggatgaggctgactattactgtggtacatggcacagcaactctaagactcacacagtgctccagacccatgaggaagtaagacaaaaccctcccctctactctcctggtctagtgaaatcacccctgctggtggctctgaccaaatctagctcagggggtgacatctgttgtctcatcgacagcactggagctcccacggagaagtaggtctaacaaagtcctaccttgctcgcatttcacaggcagacatcccttgctcaggggtaaaatctctcagtgttgacattgaagaaggcaagagggctgggttggggttcatctcagctcagagtctagaagtgactcagagatgctgctggtctgagagttttaatatgagccttgggatacaatacagggatgcagatgggaattgtattctctatgtcagtaacgaaccatcagtaattgaaaagtcaatacattgagaatagcataaagcatgaaatactttaggataagtatgacaaaaattgttgttttacacactagaagtcctaaaacattgtttagacgcaggtcttaaagaagacctgagtaaatgcacagataatccttttttttttttttttttttttgaggcagagtttcactcttgttgcccaggctggagtgcaatggcatgatcttggatctcggctcaccacaacctccacctcctgggttcaagcgattctcctgcctcagcctcccgagtagctgggattacaggcatgtgccaccacgcctggctaatttttgtatttttagtagagatggggtttctccatgttggtcaggctggtctcgaacacctgatctccggtgatctgcccgcctcggcctcctgaagtgctgggattactggcgtgagccaatgcgcccagcccagataacccttttttttttttttttttttgagcaggagtctcgctctgtcgcccaggatgcagtgcagtggcgcgatcttggctcactgcaacctctgcctcccggttgaagtgattctcctgcctcagcctccctagtagctgggactacaggcatgtgacaccatgcccggctaatttttttttttccttgtggcaacggggtttcaccgtgtttggtcttgatctcttgaccttgtgatccgcccaccttggcctctcaaactgctgggattacaggcatgagccaccgtgcctggccccagataaccctttttatgtgagagtgtagagaatgttgctgcagctggtgtgggatgggggatggctgggttgagactgtgttgtcacctgcagtgtacacctgaggtgacatggttctgaacatcactttccccattgaaggcccgagtgacctatcacttgcttctcaaaattcaggaactaggtgactctaggagagtgcacaggaagctttctgcatattctttcaagagatttcgaggtcactgactcttttttcaagacttaaacacaaaatccacatccatcattcttgcgtaaagagaccattcttttttttttgagatggagtctcgctctgttgcccaagctggagtgcagtggcatgatctcggctcactgcaagctctgtcttctgggttcatgcccttctcctgcctcagcctcccaagtagctgggactacaggcacccgccgccatgcccggctaattttttgtattttttagtggagatggggtttcaacatgttggccagaatggtcttgatctcttgacctcgtgatccacccgccttggcctcccaaagtgctgggattacaggtgtgagccactgcacccggcccaagatggggtttcatcatgttgacctggctggtctcaaactcccaacctcaagtgatccactcacttcagcctcccaaagtgctgggatgacaggcgtgagccacagtgcccggcctagtacattgtttaaatggtgcatgtaaaacctcatggtactacaactgcctggtgacagactcaccagagtaaataactatcctgctgttctccaaccacatgggattccccaaacaaagatttgttgagtccaagatgcatcatgccagaactcttgcagtcatacacataatttgtttcattttaataaatacggttatcttttttcttcagtttattgtttttaatgtatcatcttctaggtttcattacacatcaaagatgaataatttctctcatctttaggacatgctgaaaacactcattagtgattttgaacagtattatttcctaaacatcctagttggaatggttgatcctaaaagctaccatgtgtcaggctcacctgagtgcagactgtggtctaaacaagctaaagttttaattcttccatcttcaaatacggagcatatttgcttgttttgctctttagcaaaacactgcaaagtcattcgccaggatctcctgcagactggcattcagtgatggagaacagactcctaggtgagatccctggtcacaggatccagatgactatgactgcaagtctggaaaagaagagacagaacaaagatttaccagcataaccctctgagaatgtgccccagccatcctggagggaagagctccctattgacccagcactgcagaatccacagaggaaggacagctctggccaccagggagcagccacacgacaagagaggacccggtgtccccacaggtgaggaaatgagtccatggggctggtcagtgctctcgatttcattctgccataacaggactttgtgtagtcaccacctgagtcctatacagtgaacagccaaggagacatggacagattcacccctgaggaacccagtagaatgtgaagtctgccctgaggtcacgaagaaaagactcggggggctgcctggcctggccctgatggagggggccatggacagaacaacggggaggcaggggtgtctctgagaggctctggtcaccttgtcatacaatggtggtgtacaatgtcgcaccatggacactagggggcgcctgcgcaccattcctgagaagactgggtgtgatgagagcaggaccagcgccacctgtcctgcttggtgccctatgcttagggctcacagatgtcaactctccaccccctgggaccacacagccccacccctggcactctctgacatcctcaggcagaggagcttgacccagggcccagggtgggatcagaaagctggagggtctgatttgcatggatggaccctccttctctcagagtataaagaggggcagggagagacttggggaagctctgcttcagctgtgagcgcagaaggcaggactcgggacaatcttcatcatgacctgctcccctctcctcctcacccttctcattcactgcacaggtgcccagacacagggtcaggggaggggtccaggaagcccatgaggccctgctttctccttctctctctagaccaagaatcaccgtgtctgtgtctctcctgcttccagggtcctgggcccagtctgtgttgacgcagccgccctcagtgtctgcggccccaggacagaaggtcaccatctcctgctctggaagcagctccaacattgggaataattatgtatcctggtaccagcagctcccaggaacagcccccaaactcctcatttatgacaataataagcgaccctcagggattcctgaccgattctctggctccaagtctggcacgtcagccaccctgggcatcaccggactccagactggggacgaggccgattattactgcggaacatgggatagcagcctgagtgctggcacagtgctccagcccaatggggaactgagacaagaacccccttcttcctcccccaggagggtgagtgccgccagctgctgctcacgcctgacctgtagcttctgctgctgcaggttctcccatgggccacggggcagccagggccctgcctaggagtggaggctccaccacttttgtcctcagagtcaggaacagggactccaggaatgagaatatcctgctcctgcagcttgggacacagggtctctgcactgacatcctgggctgaggtggcaggtccagctgtgtcttcacagtccttcctgtgcctgcccatggtgtggggagggagggagtggggaagggggtgtgggcctttgagcttcactagagacctgagggagcagaggtgctccccaagacctggactccttccctcaccctcctcccatcactctcctcactgtagctatggccaggtgagggctcagggctacttgaggaccttgctcagcccagggcctccatcccaggcattgtttccaaactctgtaagggctgtctctgaatctgtagaaacagttatttctatgtgcccaggactgggttagagggcaccaaccccaccccttgcaaactgctcctcacctcttagcgccccagtgaggagaagaaagagttagaaatcaggaatctactcagggctcccctctctcccctttcccagcctcccctggctttctctttctacagaaacaccaaggaggcagccaccaaggacgaggggaggcccaggcattataccaggcagcggagccagccagtccccccagatggtggagggaggtggtggaggtgtctgggaccagaaaatagtgaggaccctcttactgaagtgaggacgggtggcataaactgaggcccagatggtggaccagatctcctgagccatctactcatttcttcgtgtgttccagtttgggtaagaataggctaaaaaaaaaaaaaaaaggctttgaagaggttcctttcctcagataagaattcgtagaggattattgcccactcaggcattgaggggaggctgagcctcactctcaggccaatagaactgggggctttcaagggaatttgattgtactgagctcccagactctgacatctaagatttttgccctcgtagccgaacccagcactgataccaaaatggatgaaggctgatagataagcctagaatattctagctggcaccatctcgtggaaaagagaatcaagttagaatattgatgtgataaggtggcatcgcacagtgaggggaggagagcttgcatgggggagggtagaggagccactagagggctggacaaggaggagacagtctgaggtaagtttgtgaggaaaactccagatgcttcagagaagatggacaaggaggtaggcagtgtgaaggccatgggaccagctctagtcaccgggagagagtggtcagattcagcaccagtgtctggggaggaggtactgaagcctgggtgaggggagaggctcaaggctggccttaggacctgagtggggcacagtgatcacactgctggggggtccttcaagtgcaagggggctgcaggaaggcttgagctcattgtcacaatgaaaacttagacaacagctccccagccttgttcaaaggtgtcacaggactttttcctctccacatggcaacgtggagaagaaaacttatctctgagatatataagatgttagttctccataacctctcttgtcccctggctgaattcctatttggaaacaaaatgactctccagttttatatatgacatcctcacaaaaaaaaagttccagaatgagaaagatctgccctccctgacccactggtgaggaatctcagccttcaggacaaccagactaaatcattcatgccatctcccatgacagcatcatgtggaccagggagcctaccttatgggtttgggccacacactgcctgtccctagcattgcagctggggacacttacatgctgaactcatggctgggagatctgaggtccagacatgacaggaaaaggaaaaagaccaggagctctgcctaagtagcccccctgtgtgaatcactctaccctccaccctcatcttcagttcgtgatgggtattgtcttgtgaaaactgaaagctgggctgggacacaggcaagagagtctctgactcacaaatctccatcgtgggctctctggcctttctgatattcttttcacacatcaattctgggccaagacacatccatgctcatcaagaaggcattgataggagaatcaggtagcctccagagagacaggaagcagataaacaccctcatgttggcctcctaagcccagaggagaaaaaaaaaagttggaggggaagaagttcaagaagccacactagaagccactgattaccatcacctcggcacctgtcctccatctgcccctctttcaagtgaggaccagactcaggggacagcacctgcacctccccctctgtccatgcactgtgtagggagcctccttctgctctcatctcaaggtggctgctccgccaggtcagccgtatcactgctgagagtcttccctgggtcctggtcacagggtctgggatcagcagcaacctggctttgattcagctctgaccctgccccttcaggacacaaagcccattattaaagggataactgaactctcctagttcactcaaccttagattttccttctcagtgtccttctagaaagtgccgcctctactaaatgatttcatgttatttcctcaggtctagagctatttgatttccaaaattctatactcttctgttctcattcccggtcatggctcattttccctcagcagctaatgatgctaatcatgtatctaccccccattgtcacaaaaaagagagatggaagagttccttagataaatacagggttagcaaagaaaagtttcattatctcttaagaattactccaagatctggccaggcgtggtggctcatgcctgtaatcctagcactttgggagtccaaggtagacaggtcacgagatcaggagatcgagaccatcctggctaacatggtgaaaacccatctctactaaaaatacaaaaaattagccaggcatggtggtgggcacttgtagtcccagctactgaggaggctgaggcaggagaacagcgtgaacccgggaagtggagcttgcagggagccgagatcatgtctctgcactccagcctgggcaacagagcgagactccgtctcaaaaaaaaaaaaataaagaattactccaagatctaagaaaattaattccagttcttcaagagtttactcctcagaaacaacagcatgaatacattaggtagtgaatgttcttggtcttctcaatgaataacgtctgaaaggttcagagtatatgtttcaaaaaggtaagtgcataactttcaaaaaaatgtagtattaacatgtcaacaattttaattggtatatatatttctgaaaaaaaagcagtatgatggtaaaagaaatgtaaaaaagcctttgtaaaacccagtgcttacagtccaccaggatagcacctgtgaagcaaatttcctttgctgaagatacaccgccttttagaataatagcaagatagtttgaatttgtcttcttctctcacagcaatctaaaaattaacttaatcccatttatatgacatatctagaaatattcctgtacatgtggacattcccatcgcacacctcccatccaggctgtcctaaagtggcatctcctcttcttctgctcatgttctccccctctcctcacctctcctgctgacacgtggctcctccctgccttcctctccagtagccccagcagatcaggcccaaccagtgaacaagctcctggacttcttggatttctgaggacttgccctgccagggtgtctttctcaatcacaatctctccttcccgggagtccaattctcctagatcctgttatttatctaatgttatacatctgtatctacttggtggacttccctacatcttcacccgaaccccaggaatcttcaggtcatgcccatatgaccttagttctcctggagtcccttcttccttcttcccctgtgatcccaccaagtggagatctcttctcagaccctggagtgcagcagggacttctctggtctctgccccagggattaagggggtggaattgaggactcctgtgcccttcctatgcctgtgttttcatcagggtcagctgcacaaggtagggattcccactctcagagtatgaagaggggcagggagagatttggggaagctctgcttcagctgtgggcacaggaggcagcactcaggacaatctccagcatggcctggtcttctctcctcctcactctcctcgctcactgcacaggtgactggatgcagatcgaggggagggtccctgggaagcctatggattcttgctttctcctcttgtctctagaagcagaatcatgatgcctgtgtctctcccacttccagggtcctgggcccagtctgtgctgacgcagccgccctcagtgtctggggccccagggcagagggtcaccatctcctgcactgggagcagctccaacattggggcgggttatgttgtacattggtaccagcagcttccaggaacagcccccaaactcctcatctatggtaacagcaatcggccctcaggggtccctgaccaattctctggctccaagtctggcacctcagcctccctggccatcactggactccagtctgaggatgaggctgattattactgcaaagcatgggataacagcctgaatgctcacacagtgctccaggcccagggggaggtgagagaagaacccccttcctcctctaccaggagggtgagcgctcagctgctactgctcaggcgtggcctgtggcttctgctgctgcagcttcccccatggtccaggggcatccagggccctgcctcagagtagaggcttctctttttttctgttctgagaatcatgcacagcagctccttcctaggaacagggcctccagggaccagaacatccatctctttgtaccttgggacacagggtctctgcagtgaagtcctgggctgaggtgtcaggtccaactgtcatcacaaacctgatgcagaacctgtgtctccatcaacctcatttcctgatttctggaagttccgactgttggctttctgtccctgctcctcagggtgaatcgcttggcttctttcctccccagcctactctttttaataaaaccctttccaaggaggaataatgtccatacgagaaaacacctatatttataatataccatgacacccattttggcatgtttctggatccttgaaagcatcaccaccaccgagctatgcaagctgtgaccaaccccagcagctcctcatgaccctttgtcatctccctttctaccccaatgccctcccgggaagccacagatcctcctctgtcattagtgtttggtttccattttctggaaggtatcagtgttcacaaacattctcttgccatttgttgaggcttctttcactccgcacactttttgagattctccctgttgttgctgaatgacatctcatcccataaagggctcatcagtacctttgagggcccctagccattttgcctttcatgcccattcctgcatttgtatatacacatatagaatccagggtagcctatattccttttaatctgaattttaaaaaatcaatacattttctggggcccctaacagcgtcgagtcctgtaggcatttgatcttctctctccagtgatgctcagccctacttgcatctcatgcgattatactcacttctcgccattattcaacaattttgttttattctcttggttttaaataggcaatacacaaacaagatgccacatgagaactatggaaaccacttccccctcctacatcctgtctcctggcctgttggtttctctcagctgaagtgaccaggaatgcttacatttatgttccctcccagccaggatctgtgtgtagaaacaagggggtctgtctgtgtctgtgtgggcaaccacattatgttttctttagtaccactacaaccttactattgacaaacaactttttaattcctgagactgtgacttcatgtaatcctgacagtagcccgattattgcttttgaggcagtggtcctgattggagaggaactgtttgtgacctggggatggcgttctctaatttatcaaatgtaaacactggaggtcagttaaatttgaattcggtaaaacaatgatgaagaatcaataggtaggctgggcgccgtggctcacaccttaaccctggcacttttggaagccaaggttgatggattgcttcaggccaggagttcgagacaagtctgacccacgtggtgaaaccccgtatctcctaaaaatacaaaaattagctgggcctcatgacatatacctgtaatcccagtgactcaggaggttgaggcatgagaatcacttgaacccaagaggcagaggttgcagtgagctgagaccgggccactaactccaggtggagtaacagagtgacactctgactcaaaaaaaaataccaaaaaaaaaaaaaaagagtcagtatgtgtatcccccagacaatattgtgtatttaaatataaacataactgggtgccctttaatttatctggcaactccacacagtgtcacaacctggaagaagcatagctggggcagtcatccccttactgatgctgggtctaggggcttaactacaaagacagagctttgctagcaaagatacactcaagtgagcacatcagtgagcatgaaatgcatgtgatataattcccaatgaatgatgcctcctcacttctctaattattctttctattatccttcaagtctgcagattcagggcctccccagggattgcttcagcctgagcgctagacaagtgatctcatgtcctgtcacacccagatgcatggggctactctgtccccacacagaggggcttcagcctggggtgcataagtaacatgtgagagagagaagagctcagcctggctctgcttatatctagtgagagaccaacttcgggttcatttgatgctggaggctggtgagctgagagcagaggagagaccaagccttagagtgcagggctttcaggagagaaattgggaacctggaaatgggccacactcttcagtgaggaagaagcaggcagctctaggcacagccctgcattcctagtggcttccccttcatcaagcttgactccctgctttgatgtctgtcagggaatctacttcagcaaggtgaagatcccagggctttactaaaaatagcagtagaccaggcaggtatgtcatggttcaagagttctgtgcacagaaataaatacagatgcatattcacaagggccctcacagttgtctcttttggagtggaagagatgaagaaaggcagggagaaattgaaagactcagtcggtctgggcctggggcagcactggatgctgtggacttatccctgaagggtctgcaggtgaccacagccaggaagccagcccctgctatgaccctgtgtcatctgctcactgctcactgagctcagcagctgtgtcctcacaggaaactgggtgcagccagcttggccttctccaccccacctggaaaatgtgggcaggtgactgtcagcattgagatcctatgaaggggctgggagacaagggaagagggctgatttgcatgaagcaatcattccacacccttatctttaaactatatcccattaatggaagctctggggccatccaaacctgatcaatctaagaggggttatcagctggaggtggtcagagtgaggaagaaactggcttccttgaaagactcatcaacacagccaccaactctgggacaaatggggtgactccctataactgtcacccgatattagccacaggagcctgagcctagtcccctcaccttattgcttctgattctggtccagtcccctgttgtccctggacccttgcctatgtctgagtccagggtggcaggggtagccccatctcagtcaacatctatagagaggtaagagctactacggcttcaagcagagtccacagttttacccatgagggcctcttttgctcccccaccctgtcacacaggtgactactgctgtgggtctggtggagtggcccctggcccctgaaggacacaaggtattccttcctctctaacaccaggcatatagtggagaaggtatgggtgggtatagaacagattggcttttctagatgcaaatcggtaagaccctggctacagaaaaattatttcacaaaaccccacaccctttcgtgacaaaaacactcagtgaattatgaatagaaggaaattacctcaacatagtaaaccctatgtatgaaactcccacagctaacatcacgtgcaatctgaaagactgaagatatttcctgtaacttcaggaacaaagcaaggatgcgcactttcaccacttctattccaaatagtattggaagacctagccagagcaattagccaagaaaaagaaataaacagaaaagaaattagaaatgaaaaagtaaaataatctctgttttcagatgacctaatcttatatgtagaaaatccataaaacttccaccaaaatagcaaactcttctcagctaagggaccatgttctaacccaatgaagggaagctaagaaccttgataaaaggttacaggaacagctaaatggaataatcagtttagagagaaacataaataacctgatggagctgaaaaacacagcagaagaacttcatgaagcatacacaagtatcaatagctgaaccaaaccagtggaagaaagtatatcagagactgaagatcaacttactgaaatgggtgtgaagacaagataaggcaaaaaagcaggaaaagaaatgaacaaagcctccaagaaatatgggactatgtgaaacgaccaaacttacaattgattggtgtacctgaaagtgacggggagaatggaaccacgttggaaaacacacttcaggatattatccaggagaaattccccaacctggcaagacaggccaacattcaaattcaggaaatacaaggaagatcactaagatactcctcgagaagagcaagccaaagacacataaccgtcagattcaccaaggttgaaatgaaggaaacaatgttaagtggatccagagagaaaggtcaggttacctacaaagggaagcccatcagactaacagcagatctctctgcggaaaccctacaagccagaagagagtgggagccaatattcaacttcttaaagaaaagaattttcagtccagaattttatatccagccaaactaagctacataagtgaaggagaaataaaattctttacagataagcaaatgctgaggtattttatcaccaccaggcctaccttacaagagctcctgaaggaagcactaaatatggaaaggaaaaactgctaccagccactgcaaaaacacaccaaaatataaagaccaatgatgctatgaagaaactgcatcaagtaatgtgcaaaataaccagttagcatcatgatgacaggataaaattcccacataataatattaattttaaatgtaaatgggccaaatgccccaattaaaagacacagactggcaaattgggtaaagagtcaagacccattggtgtggtatattcaggagacccatctcacatcaaaagacacacataggctcaaaataaaggaatggaggaatatttaccaagcaaatggaaagaaaaaaaaaagctggggtcgcaatcctagtctctgataaaacagactttaaacaaacaaggatcaaaaaagacaaagaaaggcattacataatggtaaagggatcaatgcaacaagaagaactaactatgctaaatatatatgcacccaatacaggagcacccagtttcataaaacaagttcttagagacctacaaagagacttaaactcccagatgataatactgggagactttgacactccactgtcaatattaaatcaatgagacagaaaatgaacaaggatatcccatccttagaaaaccccatcgtctcagccccaaaactccttaagctgatgagcaacttcagtaaagtctcaggatacaaaatcaatgtgaaaaattcacaagtatttctatgcatcagcaatagacaagcagaaagccaaatcatgagtgaactcccattcccaattgctacgaagaaaataaaatacctaggaatacaacttacaagggatgtgaaggacctcttcaaggagaactacaaaccattgctcaaggaaataagagagaacatgaactcagctctggaccaagtggacctatagatatctacagaaaactttaccccaaatcaatagaatatacattcttctcagtgccacataacatatattctaaaattgaccacataattggaagtaaaacatccttagcaaatgcgaaagaatggaaatcataacaaacagtctttcagactaccgagcaatcaaattagaactcaggatgaagaaacttactcaaaaccacacaactacacggaaattgaacaacctgctcctgaatgactactgggtaaataatgaaattaaggcagaaataaagaagttatttgaagccaatgagaacaaagagacaatgtaccagaatctctgggacacagctagaacagtgtgtagagggaaatttatagcactaaatgccacagcagaaagtgggaaagatctaaaattgacaccctaacatcacaattaaaggaagtttagaagcaagagcaaataaattcaaaagctagcagaagacaagaaataactaagatcggagcagagctgaaagagatagagacgtgaataacccttcaaaaaaatcaatgaatccaggagctggttttttgaaaagattaacaatctagatagaccactagctagactaataaataagaaagaagaatcaaatagatacaataaaaaagataaaggggatatcactactgatctcccagaaatgcgaactaccatcagagaatactacaaacacctctatgcaaataaactagaaaatctagaagaaaggatagattcctggacacatacaccctcccaagactaaatcaggaagaagctgaatccctgaatagaccaataacaagttctggtattgtggcagtaattaatagcctaccaaccaaaaaaagcccaggaccagacagattcacagctgaattataccagaggtacaaagaggagctgataccattccttctgaaaccattccaaagaatagaaaaagagagactcctctctaactcattttgtgaagctagcatcatcctgatatcaaaatctggcagagacacaacaaaaacagaaaattccgggccaatatctttgatgaacattgatgcgaaaatcctcaataaaatactggcaaactgaatccagcagcacatcaaaaaacttacccaccacaatcaagtcggcttcatcgctgggatgcaagtctggttcaacatacacaaatcaataaatgtaatccatcgcataaacagaactaaagacaaaaaccacatgattatctcaatagatgcagaaaagccctttgataaaattcaacatcccttcatgctaaaacctctcaataaactaagtgttgatggaacatatctcaaaataataagaggaatttatgaaaaacccatagccaacatcatactgaatgggcaaaagctggaagcattcactttgaaaaccaccacaagacaaggatgccctctctgaacacttctgttcaacatagcattggaagttctagccagggcaatcaggcaagagaaataaagcgtatttgaataggaagagaggaagtcaaattgtctctgtttgcagacgatatgactgtatagttagaaaacccaatcatctcagcccaaaaactccttaagctgataagcaactccagcaaagtcccaggatacaaaatcaatgtgcaaaaatcgcaagcattcctacacaccagaaatagacaagcagagagccaaatcatgagtgaaccctcattcacaattgctacaaagaaaataaaatgcctaggagtacaacttacagggacttgaaggacctcttcaaggagaactatacactactgctgaaggaaataagaaaggacacaaaggaatgaaaaaacattccattctcatggataggaagaatcaatatcgtgaaaatggccatattgcccaaagtaatctatagattcaatgctattcccatgaagacaccactgactttttctgcagaatagaaaaaagctactttaaatttcatatggaaccaagaaagaacctggataaccaagacaattctaaacaaaaagaacaaagctggaggcatcacaccacctgacttcaaattacactaccaggcaacagtaaccaaaacagcatggtactggtaccaaagcagataaatagatcaatggtacagagcagagacctgagaaataacaccacacatctacaaccatctgatctttgacaaacttgacaaaaacaagcaatggggaaaggattccctatttgataagtggtgctgggaaaactggtagccatagacagaaaacagaaactggaccgcttccttacaccgtatacaaaaattaactcaaaacggattaaagacttaaatgtaaaacccaaaaccataaaaaccctggaagaaaacctaggcaattccattcaggacacaggtgtgggcaaatactttatgatgaaaataccaaaagcgatggcaacaaaagctaaattgaaaatgggatctaatcaaactaaagaacttcggcagagtaaaagaaacaatcatcagagtaaacaggcaacctacagaatgggagaaaatttttgcaagctacccatttgacaaaggtctaatatttagaatctacaaggaacttaaacaaatttacaagaaataaacaaacaaccccatcaaaaaatggactaaggatatgaacaaacacttctcaaaagaagacatgtatgtggccaacaaacatatgaaaaacagcgcatcatcactggtcattagagaaatgcaaatcaaaaccacagtgaggtaccatctcacaccagttagaatggcaattattaaacagtcgggaaacaacagatgttggtgaggctgcggagaaattggaatgcttttacactgtcagtgggaatgtaaattagttcaaccattgtggaagacagtgtggcaattcctcaaggatctagaaccagaaataccatttgagaccagtaatcccattcctgggtatatacccaaaggattataaatcattctaccataaagacacatggacacatatgtttattgcagcactctatgcagtagcaacgacttggaaccaatccaaatggccatcaatgacagactgaatatagaaaatgtggcatatatacactgtggaatactatgcagccataaaaaagaatgagttcatgttctttgcagggacatagatgaagctggaagccatcattctcagcaaagtaacactgaaacagaaaatcaaacactgcatgttcatactcataagtgggagttgaagaatgagaacacgtggacacagggagggaaacatcgtataccagggcctgtccgggggggctgggggtcaaggggagggagagcattaggatgaatacctcatgcataccgggattaaaacctagatgacaggttgataggtgtagtaaaccaccatgtcacatatatacctctgtaacaaacctgcgggttctgcacacatgtatcccagaacttaaagtaaaataaacaaacaaataaataaataaataaataaataaataaaataagtcccaccaaaacaaaaactgttagaactattaaatacatttggtaatatttcagaatacaaaatcaacacataaaaccatctaatggacagccatgatggctcatacctgtaatcccagctcttggggaagctgaggtgaaaggattggttaggatcaagagagttcaataccagcgtgggaaatgaagtgagaccctgtctcaaaaacaaacaaacaaacgaacaagcaaacaaacagggttcttatatttctatacttaatcaaccaaacaggaaacaagaagacaggacacaacgcaaaatgaaattaagaaaacaattcaatttacaatagcatcagaaagaataaaatacttaagaatcaagaaggggactcttctatactgaaaactataaaacattgctaaaagaaattaaagaatacacaaataaatggaaagaaacattgctaaaagaaattaaagaatacacaaataaatggaaagaaaacatttgttcatgaattgaaaaacttgatattgttaagaaatcaatacaaaccaaaagaaatctacagattcatttcaatctctattaaaattccaataatttttttgcaaaagtagaaaaaattaattctaaaatttacatagactatcacaggactccaaatagccaaaatgatcttctaaaagaagaacagtgttggagatttcacacttcctgatttcaaaacatactacagagctacaccaatcaaagcagagtggtacagatagacagacacagagacaaatagaatagaattgagcacccagaaagaatctcttagttatatgatcaaatgattttaaataagggtagcaagaccattgagtggggaaaggacagactccataaaaaatgtttttgagaaaactggatatccacatgcaatgtggaaatggataaaagacccaaatggaaaagccataactgtaaaaatcttaatagaaaacactaggaagaagtttaacaacattgggtttggaaatgatttcttgtatttgacgccaaaagcacaagaaaaaaaaaagaaaaagaatatagataaattggatttcatcaaattgtaaaatttatgtgcaacaaaggactctatcaacagagggaaaatgcaaatcatggagtcagaaaatattttgcaaacattgtatctggtaaggtgtccaggatatagaaagaactcctacaactcaacaggaataaaaaaatagaaacaatctgaataaaacatgggcccaagacttgaatagatatttctccgaagaagatcaataaatggccaataagcacatgaaaagatgtttagcatcactaatcattagagaaatccaaatcaaaccacaataatacacaacttcacacccagtaggatggcgttaccaaaataatagaaaataacaagttctggcaaagatgagtagaaattgtggagaaactataaaatgatgcatccactgtggaagccttatggcagttcctcaaaaaattaaacatagaattaccattttaacagaattttcacttctgggtatgtgcctaaaagaattcagagcagggtctcaaagagaaatttgtacacccttgttcatagcagcattgttcacaatagctaaaaggtagaggcagcccaagtgtccatctaatggataaatgggatatagtatacacacacaagggaatagtattcagccttaaagagagtgttctggcccatgctgtggcacagataaacctgaaagacatcatgccagcagaaataagctggcttcaaaagaacaaaaattgtttcattacccttatatgaggtacctagagtagtaaaagctaccgtgacaagaagtataatgaagtttcccaggtccttggggtggagagtagggggagaatggacagttatttgttttttgtttagtttagttttgctttgttttgtttttgagactgagtctccctctgtcacccagtctggagtgcagtggcacaatcttggctcactgcaacctctgcctcctgggttcaagcgattctcatgcctcagcctcccaagtagctgggattacaggcatgcaccaccatgttcagctaacttttggtattttttagtagagatggggttttaccattttgctcaggctaatcttgaactcctgggctccagtgatccaccgaccttggcctctcaaagtgctgaaatcaaggaagtgagccaccacaccgagccgggcagttcttgtttaatggttgcgaagttttagtttgggaagatgaaaaatttctgaagatgaatggtagcagtgtgattgtacaagttgatttacttagtgacactgaagtgtacacatgaaatggtgaaggtaacaaattttatgtttgaatattttaccacagtcaaaaagaggaagatttatatttggcaccattgctctacttccaagaacagtagaaagatacagtagtaggagagtgtgcacaagtatccaggacgtctttcattttttgccagccctgcagcatcctaacaatccaagagagcaggaggtgtctcattacaggggactcagaataatgtgaagaaatctggggcggggtgggggcataatgatagcacacaggtgccggacccagtccaggagtggccacaaatgcaagggctgcagaagagggggagatgaagctggtggcagtggtagcagctgcttcagctggaaaggggcatctgttgctttccaaagtggttcacagttgaaatatctggcatagatacttcatcctgcctacctttcatgactaactatattttcattgcaatatatgcagtcatagtgagaatacctatttcctccagatacaagcaaacgtgaaggaaatgtgctttagtgctttggccaacttgacatggcagtcacaaaaagaggatgaatatccaaagacaaccttttccaaagataaggttattataccgtttattgtaaatactggaagtgcacaacaatcattcagacacctgggaaaatgacttgaccaaatacagttgtgaaaacaatgagtaaagaaagtgatatattcttggtaaaagaaccactggatctagtgagtaaagaaccaaaaggagatgaccctagattggaacttttagaccaggaccttggtaacattggtcctgtttatgcaacaaaaacaaagcaataccttgtctaccagtgagaatctgaatgagggaacagcaacaggaagcagcagaaaaaaggaaaagaagctcagtgcaaacagctgaatggggagatcacagggaccaccaagaaggcccagggttttctgctcagtgccttccctctcatacaccttagagcacccactgaacaaagataactaccagtatattctagctgagcctgatccccacgcccttggtcctcagaagcttgaacttgactgctgggcaaaattccttattcctggagacctctacagaggctgcttgtatgaacaggttttgttagcctgacataattgagctccccagttaaaagtctccaatgacctgctggctgactgtggttgaacagaaggtctactctatggtacgggattctcatgggttaccttgatatcaccatggatgagatgccaccagacactgctgccagactgggttggtcccagtctttagataactgtcaagcttccttagtttatgataagtttaactattcttgggagaattaaagggaatgaagttccaccagtccactggcaaacactactcttctagctatagacaaggagacatcctgggattttatatgaatcttcctgaagaaacaaagacagtcaagtcattgcctgatacttacaaagataaggccttgataaagtttaagaattatttgtgttttgaggaaaaagactttgtgactgaagcagagaagagcctaaaagagacttcccacagtgagataagattttataaaaatggtgttagtcaaggcatggcttacaaagatattttcaaggggctttactttccagcaatcttaccagaaaacaactgcataatttccatgaacattggactgtgcttcaagtatcctccaaaggatctcacttactgccctatgagtgacatgggctgggatgctctggtagagcacactctggctggtgtcttggtgctagaaatggattcaatcactggacaagaaagtccttcaggggcaaacataaggacactgagggtcatcttattctacctgccttctctccttacttgtatcctaggccagcctatgctagcgcaactgtccacagatctctctctctctttctgtctctctctcgtgtgtgtgtatgtgtgtgtgtgtgtgcatgtgtgtatcaaatgatcaaacatcttcattcaaaagtccaagccctgcagcatcatgagacagtgctaccacacatgaagaaaatgttcaaagggcaccaaatagagatcgcatgatccaaagttatttctgatcccagaaaagaatggcacacaatcaatatgaatagtattagatatcaaaattatagtacaatctcatttgtttttaccatagattcaaactctctttagcatattggaaagcagaatccatgttctactgatgcaattccccttgaccatcatgaaagaattggactgaaagcaggacatttctgaagtctctggaggatacgtaacatgactgttggagggaatgcacataggaagaggtagtgaattatgtgtcaagtgccccaacaaaaggctgtcagtgtttgtctctgacacattgttggggagaaaggtggagtcacaggacacactgccatgggacccacgagacttgatcctacatcccacagcgggcagcctgcatcaacgtggtcatgcagggatagaaacacagccacagaaagctttcacctgcccaagcagcatctcccaagagccagcatgggtgctgtctctgctctgcttcttcctggactgtgtctcagagccctgagttctccctcacccagtttcccaatccccctcttctccactggttaccaggggttaggggagtggggaggggaaataaacgtttaaagggtacaaacttttcacttgggatgatgagaaagttatggaaattcataatggtgatgactgtatcacttttttttcagaggtggtaacttgctctgttgcccaggctggagtgcagtggtacaatgatagctcactgcatccttgaactcttgggtctaggcaagcctcctgcctcagactcctgagtagctgggactacaggtgcaagccaccatgccaggcaattctatcacattgtgaatatacttaacaccactgaattttacagttaaaagtgatttaaatggcaaattttatgttgtgtgtattctatgacaattaaaaatacacttgttcaaatgtcaaaatatatatgatgttatattcataaaattttccttttcacacttatatatttatcctattctaactcattctcatcaattaaaaaagtactgtaattactggtcattatgtactaaattttccataattcacattgaagccttaacccccaatattactgtatttggagacagagcattacagagggtaattaagatgaaatgagatcataaggaccggcatccttataagaggagattagaaaatggacaacataaaatgagatgaggacagagtgagaaggtggtcatctacaagtgtggacacatcttcagtttgtgtggagtaacagttgaagggctcgcccatcctataatgaaagttggaacaggtgccttgggcgggctccaggattaactgatc

SEQ ID NO: 28762 - DNA, 1371 bp, Homo Sapiens
atgttcgaagagcctgagtgggccgaggcggccccagtagccgcgggccttgggcccgtaatctcacgacctccgcctgcggcctcctcgcaaaacaagggctccaagcgccgccagctcttggccacattacgggccctagaggcagcatctctttcccagcatccccccagcctatgtataagtgactctgaggaggaggaggaggaaaggaagaagaaatgccccaaaaaggcatcatttgccagtgcctctgctgaagtagggaagaaagggaagaagaaatgtcaaaaacagggcccaccttgcagtgactctgaggaagaagtagaaaggaagaagaaatgccacaaacaggctcttgttggcagtgactctgctgaagatgagaaaagaaagaggaaatgccagaaacatgcccctataaattcagcccagcacctggacaatgttgaccaaacaggtcccaaagcctggaagggtagtactacaaatgatccaccaaagcaaagccctgggtccacttcccctaaaccccctcatacattaagccgcaagcagtggcggaaccggcaaaagaataagagaagatgtaagaacaagtttcagccacctcaggtgccagaccaggccccagctgaggcccccacagagaagacagaggtgtctcctgttcccaggacagacagccatgaggctcgggcaggggctttgcgagcccgcatggcacagcggctggatggggcccgatttcgctacctcaatgaacagttgtactcagggcccagcagtgctgcacagcgtctcttccaggaagaccctgaggcttttcttctctaccaccgcggcttccagagccaagtgaagaagtggccactgcagccagtggaccgcatcgccagggatcttcgccagcggcctgcatccctagtggtggctgacttcggctgtggggattgccgcttggcttcaagtatccggaaccctgtgcattgctttgacttggcttctctggaccctagggtcactgtgtgtgacatggcccaggttcctctggaggatgagtctgtggatgtggctgtgttttgcctttcactgatgggaaccaacatcagggacttcctagaggaggcaaatagagtactgaagccagggggtctcctgaaagtggctgaggtcagcagccgctttgaggatgttcgaacctttctgcgggctgtgaccaagctaggcttcaagattgtctccaaggacctgaccaacagccatttcttcttgtttgatttccaaaagactgggccccctctggtagggcccaaggctcagctttcaggcctgcagcttcagccatgtctctacaagcgcaggtga

SEQ ID NO: 28763 - DNA, 6368 bp, Homo Sapiens
ccatggacctgcgccctgagctgcccaccaccctgggccccgtcagcctgcgccagctggggctggagcacacccgctacccctgtctggaccttggtgccatgttgctctacaccctgaccttctggctcctgctgcgccagtttgtgaaagagaagctgctgaagtgggcagagtctccagctgcgctgacggaggtcaccgtggcagacacagagcctacgcggacgcagacgctgttgcagagcctgggggagctggtgaagggcgtgtacgccaagtactggatctatgtgtgtgctggcatgttcatcgtggtcagcttcgccggccgcctcgtggtctacaagattgtctacatgttcctcttcctgctctgcctcaccctcttccaggtctactacagcctgtggcggaagctgctcaaggccttctggtggctcgtggtggcctacaccatgctggtcctcatcgccgtctacaccttccagttccaggacttccctgcctactggcgcaacctcactggcttcaccgacgagcagctgggggacctgggcctggagcagttcagcgtatccgagctcttctccagcatcctggtgcccggcttcttcctcctggcctgcatcctgcagctgcactacttccacaggcccttcatgcagctcaccgacatggagcacgtgtccctgcctggcacgcgcctcccgcgctgggctcacaggcaggatgcagtgagtgggaccccactgctgcgggaggagcagcaggagcatcagcagcagcagcaggaggaggaggaggaggaggactccagggacgaggggctgggcgtggccactccccaccaggccacgcaggtgcctgaaggggcagccaagtggggcctggtggctgagcgcctgctggagctggcagccggcttctcggacgtcctctcacgcgtgcaggtgttcctgcggcggctgctggagcttcacgttttcaagctggtggccctgtacaccgtctgggtggccctgaaggaggtgtcggtgatgaacctgctgctggtggtgctgtgggccttcgccctgccctacccacgcttccggcccatggcctcctgcctgtccaccgtgtggacctgcgtcatcatcgtgtgtaagatgctgtaccagctcaaggttgtcaacccccaggagtattccagcaactgcaccgagcccttccccaacagcaccaacttgctgcccacggagatcagccagtccctgctgtaccgggggcccgtggaccctgccaactggtttggggtgcggaaagggttccccaacctgggctacatccagaaccacctgcaagtgctgctgctgctggtattcgaggccatcgtgtaccggcgccaggagcactaccgccggcagcaccagctggccccgctgcctgcccaggccgtgtttgccagcggcacccgccagcagctggaccaggatctgctcggctgcctcaagtacttcatcaacttcttcttctacaaattcgggctggagatctgcttcctgatggccgtgaacgtgatcgggcagcgcatgaactttctggtgaccctgcacggttgctggctggtggccatcctcacccgcaggcaccgccaggccattgcccgcctctggcccaactactgcctcttcctggcgctgttcctgctgtaccagtacctgctgtgcctggggatgcccccggccctgtgcattgattatccctggcgctggagccgggccgtccccatgaactccgcactcatcaagtggctgtacctgcctgatttcttccgggcccccaactccaccaacctcatcagcgactttctcctgctgctgtgcgcctcccagcagtggcaggtgttctcagctgagcgcacagaggagtggcagcgcatggctggcgtcaacaccgaccgcctggagccgctgcggggggagcccaaccccgtgcccaactttatccactgcaggtcctaccttgacatgctgaaggtggccgtcttccgatacctgttctggctggtgctggtggtggtgtttgtcacgggggccacccgcatcagcatcttcgggctgggctacctgctggcctgcttctacctgctgctcttcggcacggccctgctgcagagggacacacgggcccgcctcgtgctgtgggactgcctcattctgtacaacgtcaccgtcatcatctccaagaacatgctgtcgctcctggcctgcgtcttcgtggagcagatgcagaccggcttctgctgggtcatccagctcttcagccttgtatgcaccgtcaagggctactatgaccccaaggagatgatggacagagaccaggactgcctgctgcctgtggaggaggctggcatcatctgggacagcgtctgcttcttcttcctgctgctgcagcgccgcgtcttccttagccattactacctgcacgtcagggccgacctccaggccaccgccctgctagcctccaggggcttcgccctctacaacgctgccaacctcaagagcattgacttccaccgcaggatagaggagaagtccctggcccagctgaaaagacagatggagcgtatccgtgccaagcaggagaagcacaggcagggccgggtggaccgcagtcgcccccaggacaccctgggccccaaggaccccggcctggagccagggcccgacagtccagggggctcctccccgccacggaggcagtggtggcggccctggctggaccacgccacagtcatccactccggggactacttcctgtttgagtccgacagtgaggaagaggaggaggctgttcctgaagacccgaggccgtcggcacagagtgccttccagctggcgtaccaggcatgggtgaccaacgcccaggcggtgctgaggcggcggcagcaggagcaggagcaggcaaggcaggaacaggcaggacagctacccacaggaggtggtcccagccaggaggtggagccagcagagggccccgaggaggcagcggcaggccggagccatgtggtgcagagggtgctgagcacggcgcagttcctgtggatgctggggcaggcgctagtggatgagctgacacgctggctgcaggagttcacccggcaccacggcaccatgagcgacgtgctgcgggcagagcgctacctcctcacacaggagctcctgcagggcggcgaagtgcacaggggcgtgctggatcagctgtacacaagccaggccgaggccacgctgccaggccccaccgaggcccccaatgccccaagcaccgtgtccagtgggctgggcgcggaggagccactcagcagcatgacagacgacatgggcagccccctgagcaccggctaccacacgcgcagtggcagtgaggaggcagtcaccgaccccggggagcgtgaggctggtgcctctctgtaccagggactgatgcggacggccagcgagctgctcctggacaggcgcctgcgcatcccagagctggaggaggcagagctgtttgcggaggggcagggccgggcgctgcggctgctgcgggccgtgtaccagtgtgtggccgcccactcggagctgctctgctacttcatcatcatcctcaaccacatggtcacggcctccgccggctccctggtgctgcccgtgctcgtcttcctgtgggccatgctgtcgatcccgaggcccagcaagcgcttctggatgacggccatcgtcttcaccgagatcgcggtggtcgtcaagtacctgttccagtttgggttcttcccctggaacagccacgtggtgctgcggcgctacgagaacaagccctacttcccgccccgcatcctgggcctggagaagactgacggctacatcaagtacgacctggtgcagctcatggcccttttcttccaccgctcccagctgctgtgctatggcctctgggaccatgaggaggactcaccatccaaggagcatgacaagagcggcgaggaggagcagggagccgaggaggggccaggggtgcctgcggccaccaccgaagaccacattcaggtggaagcgagggtcggacccacggacgggaccccagaaccccaagtggagctcaggccccgtgatacgaggcgcatcagtctacgttttagaagaaggaagaaggagggcccagcacggaaaggagcggcagccatcgaagctgaggacagggaggaagaagagggggaggaagagaaagaggcccccacggggagagagaagaggccaagccgctctggaggaagagtaagggcggccgggcggcggctgcagggcttctgcctgtccctggcccagggcacatatcggccgctacggcgcttcttccacgacatcctgcacaccaagtaccgcgcagccaccgacgtctatgccctcatgttcctggctgatgttgtcgacttcatcatcatcatttttggcttctgggcctttgggaagcactcggcggccacagacatcacgtcctccctatcagacgaccaggtacccgaggctttcctggtcatgctgctgatccagttcagtaccatggtggttgaccgcgccctctacctgcgcaagaccgtgctgggcaagctggccttccaggtggcgctggtgctggccatccacctatggatgttcttcatcctgcccgccgtcactgagaggatgttcaaccagaatgtggtggcccagctctggtacttcgtgaagtgcatctacttcgccctgtccgcctaccagatccgctgcggctaccccacccgcatcctcggcaacttcctcaccaagaagtacaatcatctcaacctcttcctcttccaggggttccggctggtgccgttcctggtggagctgcgggcagtgatggactgggtgtggacggacaccacgctgtccctgtccagctggatgtgtgtggaggacatctatgccaacatcttcatcatcaaatgcagccgagagacagagaagaaatacccgcagcccaaagggcagaagaagaagaagatcgtcaagtacggcatgggtggcctcatcatcctcttcctcatcgccatcatctggttcccgctgctcttcatgtcgctggtgcgctccgtggttggggttgtcaaccagcccatcgatgtcaccgtcaccctcaagctgggcggctatgagccgctgttcaccatgagcgcccagcagccgtccatcatccccttcacggcccaggcctatgaggagctgtcccggcagtttgacccccagccgctggccatgcagttcatcagccagtacagccctgaggacatcgtcacggcgcagattgagggcagctccggggcgctgtggcgcatcagtccccccagccgtgcccagatgaagcgggagctctacaacggcacggccgacatcaccctgcgcttcacctggaacttccagagggacctggcgaagggaggcactgtggagtatgccaacgagaagcacatgctggccctggcccccaacagcactgcacggcggcagctggccagcctgctcgagggcacctcggaccagtctgtggtcatccccaatctcttccccaagtacatccgtgcccccaacgggcccgaagccaaccctgtgaagcagctgcagcccaatgaggaggccgactacctcggcgtgcgtatccagctgcggagggagcagggtgcgggggccaccggcttcctcgaatggtgggtcatcgagctgcaggagtgccggaccgactgcaacctgctgcccatggtcattttcagtgacaaggtcagcccaccgagcctcggcttcctggctggctacggcatcatggggctgtacgtgtccatcgtgctggtcatcggcaagttcgtgcgcggattcttcagcgagatctcgcactccattatgttcgaggagctgccgtgcgtggaccgcatcctcaagctctgccaggacatcttcctggtgcgggagactcgggagctggagctggaggaggagttgtacgccaagctcatcttcctctaccgctcaccggagaccatgatcaagtggactcgtgagaaggagtaggagctgctgctggcgcccgagagggaaggagccggcctgctgggcagcgtggccacaaggggcggcactcctcaggccgggggagccactgccccgtccaaggccgccagctgtgatgcatcctcccggcctgcctgagccctgatgctgctgtcagagaaggacactgcgtccccacggcctgcgtggcgctgccgtcccccacgtgtactgtagagttttttttttaattaaaaaatgttttatttatacaaatgg

SEQ ID NO: 28764 - DNA, 7239 bp, Homo Sapiens
cggacgcgtgggctgctgcggagccggcagcgcaggcgggcggagcggagctgcccccgtggtggcgggcgatgcccccgtgagcctccctcgccgcccctccccgccccgcgtgcctatccactcggagtccgcgccagcctggggccgggccgcgcctactgccgggttcgcggggcggggtcccggggcagcacctgccccgccttgcggagccgcctcggcctgtggaggccccctccctgtctggaccccggccccacctccggacccttttatcacatcgcctcctctgggagcctgccctgattgccttcacctcatttcttgaaaattggtgttttggcagaagtcaattgaagccttgtgcaaatgccctaggggtgtgctgttgggaggcagccccctgtgatgcggaacaccaggctcagattcatcagttcgagctgcctgaggccctgccaccccggggaccatgtttaacggggagccaggtcctgcctcatctggggcctccaggaatgtggtgcggagctccagcattggcggtgaaatctgcggatcccagcaagccgggggcggggctgggaccaccaccgccaagaagcggcggagcagcctgggtgccaagatggtggccatcgtgggcctgactcagtggagcaagagcacactccagcttccgcagcctgaaggggccaccaagaagctgcgcagcaacatccgccggagcacggagacaggcatcgcggtggagatgcggagccgggtcacacgccagggcagccgggagtccaccgatgggagcaccaacagcaacagctccgacggcacgttcatcttccccactacccggctaggggctgaaagccagttcagcgatttcctggatgggctgggaccagctcagattgtggggcgacagacactggcaacaccacccatgggagatgtgcacattgccatcatggaccggagtggccagctggaggtggaagtgattgaagctcggggcctgacccccaaaccaggctccaaatccctcccagccacctatatcaaggtttacctgctggagaatggggcctgcttggccaagaagaagacaaagatgaccaagaagacctgtgatcccctgtaccagcaggctctgctctttgacgagggaccccagggcaaggtgctgcaggtgatcgtctggggagactatggccgcatggaccacaagtgcttcatgggcatggcccagatcatgctggacgagctggacctcagcgccgcggtcaccggctggtacaaactcttccccacctcctcagtggcagactccacactcggatccctcaccaggcgcctgtcccagtcttccctggagagtgccaccagcccctcatgctcttaaggatgtcaggaagaggccaggatggtggtgtggggaggggtgcctgctggccccatgtcctcccctgtacatagtcttcgtgtctttctggaccccttgtcctgctgcatgcctgttggctactgggctcatcccagctggcagtggagactgtagtgtgtgcgtgtgtgcgtgcgtgtgtgtgtgtgtgtacgtgaccacgttctatctgttcatttgtctgggtatagtcactcctggtgatgatatgggctgaaatgtctccacgtctctttgtgtcttgttgaaaagaaacccaaaggagtgttgtgtggacatgactcaccctgaggagtctccagggatggaggtggggcatgcggccactggtcggtgctgcctggtcctggcctggggcagagcctgtgtgttcttcacctgtgcctgctcctggtggtctctgctttgttttctgtcttgtcttttgttccactcttgactctcccggctctgccactgttttctgagaaatgtagcatccgctgcagctggccacactgagggccctctgggaaccccaccccactggagccgctccggcagctcttcctgccactgaatgcgttctgcagcatgtagcatgcccacctagctccctggccagggccctggggaggcagagggtacccaggggactgagggcttagaaatgactttctctatgaggctggaacctcctccttcttccagtgaagcacgaggtcttggttccagggttcctggccaggtgcccccttagcatttgttcttcatctcctgtctcttcaagcctccccactccaccgtgccgaaggagctctgccagtgggcctgggcaggcagccacagagggcatgttatctgctaaagcaaacagtcctcctgaggccctgagggtggccctgaccccctcagggctcattcctggtgggcatgactcggtaaggaggttctgtgggtagggctgtttgctggaataaggagggctgaggctgagttgttccccgccactgttgaggatcccatctgacatttggggattcactgcatgaagttgttcatttggggctccagtttttgtgcatttccagaccagggtccctgtctgggagctcagacttagctgggctccagcagcctggctccggactctcgtctgccaccatcaccagctctgtctaagcaatacttacccctccgggcttccctgctttcctgtgccccactgctgccctctgcagagccatctgctccaggcacccacctgcctctgcttgctttctcacccatgtctggttggagcttctcacagccactcaaaccctgacttgatttgacaactgggccctgttggtggagaccagtgcctgaactggaccctgtgaaatctgtcccgtgggaatcctgaagtctgactcaggaatgcccagacctgtccctgtccctcctcagctctagggtgaaaggcgagaggttgcacaggacatggacagagcagcccttgggtttgtatctggtaggggagaaagcagcaggacagtggaggtgtgtggaaggcactctttccacctctctccaggcattatccccaggtgctgaaatggctgtggccccagcacctgaggcaggggtacgctacctggggtagcagtagaaaggtcttggggtctgaatgacttggggcctccattcataaccaaagttgtaggggcatggaggcagtggcgccttatggataggtcatctcagcccaaagggcctccttggctggcatggttctgtgttacgttgaagccagagtcttataacacctcccaagaaagataggggaagaagccagaaccccacctggcctgcccacaggacaagaagtgggtaagggcaggaaggaaatgaacggagttagctcccaggctcctatctctgcctgagcctctattcttatattatcagagaaagggaccattgggtgcatagagatggggaggaggccactgggctgaattttctctttaggcggaaatgctctccccaggcccattgcgttcgtcaagttcttggaaatggacaaagggctctgtcctcctcgaccctagtgggggatcaagaaggaaactccgttgcaaaagggtattttaatctcctgtttatgatatattcacctctagagcagtcactgtcagggtgttgcgaaaatactctacacctttgggatgatagggttgttagtgacccacaggacagtatagatgtttgtggatgtagcactgagtggtgatacccagaccagcagtcaccccaggaagtgggggctacccataccctcattcctctggtggggagctgcctgcagagaggcctgccactgggggttccaggccgtggtgacccttgcctctggggaagggttagcacaggggaggttctagctggaggaggggtctgatgtgctggtaacttgggctgacctacctacagtccctggctgccaaaactgctcagcagttgggccactccactattccacctctctaaaagaaggtaatttcctccccaaattgaccttggggaattattcttttaaccctttgcaccaaataagttactcatccccacctggattttaccccatgagggtaaagttgtgtgaggctgacacgtctgtgtgatgcagtgtggctgcacttaagggtctgtttctcagcatcatggatgcaggggcttgtctgaaaagccactctggacctagcctgtcccagaagaggagaatgcacaagtgtaactcctggttgtttgctggggtgggggagcatctgctgtttgaggacggggggtggggaaggaaggaacatgatccctccagaagtctcccaccctggggccaactcactgccatgttcagtgtcccggctccaaatgcccccttgcccagatgaaaccctgcagtggttacaggaatggagctctttgtcattccacctcctctggtcaggcgaggttcactgtgcatatggcagagacaggagtggccctgcagtgatgttgggttgtgggcagggacagtgatggatgactcagagcgtctgtctttgtatttctgctctgttcattctgtcccactttcttcatagactccttttccctgcaatgggtttttggtatgaaaaaggctccagtaaatggagccaagtcttggtttgacaaggggaacttgatccttcagggaagaatcatctccaaaatgactccccatctggtttcttctaccacccaattctactaggaaaggagcacttaggaggctcttgggatgcagcaagtcccaggcaatgccagcatttcatgggggctgaggcagaacccaggagctccaagaaaggccacccatagagctcatcctctgtggaatcactgccggttagaacactgaggtcaagccagtcctcccatggtcatgccacccaccagggaagcatgcctgatctcttctttactgccagccttgaggagagcagaagcctccatttttaaagacaataaagacctccaagggtacttctttggaaatgaaatgtagcacaatcttagcctacgttaccaggagccctgacatgcaaccagggtccctcttccatgccctgctgcccaggagttgctgagctcctcttcccctggggttccagccctcctaatacctcatattccccatcttcctcagcccagaaagcaatggggctttagtgatgctcctcttttgtgtctctctggttgcctctagcactgtgcaaactctgcaagaaattgctgcctttgcttgatgttgtagatgagttgccctccacctggctggagagatggcacatcattcagggccagaaggttgtccagcagtgtttctgcagtggctgcagggagatggaaaagaagagccctgcttccctgcctcctcctacctttctcttccactcctcagagttttcttctccagtatcctgacatgtaaagagattctttaaaatgctgcttcttctactggactgtctttcactgagtagtcagggaggagatgaaaatgtggacacatccccccgccttctccctcaaccttttcactcacgtcagaagaggttggggcaaaacaaaacaagcatgattgaagagcaggggaagcccacacaatcaggtgagccctgatgggggctggactggcctggtctggctgggaaaggattcttttaaaagcgtgcctgagcatctcagagcaatgtcagtgatgccaaagagagcaacttggcctccttgggcaccaactctgatggctgagttgcacaaacgtggctcagatgttggcatgcccgatggtgggaccttgttctctgataaagggcttaatctttccatgtagcaaagcaactttccctccctcccctccccccgaaccctgagcttgggcttgtgtgggcccagcatggctgtgcctgtgagggaagccacatcagtgagagaaagttgcattctctcaggggcctagattggcttggggcaggtgcttgttgaaaagcatgagtgtttctgctttgggaaacccttccagggctctggttggaaacttggccagtaaggacagggccttgggcctcccaaggagttcacaatgatgccaggaagggtccctgagcctgggttccagtcagcttggctaacagaatggggcttgggaattccaggggcaactgagcatccaccccattagccagtgatctggacagggacagctggctacagggaatcaaaggctgttctgtacagttttaccagaaactgtgaccttgggtaaggctcctcacttttctgggcctcaacttcctcatctgcaaaatcagagcattagctgctctccccatgattccctcccagttttaattaaaagtctctgatctggagcacatgagggttgcgagcctggtgcacctggttcctgtctccgtgggctggtttccttcagcccctgatgcccaggctgggtgcaggctctcatctggtccatgcccagatgctgcctcagacaagaactctgggaatcctaacagactctgctttcctctcttcgtggtttgtcctccctcttttattcttgtgtaatgatgagacataattaagggtcatctacaatggacaattttcaaggtgctgatgtgatgtcacaacctccgctacatcctgagtaagtcagtgtccccaacagcagatgaggctgggtctttcctcatttctgcttctgggatgacatcagtgggagagttgaagatctgagaattctaaaggaaatgttctctgatgggaggagagagggaacttatttcccttcaaagtagtttgcttcttaagaccactcctccctccagaatgtctttaaccagacatcatttcagaaggtggggcagctgcttccttaggaagagtgggcctgatagctcaaccaactcctttagcatgtaaactcacagaaggcaagaacccctttttttagactttccaaatgcatcctgcaaagagagagatagctgatagggactgacaagcacactgtttagataagaagcaattacccttttatatctgtgctctatacattttctatgtgcagcatctttcctaacttgttgtggttcccgggtggcaggtgcacagctgggagggactgccggctgtttcgtacaacattcttgccaattcccttgaggagaaaattcttcacatggcttctgcatgtacagtatttgggcagcaaaacatgattaaagtcagtttgaaaatgg
